United States Patent Application Publication US 2020/0377945 A1 - sequence listing, part 54

SEQ ID NO: 12050 - DNA, 179523 bp, Unknown
  gut microbiota DNA sequence
cgcagcacgccgtagcgtgagtgcgattcgttgtcctgcacgaagcgcacgggacggacctgtgcgtcgaagcggcgctgcgagtagctctcgaagaagtaaccccgcgcgtcgccgaaaacctccggctctagaataaccacgccctctatggcggttgtcagaactttcatgggattatttttcgtcgaggagtttcaaaaggtattgtccgtactggttcctgagcatcggctcggcaagtgcgcgcagcttgtccgccgtgatccacccgttgcggtaggcgatgccttccagacaggcgatcttaagtccctgacgcttctcgatgacctccacgaagatcgaggcttcggccaaggagtcgtgcgtgcccgtatccagccacgcgaagccgcgctggagcgtctgcaccttcagctcgccgctttgcaggaaacactggttcacgctcgtgatctcaagctccccgcgggccgagggacggatgcccttggccacatccacgaccttgttcggatagaagtacaggcccacgactgcgtagttagacttcggatgggcgggtttctcctcgatcgaaaggcagttgccctcatcgtcgaactccgcgaccccgtagcggcccggatcgtcgacgcggtagccgaagaccgtggccttgccatcctcctcggccgtgcggacggcctcgcgaagaagacctgtgaaaccggaaccgtagaagatgttgtcgccaagaacgaggcacgccgaatcgccgccgaggaaatcctcgccgataagaaaagcctgtgcaagaccgtccggagatggctgtgccgcgtagtcgatacgcacgccgtagtcggagccgtcgcccagcagacgccggaaacccggaaggtcctccggagtcgagatcacgaggatttcgcggatgcccgctagaagaagcgccgagagcgggtaatagaccatcggcttgtcgtagaccggaagcagctgcttgctgaccccctttgtgatcggatacagccgactgccgctgccgcccgccaaaatgatgcctttcattattcaagtgaattaatatgcgttttcatcccgcttcagcgcattccacaccgtcaggagcatgatgcgtatatccagcagcagcgaccagttttcgagataccagatgtcgcggcgcacgcggccctccatctggctcaactcgtgggtctcgccgcggtatcccgtcacctgcgcccagcctgtgatgccgggcttgatcaggtggcgcaccatgtatttattgaccagcttggagtaaagctcggtgtgctggagcatgtggggacggggaccgacgatcgacatctcgcctttcagcacgttgatgaactggggaagctcgtcgatgctcgatttgcgcaggaagctgccgaaacgggtcttgcgcggatcgttcttcgtcgcctgcacccggtcggcttcgtcgtttacgcgcatcgaccggaacttgatgcagccgaacgtgcggccgttttcgccgctgcgctcctgaatgaagaataccgggcctttcgaagtcagcttgatgcccaaggccacgaagagatagacgaaggggaagagcgtgcagaggaagacgcaggataccgtgacgtcgaacgcgcgtttgacgaagcggttcgaaacctgccgcagcggctcttcgcggatatagaggatcggtacgttgcccagcagttcgaggttcatcgcgcgtttcatgtagttgcgcaggttgggcacatagtagaaccgcacgaaattgttttcgcagtagtccatgatcgggaatatctcctccagatagcggtcggtggagaggcagcagtacacctcgttgaccgggtggcgtttcagccacggcagggcttcgtctacgctgcccagacacggggtgttgccgggcagggccttgtcgtcgtggttgctgaaaaaaccgagtacgcggtagccggtgctgctgttgtccaccatttcgtgatacacctccagcgcattgtccttgctgccgacgatgatgacccgccgcgagttgcgtccgtgtccgcgggtgatcttgaccgccatgcggcagatgtagcgccacagcatcagcgcgacggtgagcgatatgtagaaggcgccggtcagccggagcggcagcaggccgtaactccacacggtctgtatcagtgtgaagaatccgatgtggcagagtacgacgtaaaacacgcggcgtatgatctcctcgtagggaacgatccgcgaggagaggatcacgccgaaccatgaaagtccggggatgaagcagatgttgagacaggcgaatatctccagcgagtgggcgacgtatgccggctggggaaacagcgtcagcgcgaatatccaagaaagattgagtagaaatagatcaccgataattacaggaagcttgatcagcagggattcctgcatgacttgtttcataaatcgaaaatttagaggcgttaatttccgtattgaacgtatgtcggattacgtatggatgttactgcgaattgttaatctatctttgcgatgtatttcagcggaatataggccgtcagggcggttgcgacgttgcggatcgccacggcgaccttgctgtgtcccttgtggcggatgtagcggccttcgattcctgcgaacatgccctccgtgacgcgtaccggatctcccttttccagatccacgtcctgcggcgcgacgatttcgacgtgctcgttctgcgtggcgacgacggccatgaagtcctgcatctgccgctccggaatcaccgtcggcgatttgctttcgcggtccatgatgtagcggatcggcagggtggtggtcgcttttatctcccgcagccggtcggccgacgtccggatgaacagcaggttgtggatcagcggttcccagaccttgcgtcttttgccgccgtaggtccgttcggcgaagtgcatgggtacgtagctctcgatcccgatactgtccagatagctctttgcggccatttcccggctgtacgtgacgcggattgcgtaccattgctgttcgttttgcggctcttcacacatgggcacaccttggggacacctccgcagacggagtgcggttgtcagtcgttttgattcggtttgttgaaaaaacttgctcgcgtgcattcctacccataggacctgcacatcctttcgtccggtgcaaatataagcaattttccccatacggcaacatcgccgcaggtcgattccgtttgcagcctaaacaataaaggacacaaaaaggtccggaaattccggattcgcgcctctttatgtcctttgtcataccggcacgcaccaaacgatacatgtcggttatcctttcggacgcaaagttaatcttttatttttaattggcaataaacgggcgaattttttgatttttagccgaaaagagaccttttcgccgccccggaggtctgttcggcgtattcgcggccgccgccgggtgacggggccggtctgcttcccttgccgtgccgatgcggcgggccgtacggcgctgcgtccgacttcccggcacggcctgcggcgcattaccggaacagggtgaacctttcgttccactgggcgcgtatcgtgtcgtaataatagcgccacggggacgaccgcaggacgcggcgcagccgccagcggttgtgtatggggccgaacagcttgaagcggagtttggccaaagtccgggtcggcatggggcgcacggcgtatatttcccgcatgaaacgctcaagcatgcccgcatcgcaggccggctccggaacttcggcgcccagataccggacggcggcggccgtcatcagcgcttcgaaacggtccagccggtagtcggccagcgccttatggaacagttgccggtcgatttcatggccgtgccgctccagaaagcaggcccagtcgcagagatgccggacggcgattccctccttctggtagtgcacggccgcatggcggagcaggtatatcgcgttgaaggttgccggcgggacggcgatgttttcgccgatttcgcacacgccctcctgctccagcactgccgtcaacagggcgttcagctcccgttcgctccggttgcgccggacattgagaatggtccggtgattttcgatcagaatgccgtcccacgtatgggacgaatgtttcggaacgtcgaaatagggctgcgcccccatttgcagcagcaggcggtcgccttcgtcggaggccccgaacaggtagatgtcgatgtcgccgcactcacgatgcgccggaacggggtagtccctgctcagccccagccccttcagcaagagcagtcggatgccgttttcggcgaagaccgccgccatcttcgcggccttttcctgctggcggcggtagcgtttctcctgcctttcggccgtcaaggcccagcggagccgaagctcacgcggcggccgcagctcttcgggcagacgctccatgccgtctccgatcaccgcgcatacgccctgatcggccgccatgcggaagatgtcgtcccattcccgtgctgagatttccccggtgacagccggagcgcagtccggtttcagcccgctgcgcagcagctgaaagaagtggcgggtatcgttttccgaatacataagatgcttttgagtgttgcggtgtgtagtgtcgttgccgtgcaaagatagcggatttccgcaaatattcaagatcttgccggaacggccggggttttgcggagcggggcaaatgaaaaaacgtcccgaatgattcaggacgtttcgccgagtttcggactcgtttttagtgatcccgctggggctcgaacccaggaccccaacattaaaagtgttgtgctctaccagctgagctacggaatctccgatgccaagaggggtgtttcccgtttttggtggtgcaaatgtatagaatatttttgttttaccaaaataaaacgatatttttgtaggcgtttaagtgaaaaaattcaattctaaactcatattacctatgtgtaaagcgttaattatcggtgccggaggcgtcggaacggtcgtaacccaaaaaatcgccgccaatcccgtttttacggacgtgatgctggccagccgtaccaaatccaagtgcgacgccgttgcggcggctatcggcggcggccgtgtcaagaccgcgcaggtcgatgccgacaatgtggccgaattgtgcgaactcttccgcgcgttccgtcccgacatcgtggtcaacgtggccctgccttatcaggacctgacgatcatggacgcctgcctcgaatgcggctgcaactacctcgacacggccaattacgagcccaaggacgaggcgcatttcgaatattcgtggcagtgggcctatcaggaccgcttcaaggccgcggggctgacggcgatcctcggctgcggtttcgatccgggcgttacggccatcttcacggcctatgccgccaagcaccatttcgacgagattcattacctcgatatcgtggactgcaacgccggcaatcacggcatggctttcgccacgaacttcaaccccgaaatcaacatccgtgaggtgacgcagaagggccgctattacgaaaacggcgaatgggtcgtcaccgagccgcacgaaatccaccgtccgctcaactatcccggcatcggcgagcgcgaatcctacgtgatctaccacgaggagcttgaatcgctcgtcaagaactatccgaccatcaagcgcgcccgtttctggatgaccttcggtcaggagtacctcacgcacctgcgcgtgattcagaatatcggcatggcgcgtatcgacccgatcatctacaacggcgtcgagatcgtcccgatccagttcctcaaggcggtgctgcccgatcccaagtcgctcggcgccaactaccacggccagacctcgatcggctgccgcatccggggcgtcaaggacggcaaggaacgcacctattatatctataacaactgcgaccacgagcaggctttcaaggagaccggcacgcaggccgtcagcttcaccacgggcgttcccgcggcgctcggcgcgtcgatgtgggccaagggcctttggcgcggcgccggcgtcttcaacgtcgaggagttcgatcccgatccgttcttggccgagctgggcgagcaggggctgccgtggcacgagcttttcgataccgatatcgagctttgatccgcagacccgtttccgatattccccgcaaggtgcgacaatccgcaaagcgcgaacagacgattctgtttgcgcttttttcatgcccggcagcggcccctccccggcgcagatttccgccgggttttgtattctgatcgtggcccgtcctgctggggctgaagattatctcggtgtgcacagccgaccgcgtcgtggtcgtcgatagatattgaaccggggcgcgcttcactatgccgaatcgcggtccgatacctccgccgcaggtccgcgctttttccggagggagatttttccggctgaatatgtataatatatgatacaattttattatctttggctgtcaattaacccacttgatagttatgaaaatgaaatgtatcctatgtacgttaggcgcgcttgtgatgtgcacggcgccggttttcgcacaagctgcgaataagcaagagaaatcggaattcaacccgcactggtttatgcaggtgcaggccggagcgtcctatacgctcggcgaagggcctttcggcaaactcgtatcgcccgccgcggcattgtcggccgggtatcagttctcgcccgtctgggggctgcgtttcggcctgagcggctggcagagcaagggcgcatgggtgtcgccccaaaccacctatcagtataaatacctgcagggcaatgtcgaagccacgctcgatctggccaaccttttcggccgcttcaatccccgccggacggttaatccctacctgttcgccggtgtcggcctgaacggagcgttcgacaacgacgaggccaacgcccttaacgacagcggatatcggctgggcaacatctggtccggaagcaaagtgttcgttgcgggccgtctgggtctcggcgtgaatttccgcttgtcggactgtgtgctgcttggggtggaagtgaatgccaacatgctctccgacaagtacaactcgaagaaggccggcaacctcgactggcagttcaacgcgctgggcggcttcacgttccgtatcggcaagaaccataagaaagcccgcacggcggcggtcgttcccgctccggctccgacccctgcgccggaacccgctcccgctcccgtcgaggagaagcccgcggtgaaggagacgcctgctccggctcctgcggccgttgccgagcgaccggccgaactgcgtgagaacatcttcttccggatcggctcgtcgcagctccgcaccaccgaagaggccaaggtcggcgcgctggtcgagtacctgaaggccaatcccgaagcgaatgtcgaaatcctcggctatgccgatgctgcgaccggttcgcatgccgtcaatctgagaatttccaagctgcgcgccgagagcgtcgccgccgcgctgaagaaggccggtatcgccgcctcccgcatcagcgccgagggcaggggagacaccgcccagccgttccccggcgtcgagaaaaaccgcgtcagcatctgtatcgcgaagtaggagactgctcccttaccggcttgcaacggctgtctgacgactccccgaaattgaaaatcacccctgtcagaacaaactctgacgggggtgaagtcgtaagaataggacttgttggacaacccggcggccggtttcacatcatcccccttatcggcctgtgcttcccgcattcctgtgccgatttgccgcgtgccgtccgacggctaagtataaatacctatttgatagcaattcacaccctgagccgtgcggttttagcagggaaattgctatttttgcaactgttttgaaataaaacgactcgatgattgacttcttgaaactgccttctccgtgttacgtcctcgacgaagagttgctggaccgtaatctggcgataatcgaccgtgtgcgccgcgaatcgggcgctgaaattatcgtggctctgaaggcctgcgccatgtggagcatctttcccgaactggcccgccacagcgacggcgcgacggcctcttccgccgccgaagcgcgtcttgttttcgaggagttcggccgccccgcccatacctacgccccggtctataccgaccgcaatatcgaagagatacttcgctgcagcgaccatatcaccttcaattccgtcgcccagttcgggcgtttcgggccgatggccctgctgcgcggcatttcgtgcggactgcggatcaatccccagtattcgcccgtcgagaccgacctctacaacccctgcgttccgggttcgcgtctgggcgttacggccgacgaactgaaggagctgccggcgggaatcgacggtctgcatttccacgtgctctgcgagtcgcgtccgcaccacctgcggctggcgctcgaagccgtcgaaaaacacttcggccaatacctcgaccggatcaaatggctcaatatgggcggcggccacctgatgacgcacgccgagtacgactgcgacgagctgatcgcgctgctccgggagttcaaggcccgccatccgcacctgcggctgatcctcgaaccgggcagcgcatttacttggcgcacaggctatctggtgtcgacaattgaagacttggttgagaacgccggcgtgcataccgccatgctcgacgtgtcgttcgcctgccatatgcccgactgcctcgaaatgccctacaaaccggcgatcgtcggggcgcacgaacccgccgaaggcgagaagcgctggcgcatgggcggcacgagctgtcttgcgggcgactattacggcgactgggccttcgaacatgagctgaaagtgggcgagcgcatcgttttcgaagatatgatccactatacgatggtcaaaaccacgatgttcaacggcgtggcgcatcccgccatcgtcatcgcccgccgcgacggccgcatcgacgtcgtccgcgaattcggctacgaggacttcaggaaccgcatgtcgtaaataacacaaacacaaataaatgaaagattttacacctactccctacacgcttgagtgcgtcgccacggggcgcgaattcgaagatacgggctggatgcttgccgatccgcagtgcaagacgccgtcgctcgtgcgcgccaagtacgcccgcaggcagctcgaagtgaaacccgacgaatacggtttctacaaattctgcgactggcttcccgtccgccgcatgctcaaaggctcttcggcgcccgtcacctacaagagcaaggggcttgcccggcacctcggacttgagaacctctacataaccttcaacggctactatccggctatcggcgccacgatgtccacctgctcgttcaaggagaccgaagctttctcggtctgcgcgcgtgccgccgaggacgaagagcgcgtgctggtagtggcctcggccggcaatacggcccgcgccttcgccaaggtatgctccgacaaccacatcaaactgctgttgtcggtgccttacgacaatatcgaggccctctggttcgagcatccgctcaacccctgcgtgaaactcatttcgtgcgagaagggcggcgactatttcgatgccatccacctgagcgacatcgcccttaaaggccccggcttctatgccgagggcggcgcgaagaacatcgcccgccgcgacggcatggccacgacggtcctttcggccgtgacgaccatcggccgcattcccgactactattttcaggccgtgggcagcggtacgggagccatcgccgcatgggaagccaacatgcgcctgatcgaggacggccgcttcggttcgaacaccatgaaactcatggtgtcgcagaatgcgcccttcgtgccgatgtacgacgcatggcaggccggttcgcgcaagatgctggcctacgaggacgacaaggcgcgccgcgatgcggagatcatcgacgccaaagtactctcgaaccgccgtccgccgtacggcattacgggcggtctgtacgacgcgctgaaggccaccggcggcgaattcttcgtcgccaccaacgccatggcccgcaaggcccgcaaactcttcaaggagctggagggcgtcgatatctactcggcgtcgggcgtcgcgctcgcgtcgcttgtcaatgcggtcgccgcgggcaagatcgagaaggacgccgtcgtcatgctcaacatcacgggcggcggcgaggagcatttcaaggaggacaaggagctgtggtacctcaagccgagccacgtttttccgctcgaacccgatacggacgacgtggtcgccaaggtcgaggcgctgtttgcgaaaaacattgcagaatagcacgatacatagattgtctgcaccttcggttgcagcggtcgccggttggttccggggagaaaattctccccggaattttttttgcaggatttccggctgatttgtgtcggcgggagtgcgctcccgtctctccggacctttttcgcaccggcgggggatgcggccctccccggctcgcgcttttcccgatgccggcagctgccggtgcggcgtgcttcccgcggagcgccgctttgcgccggcgctgacggccgtaaacgcggatgcggacctaaccgcccgcgccgctcagccggcggccgggagcgcataagcgcgcaatgttgaaaaagaaatggctgcaaaagtcggaaaactgccggaaaaagttacctttgcagcggtttgaaaagcgggggcgcagccggacccgctttccggccgctgtaaattattttatcaacccaacaaaaacaagatgaaaaacatccaagcaaagcagactccctgcttcaggcgttggagccgcaaaggctggtcggccttcgcgagcctgcaccgccatgtaaccatcggagtcctcgccgcgacgatgtcgatcctcttgctcgcgacgcaaagtgcgtctgcgcagcatgccgacacggccgccgtcctccgtacgctgaggatcgacgaggtcggcatatcgggcagccagactgccccgacgcgcaacgtacagtcgcaaaccccgcttttcgaccggaaagcacaggccgcagcgcccgtccagactctggagtccgccctgcgcctcgcaccttcggtcgatatccgcgaacgcgggggcaagggcatgcaggccgacatcttcattcggggaggctctttcgaccagacgatggtccttctcaacggcattgattttacggacgcccgcaccgggcaccagtcccactcgcttccggtcgatctcgactgcatttcggccgtcgatctgctggacggcgtgccgggcgtcggggcctacgccggggcggtcaatatccgcacggctcccctcaggccgacctacctgcgtttcgagggcacgggcggccagcacggctacgcctatgccaacctttcgggcgccgtgactgcgggccgcttctcgttgctcgccgcggggtcctaccgccgcagcgacggctaccggcacaacaccgatttcaccaacggcaacgccttcctgcgtgcgacctacgagacgcggcggctcggattcttcgatttccaagccggctggcagaaccgcggcttcggctccaacggtttctatgcggcctacaatcccgaccagtgggagggcacctccacctcgctggcgtcgttgcggtggctcaggcaggccggacgcttctcgctgggggcctcggcgagctaccgcaagaatttcgaccgctacgactggacgcgcggcacggtgatgaaccgccacaataccgacaatgcgggtgcgcggctctggaccgacttcgactggaccggcggtacgactacgctcggcggcgactatgccttcaaccatatctacagcaccaatctcggtgaaaaactctccgtgccgcacggccattacacgcatgccaaggcccgccatacgggcaacgtctggctgcgtcacgccaagcagtggcggcgcttcgatgcggccgcttcggccggcgtcagcctgacgccttacggcacttcggcgttgtggaacgtttcgggcggctggcggcccgctgcgggactgcatctggccgtcggggcgtcgcagtcgatgcgcctgcctaccttcaccgatctctattactcctcgccggcgcagatcaacaacctcgacctgattccggaaaaggctgttacataccgcattgaagccgattatgtaaaggaccgctggagtgcttcgctgcgcacctactaccgtgccggacgcgacatcatcgactgggtgtggcgcgaggatatggacggcaagtggcactccgagcagaccagccgtctcgatacctacggtgtcgagctgacgggcggctatgccgccgccgaaggtttcctgcggcgtgcgacgctctcttacggctacatcacgaccgaccgcaatacggaggtcgtcgcccgcagcgccatggacttcatgaagcacaaggcggcattggccgtcgaagtgcgtttcctgcgccgcatgtcgctggcgctgaccgcttcggtttacgaccgcaacggcagctatacggactatccgacgccgggcgacgcttctgtttctcaggtgcgcgactacgaaccctatttcctgcttgacggccgtctgtcgtgggaaaaaggcgtctgccggctctatgtcgatgccacgaacatcaccgatacccgttactgcgatctgggcggcatccgcctgcccggcgcatgggtcacgggcggcgtggtgctgatcatcggccgctgacccctctccggccgcgctcccgcccgccgcataaggcgcgggaacccgaccgctctccttttccggctgcaatcctgcccgtcgcctcgtgcggcgggcttttttgtcgccgggcggctttccccggcggcaccctccttcggcggttttctccggcgtctgcagccgcccgcttttgtacgataattccccgatggtgtcatttcagcatgtgaacctccttttttccttacgaatttttcagttttgtccgggtttttcttatctttgaaaagaagaatcaatataaccgcacaacatatggaaaagcgtattgtggaatgcgtccccaacttcagcgagggacgcgacaaggcagtaatcggccggatcgtatcggccatcgaaacctccgggggcgtcaaagtgctggacgttgatcccggcgaagcgaccaaccgcaccgtcgtcacgttcgtcggctcgcccgaagccgtcgtcgaagcggctttcgcgggggtggaaaaggccgccgagctgatcgacatgcgcaaacacaagggggcgcatccgcgcatgggcgctacggacgtgctgccgctgatcccgatcgcgggcatcacgctcgaagagtgcgccgaactggcccgcaaactggccgagcgtatcgccggggaactgcatgtcccgacctattgttacgaagccgcggcgtttacgccccggcggcgcaatctggccgtctgccgcgaaggagaatacgaggcgctgcccgaaaagctggcgcacgaggagtctgcgcccgatttcggggcgcgtccgttcgacgagggggtagcccgcacgggcgccacgaccgtcggtgcgcgcgatttcctgatcgccgtgaatttcaacctcaataccacctccacgcgccgcgccaacgccatcgccttcgacgtgcgcgaaaagggccgtcccgtccgcgaaggcaatccgatcacgggcaaggtggtcagggatgccgacggcaatcctctgatgcggccgggcacgctccgggcgaccaaggccatcggctggtatatcgaggagtacggcatcgcgcaggtttcgatgaacattaccgacatcgccgtaacgccgctgcacgtcgccttcgacgaggtgtgccgcaaggccgatgcccgcggcgtgcgtgtgacgggcaccgaaatcgtggggctggtgccgaaacgcgccctgctggaagcggggcggtatttccttcgcaagcagcggcgttcggcgggcatcgccgaggaggagatcgtccgcatcgccgtcaagtcgatggggctggacgacctgaaacccttcgacccgaaggaaaaggtgatcgaatacctgcttgaagcggaggatcagaagaagcggcttatcgacatgacctgcaaagggtttgccgaggagacggcgagcgagtcgcccgctccgggcggcggttccatcgcggcctatatgggcgcgctgggcgcggccctcggcacgatggtcgccaacctctcgtcgcacaaggcgggctgggacgaccgctgggaggagttctccggctgggccgagaaggggcaggcgctgctgcgcgagctgctgcatctggtggatgaagatactgcggcgttcaaccgcatcatggccgttttcgccatgcccaaatcgaccgacgaggaaaaggcggcacgcagtgcggctttgcaggcggcgacgctctacgccacgcaggtccccctgcggacgatgaaaacggcgttcgaggtctttgcgatcgtgcgcgccatggccgccgaaggcaatcccaattcggtctccgatgcgggcgtcggcgcgcttgcggcccgcagcgcggtgctgggggcgtgtctcaacgtcaagatcaatgccgccggcctgaaagaccgggccgcggccgacgcgctcgtcgctgaggcgaacgccgttgccgccgccgccgaacgggccgagcgcgaagtgctggaaatcgtagaacgtaaaatctgaaccatatgacactgcaagagttccaaaacgatattcgtgcgggtattcccgaccggctgcccgccgcgaaaccttatgacaggcagatcaaccacgctcccaagcgcaaggagattctgacgcctgaggagcaggtgctggcgatcaaaaacgccctgcgttacttccctgccaaacaccacgccctgctggccaaggagtttgccgaggagctgcgcaaatacgggcgtatctatatgtaccgcctgcgccccgattacgaaatgtacgcccggccgatcgaccaatacccctgcaagtgccgtcaggcagcggcgatcatgctgatgattcagaacaacctcgacaaggccgtggcccagcatccgcacgaactgatcacctacggcggcaacggcgcggtattccagaactgggcgcagtaccgcctgacgatgaaatacctctcggagatgaccgacagccagacgctggcgatgtattcgggccatccgctggggctgttcccgtcgcaccccgacgctccgcgcgtggtggtgaccaacggcatggtgattcccaactactcgaaacccgacgattgggagcgcatgaacgccctcggcgtgtcgcagtacggacagatgaccgcgggttcctatatgtatatcggaccgcagggcatcgttcacgggacgaccatcacggtgatgaacgccgcccgcaagcgcttcaccgccgatcgccgcgacgcccgcggcatgctcttcgtctcgtcgggactgggcggcatgtcgggcgcgcagcccaaggcggggaccatttcgggcgtggtgagcgtcatcgccgagatcaaccccaaggcggcgcagaagcgttacgagcagggctgggtcgatgaactgcaccattcgctcgacgagctgattccccgcatccgccgggcctgccgggaccgcgaagcggtttcgatggcctatgtgggcaatgtcgtggacctttgggagcggctcgccgccgaagagattccggtggatctgggttccgaccagacttcgctgcataacccgtgggcgggcggctattatccggtggacgtgagctacgaggcttcgaacaagatgatggccgaggagcctgcccgtttccgcgaatgcgtgcaggagtcgctgcgccgtcaggtcgatgcgatcaataagctgacggcccgcggcatgtacttcttcgattacggcaacgccttcctgctggaggcttcgcgcgccggagccgccgtgatgggcgagggcggccggttccgttatccctcctacgtgcaggacatcatgggaccgatgttcttcgactacggcttcggacctttccgctgggtctgcacgtcgggaaaacccgaagacctcgaacttaccgaccgcctcgcggccgaagtgctggaggagatccgccgcacggctcccgccgaaatcgcgggccagctcgacgacaacatccactggatccgcgaagcgggccgcaaccggctcgtcgtcggttcgcaggcccgtatcctctatgcggacagcgaaggccgcacgaaaatcgcgcaggctttcaaccgggccatcgccgacggacgccttacggctcccgtggtgctgggccgcgaccaccacgacgtttcgggcaccgattcgccctaccgcgagacctcgaacatctacgacgggtcgaaccttacggccgacatggccgtgcagaacgtcatcggcgactcgttccgcggtgcaacgtgggtctcgatccacaacggcggcggcgtaggctggggcgaggtgataaacggcggcttcggcatggtgatcgacggttcggaagcttccgaccgccgcatccgcgaaatgctgctgtgggacgtgaacaacggcatcgcccgccgcagctgggcgcgcaacgaaggggccgtgtcggcgatcaggcgcgagatggagcgcacgcccggcctgcaggtgacgctgcccaatgccgccgacgaagaaatgatacgcaatgtcttgaaagaaaacgaataaacaaggattacctcatatggaacatcatcttatctccgcgcagcatctttcgatcgaccgcatccgcgaaatcctcttccgccgtctgccgctggcgctgagcgacgatgcccgtgtgcgcatcgtccgctgccgcgaatacctcgaccgcaagatggaaaaccccgaacgcccgatttacggcatcaccaccggtttcggatcgttgtgcgacatttcggtaggatatgacgagctggcccagctgcagaagaacctcgtcatgtcgcacgcctgcgggacgggcgagcgcgtcccctccgagatcgtgaaactgatccttctgctcaagatacagtcgctctcctacggccattccggcgtgcagctggcgaccgtggagcggctgatcgactttttcaacaacgacgtactgcccgtggtctaccagcaggggtcgctcggcgcttcgggcgacttggcgccgctggcgcatatgagcctgccgctgctgggactgggcgaagtggagtgcgaaggccgtgtccggcctgccgccgaggtgctgtccgagcggggctggcagccgatccggctcgaatccaaggaggggctggccctgctgaacggcacccagttcatgagcgcatacggcgtctggtcgctgatcggggcgcgccgcctgagcgagtgggccgaccgcatcggcgcgctgtcgctcgacgctttcgacggccgcatcgaacccttctgcgacgaggtgcatctgatccgcgcgcacaagggccagctcaccacggcccgcaacatccgccgtctgctcgaaggcagcgagctgatcgcccgtccgaagaagcatgtgcaggatccctactccttccgctgcatcccgcaggtgcacggggcgtcgaaagatacgatcgactatgtggagggcgtgctgacgaccgaaatcaacagcaccaccgacaatccgacggtcttccccgaagaggatatggtcgtctcggcgggcaatttccacggtcagcccatcgcgctggcgatggactttctggccatcgcgctcgcggagctgggcagcatctccgaacgccgcacctacaaactgatctccggtgcgcgcgagttgccggccttcctcgtcgccaagccggggctgaacagcggcttcatgattccccagtacacggcggcctcgatcgtcagccagtcgaaggggctctgcatgcccgcgtcggtcgattcgatcccctcgtcgcaggggcaggaggaccatgtgagcatggggtccaacgccgcgaccaaactctaccgcgtggtgtgcaacaccgaacgggtgctggccatcgagcttttcaacgccgcgcaggcgctcgaattccgccgtccggcgcgctcgtcggagacgctcgaacgtctcgtcgccgaataccgcaaagaggtgcccttcatcgacaacgattcggtgatgtacccgcatatcgaatcttccatccgattcatccgcaaatcatgagacttctggtaaagaacatcggcaaaatcgtcggcatcgaaaccgccggacagcttcggctctgcggcggggagatggaccgcttggagacgctcgacgatgcgtggctgctggccgacgacggccggatcgccgcattcggacgcatggagacgctcggtgaaatggccgcggacaggaccgtcgacgccgaagggggcatgctcttcccgtcgttctgcgactcccacacgcatctggtctatgccggaagccgcgaacgtgagtttctcgacaagatcaacggcctgagctacgaggagatagcccgccgcggcgggggcatcctcaattcggccgacctgctgcacgaaacttcggaagaggagctttacgcgcaggcgatggagcgcgtgcgcgagatcgccgcgaagggaacgggctgcgtcgagatcaagagcggctacggtcttacgaccgaagacgaactgaagatgctgcgcgtcatccgccgcatccgcgagacggctccgctggccgtgcgcgccacgttcctcggcgcccatgccgtgccgcggaactatatcggccggcaggaggagtacgtggagctggtctgcaacgaaatgcttccggccgtggcggccgggaaactggccgatttcgtcgatgtcttctgcgacgaagggttctttaccgtggaacagacggcccgcatcatgaaggccggacgcaagctgggcatgcagccgaagattcacgccaacgaactggccgtttcgggcggcgtgcaggtgggcgtggagtacgacgccctctcggtcgatcacctcgaacgcatgggcgaagcggagattcgggcgctgcgcggcgcggtgacctctccgacgatgctgcccggcgcggcgttcttcctcggcatgagctatccgccggcccgcgagatgatccgcgcggggctgggcgtggcgctggcttcggattacaatcccggctcgtcgccttcgggcgatatgcgcatggtcgtgtcgctggcctgcatccgcatgaagatgaccccggccgaagcgatcaacgccgcgacgctcaacggcgcttacgccatgggcctgagccgcagctacggttccgttactgtaggtaaagtcgccaatttcttcatcaccaaaccgataccttcggtcgaattcttgccttatgcctatacgacgccgctcatccgccgggtattcctgcgcggcgaggagtatgtggcgtagtttttgacccggagggattcgtatgcgattattgattttaacaatcggtctcctgctgtcgggagccgtaaacggacagaatatgaaaccgctgacaccggaagagcgacgtgtgatcgtcgacaaaggtaccgaagcgccctttacgggccgatattatgaccaccgcgaggcgggcgtataccactgccgccaatgcggcgcgccgctgtaccgttccgccgacaagttcgacgcggggtgcggctggcccagtttcgatgacgagattccgggcgccgtgatgcggacgcccgacgccgacggacggcgcaccgagatcacctgcgccaaatgcggagctcacttggggcatgtgtttttgaacgagggatttaccccgaagaatacgcgccactgcgtcaattcggtttcgctcctcttcgaacccgaagcgaaagccggcgaacagccggccgccggaggggagcagacgcagaaaaaggaggggaccgaaaccgcgattttcgccggaggctgtttctggggcgtggagtacctgctgtccaagatgcccggcgtgctgaaggtcgaatcgggctacacgggcggcaggaccgaaaatcccacctacgagcaggtgtgcagccataccacggggcatgccgaagcggtgcgcgtgacgttcgatccggcgaaggtgtcgtatgaaaagctggcgaagttctttttcgagattcacgatccgacgcagctcgacgggcagggtccggatctcggcgaccaataccgttccgagattttctatacgacgcccgcccagcagcagacggccgaaaggctgatcggcgagctgcgccgcagagggtacgacgtcgtgaccgaggtgacccctgcaggccggttctggcccgccgaagattatcaccagcagtattacaagcgcaagggaacgcttccgtactgccacgcctataccaaacggttttagccggtcctgccgctgcgtcggccggccgggaagaaagccggcgcgttttacaggccggagaagacttatgtccgatccggtgtgaaaccctcggtcgggttgccggaaaataaggctctccgcttcactgcggggagccttgccgtatatgcaggccggactgcgaaccttctgagttcccgaaaaccgtcgttgctgtacgatcgcgtcggaccgcccggcgaaccatatggctttgtttgctctcgaaccgtatgcaggatgtcggccgggaattctccagcggaatttatccgcagtgccgtctcgcctgccggatcaccccagcttgtcgatttcgccccgcatgatgcggggcaggtttgcgcggatcttttcgaccggccagttccaccattgcagttccagcagccgtgcggccgttctgtcgtcgaaacgcggccgtatcgttttggcggggacgccgcccacgatcgtgtagggcggaacgtcccgtgtgacgacggcccgcgccgcgatcacggcgccgtcgccgatcctgacacccgccatgatgaccgcttcgtaaccgatccatacgtcgttgccgatgacgatgtcgcccttgttgtcccacgccgcggcgacgttcgcccggtcgagttcccactcctcgaagaaaagcggaaaggtgtaattggccagcgagccgagcgtgtggttcgcgctgttgaacaggaaccgcgcgccgcaggcgatggagcagaatttgccgatgaccagccggtccttgttgatcgggtagtggtagaggacgttgttcttttcgaactctgtcgggtcgttcacgaaatcgttgtagatcgtgtagtcgccgacctcgatacaggggttgtcgatcaccgtattcagatagattgtccggcggtcgttcgtgcggggatatgttttcgtattcatcgtgtgtttcgttgcgccgcctttgccgggccgccgcatttcctgcaaaattgcaaaaaaatccccgcaaaccggcggtccggcgacgaaatatttccgttgcaggaatttgccgcggtatcttggcaggaaaggagctgcgcggaatgcggcttccggcggcaattcctgcgccgggagagtatcaaccggggatatattttctacatttgcagccgtaaatccgttttatggaacgtgcaaaaggtattctctatgcggcgctgtcgtcgtccactttcggactggcgccgctcttcacgctgctgctgctcgccgggggctattcgccgttcgaggcgctgtcctaccgctggggcgtcgcggcgttgtttctgggcgtgctggccgtgttttcgggacggagtttccggctgggccgccgcgaactggtcaccgtcttcctgctgagccttttccgcgccgccacgtcgctgagccttatcatcgcctatcagcatatcgccagcggtgttgcgtcgaccattcatttcatgtatccgctcgccgtggctctcgccatgatgtgtttcttccgcgagaaaggctctgcgtgggttttcgccgctatcggcatgtccgtcgtcggcgcggtgctgctctcgctggggaatgtcgatttcacggtggaaaatagcgcgctcggcatggtttcggcctgcgtttcggtcttttcatacggcggctatatcgtcggggtgcgcaagagccgggccgtggagatcgactcggcggtgctgacctgctatgtcatggggctgggggcgctctattttatcctcggcggcctgctgacgggcggcgtccggatcgaaaccgacggcatgacgtggctctgcatcctcggtctcgcgcttcccgccacggccctctccaacatgacgctggtgcaggcgatcaagcgcatcggcccgacgctgacttcgattttcggagccttggagccgctgacggccgtcgtcatcggcgtcgcggtcttcggcgaaccttttaccgcgcagggggccgcggggattctgctgatcgtggccgccgtgagcgttgtcgttctccgcaccggccgccggccgcaataggacttcgcagccgcctgtccggccggaccgatttcgccgcgcggcgtcggcagatttgtgccggaaaaggcagggaagagataccggcatgacagcgtaaggccgtagcgaaacgccgggcgcgccgaaatttgcggccgggaaaaatagagcggggagattgaccgttattacaatatgattatcagcgccagccgccggaccgatattccggctttctatgccccgtggtttttcaaccgcctgcgggaagggtatctcatggtgcccaaccccttcaaccccaaggccgtcagccggatcagcctcgatccggccgtggtggactgcatcgtcttttggactaagaatccggcgccgatgcttccgcggctcagggagctggaacgctataaatactacttccaattcacgctcaacccctatggcgccgacgtggagaaccgcctgccggatctttcccggcggatcgaaactttcaagcggctgtcggacgcaatcggccgcgaccgggtgatctggcgttacgatccgattctgaccaacgggaaatacgacgtcgggttccactgcgaagccttcgcccgaatcgcccgtgccctgcgcgaccataccgcgaagtgcatgctcggatttatcgaccattaccgccatattcgcggtgcgctgggtgagctgggcgtcggtccgctgcgccgggacgagatcgaagtcatggcgcagtcgttcgtccggacgctggaaccgtacccgattgcgctggaaacctgcaccgtgaaggtcgatctgcgtcatctggggattccgtccggaatgtgcatcgaccgcgggctggtcgagcggatcgccggttatcccatagttgcgaaaaaagacaaaaaccaacggcaggtgtgcaactgcatcgaaagcatcgacgtcggcacgtacgaaacctgcctgaacggctgcgcctactgctatgcgatcaaaggcaactacaacacggcggaatacaaccgccgcaggcacgatcccgactccccgctgatgatcggccgggtgggcggggacgatgtgatcagggagcgcgaaatgaagagcctgcggtgcgaacggcggctgccgttttagcgcgccggaacctcttccgcttcgtgtcgtttcgatattttgccccgaagctgttcgtaggtgcagttcaggatttcatagcggtcgattgccttggtttcgcggttggtctgaaccagatagcagcggcgtccccaagcttcgatcgtgtaattgcacttctccgattcgcggaccatcgagtgtccgtccatcaggttccagaaaatgtgcctcagtacattggcgtagcctgcgaaagacatctgctgtccgcgcaggtctttgaaatagacgtcgttgaagttttctcttgcccgtcccataatcgttcggttttaagtttcggcaaagatacgcggccggaatgacaggttttgacacgctgccgattgtcgtcgcaaatatcgccataccgccttttagctatttccgcaattcgagcaccttccgcagccgatcaagctcttcggcgagcagcgtgcgcgggcaggcgatattcagccggatgaagcctgcgcccgccgcaccgtacatcgtgcccgaattgacgcgcagtctgcccttggcgagcagacgttccgccagttcgtccgacgccagtcccgcggcccggcagtccgcccacaccagataggtaccttccagcggcagtacggggcagtgcggcaggtgctgcgcgaagtactcccgcaggaaaaggtagttggcgtgcaggtattcgttcagtgcgtcgagccactccgcgccccggtcgtaggcggcgatcagcgcgtcgatcgccaacggaccgatttcgcccgtttcgttgatgcgtaacgccttttcgatttttgcgcgcaccgtttcgccggctgcgatgatattggcgacctgcagtccggcgaggttgaacgccttgctgggcgagcagcaggtgaccgaattgtgcaggaactcttcgccgagcgatgcgaacggcgtgtagcggaatcccggcatgaccagctcgcagtgaatttcgtcggccacgacgaagacgccgttgcgcagacagatttcgccgatcctgcgcagctcctccggcgaccagacacgcccggccggattgtgcgggttgcacagcagcatcgctttgacctcaggatcggctgccttgcgctccagatcggcgaagtcgatcgtataggcgccgccgcggtaggtcaggtcgttttccgccgtccggcatccgctgttgcggatcgagatgaagaagtggttgtagacgggcgtctgaaccagaatcttgtcgcccggttgcgtcagggccttcagaatggccgaaagcgccggaatcacacccgtcgtatggagtatccactccggctccgtgcgccagccgtgacgccgttcgaaccacttcacgactgcgtcgtaataggcctgcggcgcctgcgcatagccgaatataccgtgctcgacccgccgccgcagcgcttcgacgacgggcggcgccgtacggaaatccatgtcggccacccacatgggcagtatgtcgggatcgctgtccagctcccatttgaccgagtgcgtcccgcggcgcgggactatttcgtcgaaatcgtatttcatcgtcgcatgttcttcgttgttatataatacgtcgcgccgcccgccgatgtttcagcggggcgggggatttttgcggcggggcgctattcctcccggtagacctcgccccgcagggcgtcgtcggagtagacgtgcaggctgtggcccgtgtcgctcaggcaggtgatgcggtgtatgtggttgtcgaaacgccccggcgcccctacggcgaagaatgcgcaaggcccctccacgacggcgctctccgtcagccgcgccgcacctccggccgcaggttcgaatatttcgagccggaaggtgccgtcggcaatgtgatagcccgcgaattggggatgcgcatggatgctggtccggttgccgtttttccagctcatcacgatcgcctcccagccggtggcggggcagcgtccgaggtaggtgcgccggtatgccgtgtcggaatagtcgtcgaacgcggtcaggggatgcgtttgcagccagccgaggatatacgcccgaatctgctgtccgagggcgtcgtctatcgtttttgcggcggtcgtctccagcaggccggagaagaaatccccgaagcccgcggctgcggcggaacattcgggcaggttgtcggcgagtgtcgtctttttcataatccgtgtgaaatccgatatgttgcaaaaatagcggaaatagggcgggccgcctacagcaaaaatacttatttcccgtccggcggcgccgagaccggaacctgcgggggcagggcggttccgccgccgcggcctccctgcggccgttctattccctgcgcaggcaaaaaagcaaactttttcatgcaataatcatttctgacagacagcgagttatgaatctgtgcggttttcttttttcgaaaaatccccgaaagcatttgccgattaaaaaaattacactatctttgcactcgcaataaccggaatggtgcgttagttcagctggttagaatacgtgcctgtcacgcacggggtcaggggttcgagtcccctacgcaccgccagcaaatcgaaaatctccgatcgaatccgatcggagattttttttttggagcaagtttatcggggtgcggcttccgctgtaaaatcaatttcttatctttgcactacaaacttttcgatgatgagcctgcgaaaaacactacttttcctcttcctgatacatgtgtattgcggcatggccgcagcggccctccggcagtccggccgggatgtcgattcgctgatcgaatacgccaccggcgagagcaaaaaggggaatttcgacgaagtggccgtcgtcgcgggccggctgatggagctggggcgggagcgggacgaccgaaaagcttcgctgtacggtctgatctacaccggacatgtgttggcgcgcgaagtcagcgattcggtgaagtactattacggccgtgcgctcgatctggcggccgggctgaatgattaccgcgcccttgcggcgatcaacaatgcgctggccatctacacctcggagatggagatgaattacctcgaagggctttcgtacttcatgaaagcgctcaagtatgccgaacaaagctccgacaaacactcctatccggtcattctgaacaatatagcaatggcccattacctgcgcaatgatcccaacggactgaaatactcgctcgaagtcattgatataggtactgccaacgacgatccgctgctgctctattccggctccttcgtcacggcttacatgtattatctgctgggggattatgccgctgcgctcgatcatatcggcagggcgctggacgtcggcggaaagtacatcgagtacgccgaagcctacagtctctatgccaacatactggtccgggtcgggcgtgagcgcgaggcgaccgcctattacaaacgttcgctcgaacatgtcggcaccgagaaaagcaacacgctggcatacctcaattacggcagttatctgatcgggaagggcgccgcggccgaagccgccgaggtgctggagaagggactcgacttcgtcaacaagcgcaacaacgccttctaccgctatcagctctacgagaaactctccgaggcttacgagctggccgaccgaccgcgcacggcgctcaagtactacaagaactaccaccacgaattcgacagcatattcaacgtcgagcgggagcgggccataaacgagcttcgcgtgcagtacgaatccgaaaaacaggagaaggagctgcgcgaaaaggagctggaccttctgcgcgagagacagaagctgaacgttacggttttcgtcgtggtgatcttggccggactgctcgccgcactgttcatcacctattggcgcaagaatcagcgttaccgtcagatcgtaaggcagcagcacgaactgatccgcagggagcaggtgatcgagaaactctacggacagtcggacggcagcggaaaatacacggtctcgtcgctctccgacgagaaagggcaggcgctgttcgcggaattcgaacggctgatgaaaaccgacaggatataccgggagcgggacataaccatcgacaaggtcgccgaccggctcggaaccaaccgctcctacctttcgcgggcgatcaacgagaacggcggaatgtccttttcgcagtacatcaactcccgccgcatcggcgaggcccggcgcatactctccgaaacggacaacgacatacagataaaggtgctggcctacgagctgggattcgcgacgcccgaaaccttctcgtccaccttccggaaggcgatcggcatgctgccgaccaaattcagggaggagatgaggaagatgtacggcagtgcgcgcaaggccgattgacgcaaggattcgacaccccgaaacatcaatttacgtttcaacggtcgaatccgtttgtatttcccggaaccgtcgtctaattttgtagacatgttccgggaacatccattttaaaaccttttcattatgacgattcaactccttctaaaaagattttttctgttggcggccctgttttcactggctttgactccgggatgcggaggcgacgatccggccgaagatcccggttcgggatcggttccggagcccgaacccgatcctaagcccgacgagccggaagagtacgccgtgaagttcgccccgtcgttcgtcgctccggcttccggttcgcagatcgggattttcggatatgagacgggcgacacgccgtggagcgtcgatgcggtgccgaatttcatgtgcaaccagctgctcgaaaacgtggacggggagtggacgtacgatcccgtgaagtactggccggaaagcagcaccggcaagttgtcgttcttcgcctgctcgccctatgcagcggccggcagcggactttcactgagcgattcctcccgtccgggagctcccgtgctggagtacgagatgccctcggccacggagtgtcacaatgacatatgtatcgccgccccgcagctgaacctgacgcgcagcgaagaacccgtcgcactggagcttcgctccgtgatgtccaaaatcggattcaggatcaaagggcagggcgagaagatctccggaatcgccgtgcggggtattcagtggcaggggagtattgcgctggacgccgaaaaccaaggctccatgacatggtccaccacttccgatttttcgaccaccgaatacgagctgaaactcaaatgcgacgcagggcaggagtacgcaaccgcctccgagaccatgaccgatgtcacggccgaaggaggacatctctatctgattccccagaatatcacctacaacgcccgcatcgtggttacggtcgacggcaccaagctgggattccccttcgaagacctgttccagctcttgccggggcaggagtataccatagacctcgtcattccgggcagcaagccgctcgactataccgacaacgccatgccggcgttcctgctggcgcccgtggatgcggccgaagccgccaatgtgagctgggccgatgcgaagagcgcctgcgaggcttccggctaccgcctgcccacctataacgaagggctgatgatacttttctacatgaacggcatggagaaaaacaacctgcgcttcgcctcctactggacttcgacgacctcgctggaagatccgacgggccagagcgcaatgggttacaacatcatgccgtggatgggactctacatgccgaaggtcggcattacggccgcgaggtgcgtgaaagacgcgcccggcggagggaagaagtatccctacgtcgatacgagccgtccggaaggccccgtcatcgtctcccgcgatgccgacggcggcgtgattccttcggcctacaactccgctttcggagcggagcttcaggtgttccacgacaactggacgaccacgcccgatcacgactggggcaccgatgccgaccgcataccccggaagctgcaggtggccaacgccgacgctgctgcaggcaaggtcgtatggagcggcttcgtatgtccgcagggctggcggaggccgaccatgatggagatgacgctcatatacaccatgggcggtgcggtcgaaagctcctacggagccgacaatgcgcccgtggccgaaaccccgctgtacggcgtgagcggattcactccgctgaatgccgattattattgggtggccagcatggcctccagccgcggcggcaggaacccggctacgtggtccttcgccggaactccccgcaatggcggcggaacgaccaccggacccgacgccaactatataaggtgcgtgcgggacgtcgaatagccccgtcctgttttacgtacgatgcaacggtctgctccgttaccggcatcccgaaagatgccggcggtggggcagaccttcgtttggagccgcgccgaatcggatttttcgtccggaagcgtgtaaaagtgttgaaaatatatttgcagtttcggttttttgtattatctttgcactcgcaataaccggaatggtgcgttagttcagctggttagaatacgtgcctgtcacgcacggggtcaggggttcgagtcccctacgcaccgccagccgaccggagtcggcaaatgaaaaacctgcaacttggagttgcaggttttttcgtttgcaggggtgccgggcggaagacagggcggatttttgcgggcagctcccgtatgcgggatgttgccgatttttccgttgtcccgccggcggggcgtatgaaatcgcctgtctgcaagtatgttggaacgtgccggccgccggggagccggatttttccgctaaaaggggcgatgcggcgacaacggatgcccggcacctgttttgcccgtgccgccaagagggccgtacagccgcgggggctggcgccgaatcccgttcccgacgcttagggtttccggaagaaggagaactgcacgctcccgtagctcctttgctgccagaattccggatatgcggagaagtccatcttcttcgaatgttcgaaaatcagcacgccttcaggacgcagcaggtcgttttcgagcaccagccttacgacctgctcgctgccctccagatcgtagggggcgtccgagaaaatcacgtcgaactgtttcggacagcttttgaggtagaggaagacgttggctttgaccgcatagaggttcccgatgcccagctgcgccgccgtctggcggatgaagttgtagtgtaccggattgatttccaccgaggttacgctccgcgctccgcgcgatgcgaactcatagctgatcgagccggttcccgcgaagaggtccagcacgtcgcactcctcgaaatccagcagattgccgaggacgttgaagaggttctccttggcgaaatcggtcgtcggccgcgcccgcaggttgcggggcgggttgatggcccggcccttgtattttccgcttactattcgcatacgatctgtctgaaatatccgccgagcttccgtttcaacgcccggccgtcgccgcttccgatgcgaagcgtgtaatccctgagccggaattcgcttccgagccgttcgagcatgtatagcaggtcggcctcgtcgggggcgggtacgacctccgcaaaacgcagtttgccgtcgtatacctttatatataacagtcccgcggcgtaatacatccacacggtcggaacgcttgcctgcggtacgcagagcagcggggtggtgtagcgcgcacggtcgccgaggcgttcatgcaccgcagccagcgcatcttccgccgcggccatgacggcgacggcattctgctgcggcgcgctccatacggcgcgctctccgggcagtgcggccatgccggcggcggccagcagttccccggcgcacgcttcgtcgaaaaactcctccggcacgagcgtcgtccggggcgtcagcagttcgacctccacgggaccgtcgcccggaaactccccggacagcgcaggcgccgaaaaagagtgtccatccaacgttagctgaatggacaccttgtttatggattgcggagtgttactcccagttgcctgcttcattgttggctgcctccattgaaccgaacttgacaccggcgtagcggttgaagttgttctcctcgtcgtcgatcaggttgatgatctcctgacggtaagccaccgtgtcgaggaacattttgtacggcgcgcggcactccacgatgggcaccgtcacgttcgatgcgacggccgaaccggcttccatgatgaactgagcctgcttgtcggtggtggggatgtaacgcaggtcctctacgtcctgacgcgaaaggcgtttgggcgagaagatggtgtcgataacggctaccgtgaatttctcgacgttcttcttgttcatcttcttcagcatggccatacccaccgagtcgtcttcgtcgacgatcttacgctcaagctccagagaatcgttcaggataaacgatgcgagtgtatcgaagctgcccgtaaagcgctggtacttcgacttgaacgcgcgctgcgcagtacggatgtccttgatgcggtcgatgacctgggctttcttggccttcatctcctgctcgaaacggatcggggtcgaaatctggtcgtagataacgtagaccagcgccacgataactacagcaagaatgatttgagcgatttttttcattttttaagctaatctaatatttgtttgtaattttgtacaaaataaaccgacgcatgtttagcacacgtattgcgacccaaatttacgctaaaatttgttttgaaacaacttctgggcaaaaaaaaattatagaaaagttgtccgaatatctcgcagacgacgatttttcccggatttttgtcctgaacgggtatgcgggtacgggcaaaacgaccctgatcgcggcgctggtcggtgcgcttaaggatttgaatatcaaacccgttctgctggctccgacgggacgggccgccaaggtgctggcccaatacgctcaggaaaaggcacttactatccacaagcggatttaccggcagcggaccaacgccgattacgaatcgaaatattcgctcaacatcaacaccgaaaagggggccgttttcatcgtggacgaggcttcgatgctgtcagacgctccgggcgacggggcgctgttcggttccggatcgctgctggaggacctcgtgcagtatgtccgcagcggccgcgcgtgccgtctgattctggtcggcgacagcgcccagctgccgcccgtgggggccgattgcagcccggcgctcgacccgtcggtgctggcccgcttcggcgacgtggagtacggtacgatggacgaggtcgtgcgtcaggaggccgagtcgggcattctgttcaacgccacgctggtgcgctgcatgctcgaaaacggcatctacgagattccgcacttcgaaacggactatcccgacatcgaggcggtcgaaggcggggagtttctcgacaaactgcaggattgctacgccaagtacggccgcgacgaaaccatcgtcatcacccgctctaacaagcgcgccaaccgttataacgaaggtatccgccgcaacgtgacgttcgccgaggaggagatcgaaagcaacgacatgctgatggtggtgaagaacaactactattttacggagcggaacaaggattgccccatgcacttcatcgccaacggcgacatcgcgcggctcaagcggctgcggcgctacgaggatttctacggcttccgctttgcggacgtcgtgctcgaattccccgattacgaggatgccgagctggagtgcaagatcctgctcgacaccatcgcttcggaatccccgtcgctcacgcgcgaggagtccacgcgtcttttctacgaggtcgagaaggattacctcgacgtcaaaagcaagctcaaacgcttcaaggagatacgtgaaaatccgcacttcaacgcccttcaggtgaagttttcctacgccgtgacctgccacaaggcgcagggcggacagtggcgggcggtcttcgtcgaccgctgcctgttcggcgacgagccgatgacgcgcgacatgctgcgctggctctatacggccctgacgcgcgccacggataaattatatcttgtaaatttcgatgaaaaattctatgaatagcgaactccatccgctcgaaccgtttcttcccgccaacgcccgcattctgatgctgggcagtttcccgcccaagcgcatccgctggtcgatggacttcttctatcccaacctgcagaacgacatgtggcgcatcgtgggctacctcgccgcgggggacaagtcgcacttcctgatgcccggcgggcggaagttcgacaaggagcgcatcgaggcgttctgccgcgagcgggggattgcgctgtacgatacggcggtcgaagttatccgactgaaagacaatgcgtcggacaattttcttcaagtggtgcgcgaggtcgatctggcggctttgctggcacgcattccccactgccgcaccctcgttacgacggggcagaaggcgaccgatacgctgcgcgccgtcacgggctgcggcgaaccagccgtgggcgaaagcgtggctttcgaatatgccggacgcagcatgcggctgtggcgcatgccgtcgtcgtcgagggcctatccgcggccggtcgagtggaaggccggattttaccgcaaagtgttcgaagataatgaaattctgtaatatacggcactccttcgtagcagataaaccgaaaataatttcccgtttaggcttggtaggaccgctaaattccgttatctttgtgtgaaaataacatacaattttttattgtgaacgcagaaaagaaaatagaaaaaaaatatgtcgagacccccctgatgaagcaatattactccatcaaggcggtgcatcccgacgctatcctgcttttccgggtcggcgacttttacgagactttcggcgaggacgcgatcaaggccagcggcattctgggcatcacgctcacacggcgcgccaacggctcggccacctatgtcgagctggccggatttccctaccacgccatcgacacctacctgcccaaactggtgcgggcgggcgaacgtgtcgccatctgcgaacagctggaggatcctaagcaggtccggggactggtcaagcgcggcgttatcgagctggtgacgccgggcgtggtgctgggcgacaatatactggccaacaaggagaacgcctttctggcgtcggtctatttcggccgtcagaccacgggcgtggcgttcctcgacatctcgacgggcgagttctacgtggccgaaggttcggaaaactacatcgacaaactcatctccaacctcgcgcccaaggaggtcatctaccagcgcggctacgaagaccgtttttccgacgctttcgggtcgaaactctatacctaccgtctcgacgaatgggttttctccgaggaggtgaaccgcgaaaagctctgcaagcagttcggcacccgctcgctcaagggattcggcgtcgatcacttcaccagcggtctctcggccgccggggcgattctctactacctcgaattcaccgagcaccgcgacatcgcgcacatcacctccatatcgcgtatcgatcaggaggattacgtctgggtcgacaagttcacgatccgcaacctcgaactcttctcgtcgaacggcgcccgcgagaagtgcagtttcgccgacgtcatcgaccgtacgctgacgccgatgggcggccgtctgctgaaacggtggatcgccatgccgatcaaggaccccgtgaagatcggggagcggctggacgtggtcgagaaattcgtccgggacgccgatctggccgacgtcgtgcgcgagcaggtggcgctggtgggggatatggagcgtatcgcttcgcgcatcgccgcggcgcgcgtcacgccccgcgagctggtgcagctgaaaaactcgcttttcgccgtcgagctgctcaaggccgcgctcgaatcgaccgacgacgcgcagctgcacgcactggccggacagatcgacctgctggaaggggtgcgcgaccgcatcgcccgcgagatctatcccgatccgctcaacaaccagattcagaagggcggcgtgatcgccgacggcgtggaccccgaactggacgacctgcgccgcatcgccctccacggcaaggactatctggcccgcatccagcagcgcgagagcgaggcgacgggcattccttcgctgaaaatcagctacaacaacgtcttcggctactatatcgaggtgcgcaacgcccataaggagaaggtgccggagacgtggatccgcaagcagacgctggccaacgccgaacgctatatcaccgaggagctgaaggagtacgaagagaagatcctcggcgccgaggagaagatgctcgtcatcgaacagcgcatctatgccgacatcatcgcccacataagccgctcgctgtcctccctgctgcgcgatgcggccgtcgtggcccgcatcgactgcctgcagtcgttcgcgcgtctggcctgcgaacgccgctacgtgcgtccggtgctggacgacggcaagctcatcgacatccgtcagggacgccatccggtgatcgagaccctgctgcccgtgggcgaggagtatgttcccaacgacgtgatgctcgacgacaaggagcagcagatcatgatgatcacgggtcccaacatgtcgggtaagtcggccctgctgcggcagacggcgctgattatcctcatggcgcaaatggggtcgttcgtacccgccaagtcggcccatatcggcgtcgtggacaagatcttcacccgcgtcggagcctcggacaacatttcgcagggcgaatcgaccttcatggtcgagatgctcgaatcggccagcatcctcaataacatatcggaccgcagcatcgtcctgctggacgagatcggccgcggcacgagcacctacgacggcatttcgatcgcatgggccatggtcgagtacctgcacaaccatccgtcggcgcatgccaagacgcttttcgccacgcactaccacgaactgaacgagatggagcagatgtgtccgcgcgtaaagaactaccatgtgagcgtcaaggagatgggcaaccagatcgtctttctgcgcaagctcgaaaggggcggcacggaacattcgttcggtatccacgtcgcccgcatggccggcatgccggtgtcggtggtgtcgcgcgccgacgaaatcctgcgcaacctcgaactggtctacggcaacaacgaaatcgtgcccagccggagcatcaagaaccgcgggaagaaaccttcgccttcggtcaaggaagccgccgaaaacggagcgccgcagaacatgcagctgtcgatgttccagctcgacgaccctgtgctggtgcagatccgcgaccagatcaagggactcgacatcaacgccctgactccgatcgaagcgctcaacaaactcaacgaaatcaagaagataaccgggatataggctggcgtcttttattccggttcgacctgtttcgcgacctatgggccgcacgctccctgaaatcgtgctgcgccgctccgtgtgagattttcccttccgtgcgaaatgtctctttttgcggctgcgccggcgcagcgtcaaaatacaaatcccgaatctcgccggagattcgggatttgtaatgaaacgggggcgtactattcgttgcgtgcgatcagcgagctgatgttctgaatcagcatcgccacggccaccgagttgaagccgccttcgggaatgatgacgtcggcgtatttcttcgaaggttcgacgaactcctcgtgcatcggcttcacggtcgaggtgtactgcgtgatgaccgactgcatcgtacgtccgcgctcgcagacgtcgcgcaggatgcgccgcgcaaggcggatatcggcatccgtatcgacgtataccttgatgtccatcagatcgcgcagctccttgttctcgaagatcaggatgccgtcgacgatgattaccttcgaaggctttacgctcacggtctccgtcatgcggttgtgctcgacgaacgaatagaccggatgttcgatcggaacgttctccttgagcgccttgatgtggtccaccagcatctgggtgtcgaatgcctgcgggtggtcgtagttgagcttcgtgcgctcctcgtaagtcagctccggatgcgccttgtagtagtaatcgtggcagagcgttacgacgtcgtcgccctcgaaagcctcctgcagacgcttgacgagggtcgattttcctgagccggttcctccggcgactccgataacggtaactttcatagtgtcggccaattagtgcggttatataaagaaaaggatcgcacctttcgcaagggcaatcctcttcctgatttcgattatgcgtcaatgttcgcgtaatgtgcgttcttctcgatgaattcgcggcggggcggcacttcgtcgcccatcagcatcgagaagatacggtccgcttcggcggcgttctcgatattgacctgacgcagaatgcgcgtgtcggggttcatcgtcgtgtcccacagctgatgggcgttcatctcgccgagacctttgtaacgctggatgtgcacgcccttgccgaattcggccgagatggtatcgcgctccttctcggtccagcagtagcgctcctgcttgccctttttcaccagatagaggggcggggtggcgatgtagacgtggccgttctcgatcagctccttcatcttgcggaagaagaacgtcagcatcagcgttgcgatgtggcttccgtcgacgtcggcatcggtcatgatgatgatcttgtcatagcggagtttctccagattgagcgccttgctgtcctcttcggtgccgatcgtcacgcccagcgccgtgaacatgttcttgatctcctcgttctcccacatgcgatgctcctgcgccttctcgatgttcagaatcttaccgcgcagcggcatgatggcttggaagttgcggtcgcggcccgatttggccgtgccgcctgccgagtcaccctcgacgaagaagatttcggcgatcgaacggtcgcggctcgtacagtcggccagcttgccgggaagtcccgcgcccgaaagcacggtcttgcgctgtaccatttcgcgggcgtggcgtgccgcatggcgcgccgtggcggccagaatgaccttctgcacgatggccttggcatccttgggattctcctccagatagtggcccagcgccgaggacatcgcctgatcgacggcggccgaaacctcgtcgttgcccagcttggtcttggtctggccctcgaactgcggctcctgcaccttcaccgaaaccacggccgtaagaccctcgcggaagtcgtcgccgttgatgtcgaacttcagcttcgagagcatgcccgaatcctcggcgtacttcttgagcgtacgggtcagcgcacggcggaagcccgtcaggtgcgtaccgccctcgatggtgttgatgttatttacataggagtgtacgttctccgagaaggaatcgttgtactgcatggccacctccaccggaacgccgttcttctcggtgtcgaggtagatgatctggtcgatgatcggcgtgccgcgcgtggcgtcgagatactgcacgaactccttgagaccctcttccgaatagaagttgtcgtggacgtattcgccgttctcgtccttgctgcgcttgtccgtcaggttcaggtggattcccttgttcaggaacgccagctcgcgcagacggttggccagaatttcgtatttgtattcggtcgtgagcgtgaagatgctgccgtcgggcttgaaggtgatggtggtgccccggtcggtgcactcgccgacgacctcgacctgcgaggtgggcgcgcccttgctgtagctctggcggtaaatcttgccgtcgcggctgtgaatctccgcgatgagcagggtcgaaagcgcgttcacgcacgatacgcccacgccgtgcagaccgcccgaaaccttgtagctgcccttgtcgaacttgccgccggcatggagcacggtcagcaccacttcgagcgccgatttgccctccttttcgtggtagtcggtcgggatgccgcggccgttgtcgcgtacggtgatggaattatcttcgttgatcgttacgtcgatgtcggtacagtagccggccagcgcctcgtcgatcgagttgtcgactacctcatagaccagatggtgcagacccttctcaccaatgtcgccgatatacatggcggggcgcttgcgcaccgcttcgaggccctcaaggacctgaatattcgacgcggaatattcttcttcttgcttttttacgttttctaattcggtactcatctgttgtctttaaaatatcgtacaaatatacgaaatatttccggataatccaatagcccaaatccccaagatcagcccagctccgccttgaggtccacctcgcggattttgccctgcgagaagaggatggcgcgggccggatggttctctatgagggcggtgttgtgcgtggacatcaccacggcgcagccgcggcaggcgatctcctcgaaaagctgcatgatgccctcggccgtcacgggatcgaggttgccggtaggctcgtcggccagcagcacctgcgggtcgttgagcagtgcgcgggcgatcaccagacgctgctgctcgccgcccgaaagctcgaagggcattttgtagcttttggcccccagatcgaccagattcagcacctgatcgatccgctcgcggatttcgctctcgtgtttccagcccgtggctttcatcacgtaatagaggttcatgaagacgttgcggtcggtcagcagctggtaatcctgaaacacgatgccgattctgcggcgcaggtaggggatgtcgcgccgtttgagccttcgcaggtcgaagccggccacacggccttcgcccgtgagcagctgcacttcggcgtacagcgttttgagcagggtgcttttcccgctcccgacgcggccgagcagataaacgaattcgcccggcgcgacgcacaaattcacatcggagagtaccatctcgccccgctggagcaatttggattcggacgtgctgccgaacgggttgtccgcatgataaatagccgcgtttttcagtcttacaacgtatttttcactcatagagccgctctctggaattattttccaaagatagtcaaaatattcgttccggaaagttcccgaagcgaaaaaaaatacctccggcgggcctcggtccggtttcggagaggcgtttgcggatgtttttgtttaatgaatcagccgtttgttttcataaaataaccccaataatttgcatatccgccccggcatgcctacttttgtatagacgtgccgggagattccggccggacagtgacgctaaaatttatcgaatgaaagaatacgaaatcctgcaggagatcatgcgggatgccaagataggttggtggcaggccgaccgcaaacgtcgtatgttccacatatcggaagggcttcgcgatctgctgggccttgccacgtgccaagtgagctacgaggagttccgggatatgataagccccgcctacagggactacgccttcgcttcggtgggggtgcgcgggggcgatttcaacgaggagcgcctttacccgcttcggggacggaacggcgagatctggtgctactggaaactgctgcgcgaggagaccaccgaggacggagggatgctgctgacgggttatttccgcgtgggcgatccgccgctcgaaaaggtcaactcgcccgaacggcagcagatcaacgacctgctgtatcggctcaacagcatttcgcatacgctgctctcgctgctgaaaaccaacgatctggatgtcgtcatcgacaagatactcaccgacgtgcagaccatgttccacggcggccgggcctatatcatcgaattcgaccgcgagcgcaggacgcacgactgcacatacgaggttacggccgagaacgtcacggccgagcaggatttggtaaacagcctgtcgatggacgaggtgccgtggtggacccggcgtatcgagaacggcaatcccatcatcatctcctcgctcgacgaactgcccgacgaagcgttccgcgaaaaggaggtgctcgccatgcaggacatcaaatcgctgatcgccgtaccgctcgcctcgcgcgacaaggtgtggggatacgccggcatcgacatcgtgaacgaaccccggagatggagcggggaggattaccagtggttcgcgtcgctgatgaacatcatcagcctctgtatcgagcttcagcgctccgaacgggaggcacagtccgagcgcacctacctcgaaggcctttaccgccacatgccgctgggttatgcacggctgcagatgctgcgcggcgaggacggcgcgccgtccgatttcaggattttggattcgaattacgccgccgacaagatctccggcagccgccgggagcgctacatcggcaaacgcgcatccgagctgggacttgacatgcggttttacatgccgattttttcgcaggtgctcgacggcggcgattatgtcgaacacgattattacgacgagcaatcgaaacactggatacactcgattctctacacgacccacgaggacgaggtgatctgtctcttttccgacacgacggacgtgcacaacgcccacgaagcgcttttcaacagcgaaaagctgctgcgcaacatcttcgacaacgtgcaggtcggcgtcgagctgtacgaccgggaggggtatctggtggacctcaataacaaggacctcgaaatcttcggactcaaaacgaaggaggcggtgctgggcgtcaatttcttccgcaatccgctcgttccgcaggagatccgcgaaaacgtgcgcaacggacaggaacaggctttcaaactcgattaccatttcaaccggctggacggctactatccctccgaaaagaaggggaacgtccaaatatacacgacggtcaccatgctctacgacatgtacggcgagctgatcaatttcgtggtcatcaacatcgacaacaccgagatcaacgaagcctacagccgtcttgccgagttcgaaagttcgttttcgctggtgagccgcttcggcaaggtgggctatgcgcgattcgacctgatgacgcgcgacggctatgccgtgccgcagtggttccacaatatcggggagcggagcgatacgccgatgccgcaggtgatcggggtttacgaccatgtggatcccgaagaccgcgccgccatattccgggagatcgggcgcgtcaaggcgggcgaatccaacggcttcacgctcgacctgcgcgtcacgcccgaaggcgaaccgacgggatggacacgtgtcaacgtggtgcgcaatccgctgaacaccgacccgtcgaagatcgagatggtctgcgtcaatttcgacgtcacggagctgaagcagaccgagaagaacctgatcgaggccaagaacaaggccgaggtcagcgacaggctcaaatcggcttttctggccaatatgagccacgaaatccgcacgcccctgaacgccatcgtgggattttcgaacctgctggccgagacggacgacatcggggagcggcgcgagtacatgcgtgtcgtcgaggagaacaacgagctgctgctcaaactcatatccgacattctggacctttcgaagatcgaagccggcaccttcgagttcaattacggccgggtggacgtcaaccgcatgtgcgaggagacggtgcgttcgctcagtctcaaggtcaaggacaaacccgtcgagctgatcttcggggagcacgatgcgcagtgctgcgtggtcggcgacaagaaccggctgattcaggtcatcaccaacttcatcaacaatgcggtgaagttcaccgacgaaggctccattacgctgggctaccgcacggagggcggcgaactgcttttccatgtcgaagacaccggatcgggcatctccgaagagcatcggcagagcatcttcgaccgtttcgtcaaactcaacagcttcgcgcagggcaccggactggggctttcgatctcgaagagcatcgtcgagcagatgggcggccgtatcggcgtcgaatcggaggtggggcgcggctcccggttctggttcacgattccggccgtgacgtgcgacgcacccgaaaagaagaacgcagcccccgcaccgcgtccggcggcggtgcatggcgacggacggctgccgcggctgctcgtggccgaggataccgacagcaactacctgctggtgtcgctgatgctgcgcagggagttcgacatcgtgcgcgcttccgacggtgaagaggccgtgaagatgtgccgcgaactcaaacccgccgcaattctcatggacgtcaaaatgcccggcatggacggtctcgaagccacgcggcgtatccgcgccttcgatccgtcggtgccgatcgtcgccgtcacggcgttcgcctacgaccgcgaccggcagaaggcgctcgacgccggggccagcgaatacctgtctaaaccccttaacggcgaacggctgcggcagacgctccgcgaactgctttcggaagaataggacagctccggaaacagtggccctgcggtatgccgtccggcgggattcgggctgtcatgggtgtcgttgcggctctcatactctgctcatgcaggtacgcccggccggaaacggaaaacgggccgttgcccgaccggctcataagcgcatcgcggagttttccgcaaacagagacctgtctgcgccggttcagccacccttcccggcggtgacttgtcgcggtgcaaggagacgctcatgcagttgcgcgcagtttttcctgccgggccggacaagtgcgtgaaccgggaccggattccccggcgcaacgcccttgggcggagccgaacagacgatttctcccggtgcggctgcattattccgaaaatttgtactatctttgcaatgtttccatgagactttgtttcgcaaaacgggggtgcccggttttgacagcaggcagagtttgattgtaagcacgccgagcgctgtgtggcggctcgttaatcccgatgctcgatttacaaatggcaataacagctatgcactcgctgcctaattttcagagaaagttagcttaatcgccgggtccaaggaggcttggcgacgagtatcccggagagtggttccgctctttaaccgctttccatacggggtatcatcgatttagagatagtgcgccggaccgtcccggccggcgtgcgaaattcagggactgggacctcggttaggcggccgcctgccggaccggggtagaaggatcaagtggcggctaagcgtgtagaaagctttcgggttccctgtttggacgcgggttcgactcccgccacctccacaccgcaacaaaaaatacgacctgccgcagtgacggcaggtcgtatttgtctgaagagcggagtattatttcttgtaccagtctttattcttttcgccgttcgtagcggcccattccgcataagcggggtagacctgatcgatcggggacttttcatttgtctggtcgagcagtttggccacgtccccgtcgttcgcacccgaaaggaagaaggcgaacggataattctcagcgcgtacgtagtagatgcctttttcgggaacagacttgtcgtcgttcgtgccgaagaacgacatttcagcccgtgccgtcggcgcttcgtaggggatatgcacctcccagcgtttgccggcggtcagcccgtcgcggtcggtgcggtagatgaacggcttgatcgttccggcctgcgcctcggcgaccggcgcgtcgtatttcgccgtaatccggtaggtcgcacccatcgtctccttaacgtcgggcgtcagcagtacgaccttgccgtcgcgctcgaaatccgcagcttcgaacgtctcggcaccgggcttgcggacgctgaattcgagttttgcgtccgccgccgctcccgtaagggtcacggcgagtccgttggcgttgcctgcgaagttggcgaaggtcttcagcatgaacgactcctcgaaaatgcccttttcgttgaacaccttctcgtaatcgctgcggaccatcacgtcgttcatgtcgtagtcgccgcggctgggccagaggtcctcgaaagcatagatgccgcgcagtacgttggccgtcttcttgccgtcgttgacatcgaccgacggaatgtccgtcacggcgtccacgggattggaggtcatcgtgaataccacgtcgctgaaattttcgtcgttgttgtggtcctcgaacgagaagagcaccgagttgatgccgcttttcttgtccgtatagcggaatacggccgtgcggggcgtctgataggcgacaccgttgttattgacgctcagaccgtcggaagtcgcggcgcggtactttttgtctccggctctcagccggttggtccatgcgttggtggccagtacgaatccgatgcggtaatcggccgggaatacggtcgtagctccggccttgctgccgtcggcgatttcgggataatagatcagctgtacggctgtgccgcgctccacaccctgatagagccgtgattcccacggcgagttgctccaccggccgtcctgcgtattggggaagatcatcaccacgtcggcgtcggcgagcgacttgggtttgttgccggtcttgtagtaataataacccatcgagctgttccagcaggtgttgctgcccagcagggtgatgactacttcggccgatttttcgagatagaggtcgcgcgaggagcggtactcctccggacactttttggtcgtgtcgaacacgcttgcgtgcgccttgaggagcgctccgtaattcttgactttcaggtcgcccttgtattcgtagccgatgctgccgtaggtcgtgtcgtagctgcccagccatgttttccaaccgtcccgctcgacggccgtcgaatgatactccttggcgcgcgtcgatgcgggggccgcgttcgcgggtgctcccgattcggccgatgcggtcagcatatcgccgctgcgggtcgcttcgagcagggtgcgcgcatagaaggcgggggtcaatacataagccttccggatatacgagggcagttcgatcgtcccttcgaaacgcccctgcccgtcggtatagccggcatagagcggctcggtccctgcgattctggcataggccgtttcagtctcttcgacggggcaggtgtcgtatacctcgaaatagacgttggacggcatgccgtccatgtcgccgtaatcgacgcagagcgtgaccgggacggtcgtcgtgaagccgaattcattgaattccccgccctttgcgggcggttcgggcgacggggtggggttgtcgtgggaacaacccgccgcagcggccatcgccatggccgcaatcgttaggatagtgacgcttttcattatcgttgtcaattgcacctgctctgttttgtgtatattttgagcgaaagtgtatattatgctacaaaagtatgcaaaaaaaacgtacgttgtacgccgacgcacgaaaaattgcaggaaattattaaaaataagatttatagacccttttatggtattcggaagatcttgccttcggcgaaggtcgcccagagggagccgtcgggagcctgcgcgaaatcatttccgcccgaattgcagcatttgacgctccacaacagcgtgccgtcttcgcctacggcggcaacggtgccgtgacggcccgcgacatagaccacgccgtcgcgcacgaatgccgggcaggagttgtactcatacccccagccgaggtccgtgcaccatagttcgcggtaccgctccgccgaggtgtctatggccgccagctcgccgtccatcgtcttgtagtagaacctccgtccgtcgccgctcagtccggtcgtttcgcgcgatttgcggctgttgtcgcgccatagctgcttcccggtggcgagatccagacaggtcacgacgcggtccggggcgacgatgaagaccttgccgccggcgatgcggggtacgacatgccccggcgagaagaagagactgccgctgccgttgttccacttccagagcagttcgccggtgcctgcatcgagacaatagagatggcggtcccatgcgccgaatacgagccgtccgtcggccagcgtcggacgcccctgcgcctgcccgcagccgtaatcgtgccgccacaacagcctgccgctgcgcaggtcgatcttgcctatggaaccggttcccagacctatatataatgccccgccgtccgtaattccgtcgcccacgacagcgctctgcgtcggaaggtgccatttctcgcgccccgtccgggcgtcgaaggcccatatgccgcccgatgcggctcccgcgatcacgagtccgccggtgcagagcggggtggtgtaaagcccgtccggaaagacgtgccgccacaattcgcgtcccttgcgcgtgtcgtaagcgcgcagtgcgccctgcgaattgccgtaacagagcacctcgccgcagaatgccgctcccgtcagcaccatggcgctgtcctgcacgaccagccgcatgcggccttcggcgtcgggcgtcggcggcagcgggtcgcaggggagcgccaatatctgcggatcgtctttcaggcagaccgtataccgggtgaccgggggcatgccgagcggcttctcgcgtatgcgcaccgagtcggcgaaaaagtcgagcagcgtatatcccggcgcttcgccccttttgcccgcgagcgcgcggcccggaatccccgcaatcccgtcgaagttgcgcagctgcagctggtggtaatggccgtacagcgatgccgtgacgcccacgcttttcagcgtctcggtcacctcctgccggttcgtcagatccccgttgagcggatagtggcagaggcttacgatccgctcgccgggccgtgcggcggccgcttggcgttcgagccatgcgaggtcttcgccccgtatcattccgtcggccattttcatataaggcccgctggcatagcccagaaagagataacccttggcgcgggtggcgacgcatcccgcatgtccgaacagacggcggaatgccgtgcagccgctttcggaccacgtcgtttcgtggttgcccggcaccgtgaaccacggcttgcggagctgcgacatgagtccgtgcacatgcgccagctcgcggtcgctccccatgttcgtcaggtcgccgccgaagatgaccagatcggcgtccgaagcgttcgcctccgcgacggcgatccggaagagcgaatcctgcacgttgcccggcgtgacgtgtatgtcggtgaagaaaacggtgcggagcgtatcggcgggcggcacctccccaaccgttttcgccgcggcaggctgcggcgccagcgtcagcagggtcaggcacatgcagccgtataattcgatgaacgggtttttcatggtttcggagcagttttatctttacaaggtacgaatttaggccgaaaaaacatatctttgcgtcactaaaaaaacagaagtccatgaaaaagataatgctgctcggttcgggtgagctgggcaaggaattcgtgatcgcggcgcagcggctggggcagaccgtcgtcgcctgcgactcttatgcgggcgcccccgccatgcaggtcgccgacgcatgcgaagtgtttcacatgctcgacggcgacgcgctggccgccgccgtcgggaaacaccgtcccgacatcatcgtgcccgaaatcgaggcgatccgcaccgaacggctctatgagttcgaaaaggcgggcgtgcaggtcgtgccgagcgcccgcgccgtcaatttcacgatgaaccgcaaagccatccgcgacctcgcggccaaggagctggggctgaagaccgcgcgctatttctacgcgacgtcgtacgacgagctgaagcaagccgccgcgaagatcggttatccgtgcgtggtgaaacccctgatgtcgtcgtcgggcaaaggccagtcgctcgtcaaaggacccgaagagctggagcacgcttggcgctatggctgcgaagggtcgcgcggagacatccgcgagctgattatcgaggagttcatccgcttcgacagcgagatcacgctgctcaccgtaacccagaagaacggcccgacgctcttctgcccgccgatcggccatgtgcagaagggcggggactaccgcgaaagcttccagtcgccgcacatcgcgcccgaacatctggccgaagcgcagcgcatggcggccgccgtcaccgaagcgctgaccggtgccgggctgtggggcgtggagttcttcctgagccacgaaaacggggtctacttttccgaactctcgccgcggccccacgatacgggcatggtgacgctggccggcacgcagaacctcaatgaattcgaactgcacctgcgggccgtgctggggctgccgattccggccgtcacgttcgagcgtctgggcgcctcggccgtcgtcctctcgccggtcgcctgcgcctcggcgccgcgttacgagggcatcgaccgcgcactggccgccgatccccgcaccgacgtgcgcatcttcggcaaaccctcggcccgcgtgaaccgccgcatgggcgtggtcacgggctacgccccgctcgacggcgatctggaggcactgcgcgaacgggtcaaggccgccgccgcggaaatcaaagttctggaaccttaattttatcgaacgatatggcacaatacgcaattatttcgaccgagaaaggcgacatgaaagccgaactctataccgacgagacgccgggcacggtggcgaacttcgtaaaactcgcggagagccgtttctacgacggactgactttccaccgggtgattccgggattcgtcattcagggcggctgccccaaaggcgacggcacgggcggtccgggttacacgatcaaatgcgaaacctcggctccgcgccagtaccacgaccggggcgtactctcgatggcccatgcgggacgcgacacgggcggctcgcagttcttcatctgccacacccgcgagacgacgcagcatctcgacggccggcacacctgcttcggccgcgtcgtcgaagggctggacgtcatcgacgacatccgtcccggcgacctgatcctctcggtccgtatcgtgaacgagtagcgcgccgctgcaatcgcagattatcccttagcagcagaattggccaaaggctctccgtgcggagagccttttttcgtcgcgggaagatccgttgcccgcaagaggaggccgcacggcggcctgtcctcctcttttccgcatcgtcggcatcagcgtggaacggcacgaagaaaggccgccgccggtctgatgcgggaaccggcgatgcgctgccgccgcgtcatatcttccggatcatttcgaactgctttccctgcggcacgatgtttttcgcttgcaggaatccggttatcgagccgcacgaaacgtcggtatttatgattttgatggagtcgttcctgttcagccggagcatctcccgcagcagcaggccggcgattccctttctgcggtactgcggcttcaccgcgatctgcgcgacgtcgcccgacgcgggttcgaaaacgcagtagccggcgagttcctcttcggtgaatacgcccagactgacgaaatctccggcggctcttcctatggattcgaaactgttctgccacgagggcgtgaaatcccaaaaggaggagatcgaagcgaatttttcgggatctgtccgtctcaccgagtggggcaggcggggcgtatcgccccggtcggcgatttccgtgttcgcccggcagaaatagttgaactcccggaccgtctcgaaccccagattccggtaaacggacacggctctggtgttgtgctgcaacacctccagcagatactgtccgacgcccgccctccgtagatgcggcatcgagtgtctgaaaatctccgtggccagtcccgtgccccggtactccttgagggttccggttcccgtgtcgtaagccgtcggcacgccgttgaaattgccgatgccgttcagtgtgaaagccgcgatctgcgcaccgtcgaatgcggcgaacgaaagggcgggatcgaaaccgcgccgtgtcagcatggcccgcagctgttccgcgttcagctgcacctcgtagtcggcgaacgcccggccgaaagccctgaacagcgtgtcgaagtctgtcttttccaatgattttatctccatatgcgtcggttttcggcggaaaaatggccgcccggcaaggctgcgcccgctctgtttcaaagatagtgatttttaccgatctccgcttcccgaattccgctttttcaccgcagctccggtccgtacgacggccgacaaccacggcaaaaaaaagagaccgtctcaaaacgctgagacagtctctttgtcattcggttctttggaccgtatcgccgccggattattttccgaacttggccttgatgttttccgtcgccttcttcagcagctcttcaggacagcagagcgtgatgcggatgtaacgcttgccctccgagccgaagatgccgcccggagtcaggaacacgtcgcacttgtccatcacctcgtccgagaatgcgaagctgtcaccctcgtacgactccggcagttcggcccatacgaacagtcccgcctgatgctcgcggtatttgcatcccagcgcgtcgagcagcgcgtacgcctgcttctcgcggccgtagtagatgtcgttcagctccttgaaccactcctcgcccagcgccagcgccgtgtcggccgcagcctgaatggggtagaacatacccgaatccatgttcgacttgaacgtgaggatcgagtcgatccactccttcttgcctacgaccacgcccacgcgccagccggccatcgaatggcctttagacagcgagttcatctccagcgccacgtcgcgcgcgccttcggcctccatgatcgagatcggagccgccgcgttgcggatgaagctgtaggggttgtcgtgcacgatcagtatgttgtgcttggcgccgaaatccacgatctgctggaacagctccatggtcggggtctgtcccgtcggcatgttggggtagtttatcagcatcatcttcacaccgtccagcccggccttctcgatcgccgcgaaatcggggcggaaattcgtctccttgttgagcgcataggtcaccatctcgccgccggccagacgcacggccgccgagtaggtggggtagccggggttgggcaccagcaccttgtcgcccttattgaggaacgtcatgcagatgtgcatgataccctccttcgaaccgatcaggggcagcacctccgaattgtagtccagctcggtgcgataccatttcttataccagtcggcaaaagctttgcgcaggatcggctctcccttgtaggacatgtatttgtgcacgtcgggacgctgcgcctctttggcgagacggtcgatgaccgactggtgcgggggcaggtcggggctgcccatagcgagtttcacgatctgacggcccgttgccgcttcgatttcggcgatctcgcgcagacggcgcgaaaaatagtactctccgatgccgtccaaccgatgggaacgggcgatgttgactgcttttgccatagtgtaatcaggtgtttggatttgctgtttgcaaagataggtattcctattaaaaattaaaagccatcgttgaattttatctcccttcggactctctccgccgctttgtttcccgctcagaactgcttcggggcggcatgtcgggcgggtaacagttcgtaacattttttacgaaccgtccccgtttacagtgcgaagaggatgaatatctgcgccgtcagcacgcgcaggaacatcactacgggatagaccgtcgaataacccacggccggcatgtcgttgcccgccgtggcattggcgtaggccagcgccgggggatcggtcgtcgatccggcgataagtcccatcagcgtgtagtagttcatcttgagccacagccgcgctaccagcgcgacgattatcagcggcaggacggtgatgatgacgccgtatccgatccagcggtaaccgccgtcgacgatggcgtcgatgaatccgtcgcccgcgccgatgcccaccgccgcgaggaacagcgcgatgccgatctcgcgcagcatcaggttggcgctcatcgtggtgtaggtgaccagatggaaatgcgtgccgaagcgtccgatcaggatggccacgatcagcgggccgccggccagtccgagcttcacgggctggggcacgttgagcagcggaatcgaccccagcagcacacctaaagcgatacctacgaagatcgtcaccaaattaggctggttcagcttcttgagcgaattgcccaatacgtcggccacctgcgccacggccttcgcgggtcccacgaccatcacgcggtcgccgacctgcagttccaagccctgataggggatcagatcgacgcccgcgcggtttacgcgcgtgatggtgatgccgtatttcgtgcgcaggcgcaggtcggagaatttcttgccgttgagcgacgatttcgtgatcaggatgcggcgcgacaccagctcggcgttgggcgtattgttgccccactgctcgtcggtcatctccacgcggcggccgaagaaggccacgatcgcctcgatgtcctcggcctgcgagatcacccacagtcggtcgccgaggtgtatcacgctatccgcatcggccatcgagatcgttccgtcgggacgcaggatgcgcgatatgacgaactgacggttgatcaggtcgcggacataggccaccgtgcggccgtcgagcgtcttgttggtgaattcgaccgacaccttgtcggcgagcttgtgctcccggctcagcgccgccagcccctcgtcctccttttcgaacttcacgcgcagggcgtagcggatgaagatcatcgtgaatatgatgcccacgacgccgagcggataggccacggcgtaacccagcgcgatcgtggggtcttcgatccccgacgcatcggcgtaagcctgctgcgcggcgcccagtccgggggtgttggtcacggcgcccgaaaggatgccgaccatcgtcggaatcggcgtgcccgtcaccagatgaacgacataggccgtcgccacgcccagcagcacgatcgccacggcgcacatgaccagcgtcatgccgccgtgtttgaacgatgcgaaaaatcccggtccgacctgcagaccgatcgagaagacgaacagaatcagcccgaattcctgcacgaagtgccggacctcgccgtccaccgtcattccgaaatgactcaggacgatgcccacgaacagaatccacgtgattccgagcgagacgccgccgattttgacttttccgagcagaatgccgacggtgatgaccaacgcgaaggtcaggacggcatgggcgatgccgttgccgaagaacaaggtgtgtaaccactccatattaacctacttttgtacgaattgccagtaattgtgcaaaagtagtatttattatagaatttaaaaaactttgatgcgacttttatggtgccgatatacgcccctccgtccgccgcaggggttgcggctaatacagataccgctccatcagcggcatgagcagtgccgtcgccagccccatcagggccatggccagcccgctcagagcgccctccacggcgcctatctcgatggcgcgcgccgttccgatgccgtgtgcggcggctcccagcgcaaatccccgcgcttcggcgtcccgcaccccgcagcggcgcagaatccactcgccgaagatgctgccgaagattccgacgcagaagaccacgaccgacgtgatcggcacgatgccgcccagcggtcccgacacggagacggcgatcggcacggtgaccgatttgggggctatcgaggtgaggatttcgcgccctgcgccgaacgccatggcgatatagacgacgctcagcacgcccgtcacgcatcccgcgagggttgcgacgcccaccggcagcagactgccgcgcaattgttccacctgttcgtaaagcaagtatcccaacgccacgaccgacatgcccagcgcgaaatcgagcgccgaagtcgcctgcttgtagcggggatagtcgatgcccgccgcgctgaggaagacgatcaccgcgacgaacgtcagcagtacgggatgcagcagcggtacccgcagccgtcggtagacggcgcagcccaagcagtagagtcctacggtgagcgtcagcaggaagaggtccgaggagaggaaagccttgtcaatcatggtcgggagcgtttggagcggtttcgcgcagatgccggatgcgccgcaggcgcgaacggcggttcaggctttggaaggtctgccccgtgacgagcaggacgacgatcgtcgagacgatgcccgaaatcacgatcgcccacaagttgtcgagaatcacccggtaggagtccatcagccccacgccgtaggggacgaagaagagcgccatggctcccagcaggaatttcgccgccggacgcacggtctcggctttgacccagcgcatgcagagcgccgcgaaaagcaggatcatgccgatgatgttacctgacacataacctccggtcaggatgctcaatgcgttgccgatcagccagaaaagaagtatataaaagagtccggacatggattttcccgcttgttttcacccgcaaagatagcgtttccggccgtatgttgtacctgcaggacccgatttgtgagcgggcacggtctcctgttccttcctctacgttccggaggatgtcgcgcgcagatgcggagagccgaaatcgtccatcgcatattgatttgcagttgccggacggcaaaacgccatgccggcgcatcctcccgcgatcagacggggcgcaggggcttatcgccgtttatcgttgcgccgcaccgctttgagcgggcagtgcgcactggcgcacgacgcgcatccgccgcgcctgcgcccccggaagaagcaccggagccgccgtgcgagcaacaccgcgaccgccgctccgatcgcccataccgtataatcctgccatcccatatcagagccacatgaccaaatgatagacggcccatgccgccagccaagccagcagggtgttgtacgccacgctggcgacggcccatcgccagcccgcctccgaaccgatggccgcaaccgtggcgatgcaggggaagtagagcaggatgaatacgaggaacgccagcgccgaggcgtgggtgaaatcgccgctcgccgtcagacgctgcgcgagattcgccgtctcttcgtctcggtccgccgcggcatcttcggcggcagttcccggatttaggcccggccggccgtcggccgtctccgctatatagatggccgtcggaccgtccgcgccgccgatcacggcaaccttgccgttttgcaaatcgttgatcgacagcttcgcagtgtctgtcatctcacccgattcggcaactatttcgatcgtcccggaaggctgcgccgccgtattcgccgccgcaggagccccttcggagtagagtacgccgagcgtactgacgatgatctccttggccgggacgcccgacaacagggccacgcccgctttccagttcagccccagcggactgaacaccggctcgcaggtgcgtccgagacgtccgaggtaggagttttcgtaatgttcgggcgtatttccggcgtcggtgcgggggtagtagctcaggaaccatacgaccaccgacgcgaccagaatcatgccgcccatcttgcgcagatattgcgcgcacttgtcccacatatgcctgagcgtggttttccacgtcggcaggcggtagggcggcagctccatgacgaacggcgtttcgtccaccgggaacatgaaccgccgcatcagccgcgccgtgaagacggccagcacgacgcccagcacatagagtccgatcatcaccagcccggcgttttcggcgaagaaggtgccggccagaagcaggtagatcggaattcgcgcgctgcatgacataaaaggggtgatcagtatggtgatcagccgactgctgcgactctcgatcgtccggcaggccatgatcgccgggacgttgcagccgaagcccatgatgagcggaatgaacgatttgccgtgcaggccgatgcggtgcatcacgcggtccatgatgaaggccgcgcgggccaagtagcccgaatcctccatgaacgagatgaacaggtagaggatcatgatgttgggcaggaagacgatcacggcgcccacgccgcccacgatgccgtccaccagcaggtcgcgcagcggtccggcgggcatcatgtagtcgatcgcgccgccgatccagcccaccagcgcatcgatccactcctgcggataggcgcccagactgaacgtgcaccagaacatgaaccacatcaggaagaagaagatcggaaatccccacaacttatgcgtcacgaaggtgtcgatcagcgccgtggtcgaagcctcctcgcgcttgcccggagtgaaggtctccctgagcgcgccctgtatgaatccgtatttctggttggcaaccgccgtttcgacgtcttcgcccagcgcttcgctgatgcgcttggcttccagatcgcggatcgcggtccattcgggccagcggctgcagccgcgcagctgctcctcgacctgccggtcgccttcgagcatcttcatcgcatagtagcggggcgggaaggctttgggcagctcgccgcggaaagcgttcatgtcgccgttcaggcggcgcagtccctcttcgatgacggaccccatgttgatatggatgtggcgcacgcgctcgtcctgattctcgtataccgcgatcaccgtgtcgagcagctgctcgatgcccttgccgttgcgcgcctcgacgggcaccatcggcacgccgagcatgcggcccaagttgtcgtaatccagctctgcaccgcttgagttaagctcatcgaacatgttgagcgccacgaccatgcgcgggtttatgtcgatcagctccgtagtcaggtacaggttgcgttcgaggttcgacgccaccaccgagttgataatcacgtcgggagtcctctcggcgatgtggctgcgcacgtaacgctcttcgggcgtgtaggccgaaagggcgtaggtgcccggcaggtcggtcacttcgaaacggtagccgcggtagtggcggtgcccgatcttggcgccgaccgtcacgccgctgtagttgccgacgtgttcgtgaccgcccgaaatggcgttgaaaagcgaggtcttgccgctgttggggttgcccaccagcgccacgccgatcgtgcggctgtgacggttgatgacttcgtcgatcgtcgcgcagccgtcatccggaccgggcgtctcggccgtcgggtattccggttccgcgggctgtccgtcggcgccgcatccgcagtgccggcggtggtgttcgtggtggtgatggcgcgagccgcccccggcgaggtattcgctggcttcgctgtctgagagcacgaccaccatgtcggcttcgctgcggcgcagcgagatgtcgtagcccatgatcttgtattcgatggggtctttcagcggggcgttgagaatcacttcgacccgctgtccgcggacgaaacccatctccatgatgcggcggcggaaaccgccgtgtcccgtcactttgagtatcgtggccgattccccggtcttaagttcggatagacgcattgtcgctctttggtttttggctccaaagatacgattttacactgggatgtgcaatccccatttgtgggtatattcgtctcaccacccgccgcccagcgccttgcagagattgacgtagttgatatattgctgcgccaccagattgacgaactccatctgcgactgatagaggctgcgctgggcgtcgatcacgtcgaggtagtcggacaggccgctgtggtagagcgcctgcgtcatcgcggcgatgcggtcgttggcgaggaccagctcgccgtagcgttcggtctgtctgcggtaggtggtgatggccaccagcgcctgctcgacgtcggaaaaggccgtcagcacggtctgctcgtaggtcagcgccgattgcgtgtaacgctccatggcggcctgttccgcgcggcgaagtctgccgaagttaaagacggggagcgtcagcgagcctaacgcatcccacgcccaagggttggccgaagttaaacctttgatcgaattggaggctgctccgcctttggctgtcagagcaatggacgggaaccggttgccgcgggcaatgcccacttcagcggctgcggcgagcatgtcgtaacgcgcttgcatgatgtcgggccgccgttcgagcagctccgagggcagtccgacgggaatgtccgccggacggtaatcggtcagcagacgcagtccagcccccgcgctgtccgttcgccgcggcatttcgcccagcaggatgtcgagtgacagccgcgtctgcgccacggcccgccggtactgcggaatgtccgcttcggcggtgtagaccagacttcgggcctgctccagcgccacgccgtccgacatgccgtagcggaacatcgagtcgatcagggccgccgattcgcgccgcagggcgcagctctgccgggcgatcgccagatcgcgttcatattcgagcagggtgaaataggtcgtggcgacttcggccgccagcgccagccgtacgccccgcagcgcccactccgacgaggctatctgggcttttgcggcgcgtttggcgttgcgcagctgcccgaagagcgccacctcccacgagagcgacggctcgacggcgtacgactgcacgatcttcgtggcaggcgtatattcgccttcggccgtgacgcccagcccgacctgcggcaggtactgcgcccgcacgctcttgaggttcagccgcgcttcctccacgcgcgaggccgccacggccacgtcgcggttgttgtccagcgcccgtgcgacgaggttgttgagcaccgtatcgccgaacagcgtccaccattcggggccgaagcgggtcgtatcctccgagaatccccgcccgtagatgtaatcgtcgggcacggagacgcgcggcgggtagaagcgcggcgtgcaggccgccgtaaatgctgcaaaaatgattatgaggtatccggctttcatgactgttcctgttttttgcgttcgcggcggcgttcgaatccgccgatgcgtcccacgaaatagtagagcgcggggtagacgaagatgcccagcagcgtggcgaacagcatgccgcccacgagcgcgacgcccatgatgttgcgggccgtggcgtatacgccgctggcgaagatcagcggcatgacgccgaggatgaaggcgaaggcggtcatgatgatcggccgcacgcgcagtttggcggccccgatcgcggcgtccatgagcgaggcgccctgctcgttgaagagcctgtcggcgtactccacgaccagaatggcgtttttggccgccagtccgatcagcatcaccagcgaaatctgcatgtagatgtcattgacgtagaaggcgttgagcaggtgtgagacgccgatgaagagcacggcgcccagcaccgccacgggaacgctcatcagaatcgccagcggcagcccccacgattcgtacagggccgccagcgcgaggaacacgaagaccagcgccagcaggtagaccagtcctccggtcttcgaagcgttggcttcctgaaaggaggtgccgctccatgccgtgccgacgtcgtcgggcagtacctgcgcggccgtgcgggtgatgtcctgcatgacggtcgtcgtcgaggtgcgggccgcgggggtgaccgtaagcccgatcgaacggtagaggttgaactgcgagacgtattcgacgcccacggtatccacgacctcgaccagcgacgagacggggacgctttcgcccgacgaggaggcgacgtaatagctgtcgagcgagcgtttgtccatgcggtaggcgggggcggcctgaatgtaggtctggtagagcttgccgaaacgcgagaagttgttgacataggcgccgcccagcagggtcgtcaggtcgccgtaaagtacgcccaagtccacgcccgaagccagcgcctgctccttgtcgatgcgcagccgccgctgggggacgcccgcgttgaactgcgtggtcaccgacgcgacggagggcagcttgcgcagcgagtccatcagccgttcgctctgctccagcaggtaggccgtgccgcgcccttcgaggtcctgcacctcgaccgaaacgcccgacgtgatgcccagaccggggatcgacggcgggatgaaggcgaagcactcggcgcccggaaccgccatgtaaagctcgtcggtgagtttctgggcgatctccatggccgtcagtttgcggtcggaataaccgaccagcgacacgaagatgatgccgctgtcggtcgaggcgatgcccgccatcatgttgaatcccgctgcgaacgaggtcgaagcgacttcgggcagcgtgcggatcacttcgtcggcccggatcatggccttctgcgtcacctgcagcgacgaggcttcgggcgtcgaaaccatcaccatcacgtatccctgatcctcttcgggcaggaatccggcgggcagtttgcgccacacgaggaagatgacggccagcaccgcggcgataaatacgcccgtgcgggccacgtggcggatcagcgtcggcgtgaaggccgtgtatttgtccatccgccgggcgaaccagcggttgaaagcggcgaagaatcccttcttgggcggttcgcggcggcgcaggagcagggcgcacaaggccggggagagcgtcagagcgttgaaggccgagatcacgaccgacacggcgatcgtcaccgagaactgctggaacagccgccccgtgatgccgcccgtaaacgatacggggatgaatacggccagcaggacgacggtcgtggcgacgatgggcgaagccacgttcttcatggcttcgagcgccgcagcgcgggggttcatcccgttggcgatattgacctgcgcggcttccacgaccacgatggcgtcgtccaccaccaaaccgatcgccagcaccagtcccagcagcgaaatgatgttgatcgagaaccccagcagcggaaagagcgcgaaggcgccgaccagcgacacggggatggcgaccagcggaatgaccgtggcgcgccagtcctgaatgaagaggtagatgatgcagatcaccagcacgagggctatgatgagcgtggtgaagatgtcgctgatgccggcgtcgatgctggtcgtggtgtccacgaccgtcgatgtcgtgatgccgtcgggcagacgttcgccgagccgcgccatttcggccttgaccttgtcgcccacggccacggcgttgctgcccggctcctgatagatgacgataagggccgtgggcttgccttcgaagagcgagcttacgccgtaactctggcttccgagcgatacgtcggccacgtcgcgcaggcggatctgttcgccctccgaggtggtcacgacgacgatgtcgccgaactgctcggccgtggtgatctgcgggggcatggtcaccgtataggtataggaggtgccgtcgggcgcaggttcggccccgaactgtccggcggggtagatgccgccctgattttcgatggcggcggtgacggccgaaaccgggatgccgtagtatttcagcacgtcgggccggagccatacgcgcatggcgtactccccggcgcccatgatcgagaccttgcccacgccgtcgatcttcagcagttcgttctgaaggttgatgtaggcgtaattcgagaggaattcgtcgtcgtagcgtccgtcgctgtgcagcgagaagaccagcaggaaacccgtcatggtcttgcgcgtggtgacgccctgcttggtcaccgtcgccggaagctgggccgcggccgaggatacgttgttctgggtgaagatggcgtcgaggtcgggatcggacccgatgtcgaaggtcacctgcatgaccatcgaaccgtcgttggcgctcgtggtctgcaggtagagcatgtcgctgacgcccatgacgctctgcgccacgggcgtggccacggcgttattgaccgtctcggcgtcggcgccgtcgtaggtcgccgagacctcgaccaccggaggcgtgatgtcgggatactgctcgatcggcaggttcaggatcgagatcagccccacgagtacgatgacgatggccagcgagatggcgaaaatcggacgtgaaatgaagaatttctccatgacgtcagcgttttacggggattaccttcatgccgtcgcgcagtttctgctgccctgccgtaaccacctgctcgccctcggcgagcccctcgtccacgcaccacatcgtgccgtaggtgtcgcccagcaccacgcggcggtaggcagccgtgctgtcgggccgcacgacccagaccgaattgacgccctgcgcctgactgacgctctgctggggcacgatcacccgcggctgcacggggccgacgttggccgagacgcgggcgaactgtccgggtttgagcgaccggtcggggttggggaacatcaccaccagcacgagcgttcccgtgctgctcgacacgtccttgcgcgtatagtcgtagagtcccccgtaagggtagcgcgtgccgtcggccagcgtcaggcgaatgtccgagagcagcccttcgttgtcgtagatcgaactgcgtcctccggccgccctgaggtattcggccatcggaatggccacatcgacggtcagcgtgtcgatgttcgaaatgctcgtcagcacgctgaactgcgtgccgggaccgacgtagtcgcccacatgcgccgccgtgtgttcgatgatgccgtcgatgggcgagcgcagctcggtgtaaccgacgttcatgcgggcgctgctgagcgtctgctcggccgagcgcaccgaggcttcggcggccttgtactgcgccgtatactgatcgagctgcgcctgactgatggcgttgatcttggccagcggcacggcgcgctcgtagttgttccgcgcctccagcgcctgcgccttggccgactggagcgcggcttcggcggcgagcatcgtggtcgagagctggtcggggtcgatcgtgaaaagcagctgcccgcgttttacgggcatgccgttcgcatactgcttggataacaggaagccattgatccggggctggatcacggcgtcgaaattactcgaaaggtaaccgatgaagctcatgcggttggggatgctgtccgtaacggcgcgggccgtttcgacctgcaggggcggcattgcgggtttcggcttgtgccggccgcacccggcgggcaggagcgcggaaacgagtcccgccacgattaaaagtctgttcataccggaatgttttacgctcttgcggggacaaaaaacgtaccgcgaaccgggtgacaggctcttggaaagggggttttatgctaaaaaacgttgaattttttggcaataaatgatgatgtttagataatttttatatctttgcgttgataacaaacccaattaataaaaaaagttatgaaagaattagtagcaaagatcaatgcagagtacgaagtattcgcagctaatgcagcagcacaggtagagaagggcaacaaggccgccggtacgcgcgcccgcaagtccgctctcgaaatttcgaagctgatgaaggagttccgcaaggtttccgtagacgctgcgaaataattacagacgcaatgacgcaacaaaggctgtcccaagggggcagcctttgttggtttcatacgggccgtgaacttgcctaaggtttgatgccgaagcgggcgaaaacctccatgtcctccggttcgagaccggttttgcggaagggaacggcctcgttgtggtcgttcaggtagcggcgcggacgtttgcggtcgtagccggggttcacgagcgataccgtcggatcgacgaagcggccccggatcgaggccatgtcggccatggtgtggaacagggcgtgggtcgtggccggcgctgtctcattgatcccggcagccgcggctttggcgggaaaattccgccggtaggcgtcggagaaccacgccagcgaggccacgtagagctgataggcggtcgtggtgggcgaggcgtgcaggaagcgttcgcggtcatcgtccagaatgtcctcgccgtggtcggcgcagtagagcagcgccgaggaggtttgccgcagtccgcgcaggaaggcgatcgtctcggcgagaaaatgatccgtgtaacagatcgaattgtcgtaagcgttgcggagcgtgtgcgcatgctcccgcgagatcgccacgtcgtcgtcgggtttgaaacgtgcgaattcgcgcggataacgctggtggtagctgaagtgggagccgtagcagtggagaatgaagagcatcttctgcgccggggaggtctcaacgatgcggcgcatttcgtccagcagctgcatgtcgtggcgcggcgagcggatatagatcaggtggtcggcgtcgcgggccagcttgtcgatcatggcgccctgcggcgactggttggagatgaaccacgtctcgaagcccgcttcgttgaagagggccggaagccctttgcggcggtagagctggtcgtgctcctcggtcgagacggaggagaggatgagcggcacgctcttgtgcgtggtgttgctctgcgtcagcacgtcgcggaaaatcaccagatcgtccacctgcgagagccggggattggtctcccgttcgtagccgtaaagctcccagctcatggcgcgcgacgcttcacctataatatatacgtaaatctcgcgtccgggcgcttcggcttcgcggctggcctcgtaggtgaaatccgccgaggtcttttcgaagttgtaggccttgcggaattccgaggcgctcaggtagacgttgtaggccacgttgagcgggaaaatttcgtcgcgcagcacgtgccgctgctcgctcacatgataggccggccacagggccagcatgcccagcgccatgagcgcggcgcccgaaaggccgacgttcatgcgcgtcgtgcgcgaaatgtagcgcttgtggccgatctcgcgcgccgcgaaccacaacagcggcagatacatcacgcagaccagaatgaccgacgggtagatgttgctcagcagttcacccgcctcgccgggattggtcgtcaccagattggtgaacatgtccgtggcgatgatcgagttgccgaacagatagagcagcacgatctggaacgcgcagaggaagataaagggaaatcccagccagatcatcacgccggaacggctcagcgccacgctccacatcatgtagaagcccagcggcatcagaatcagcgcctcgaccgtccagccggagtaaggctcggtattggccagcacgcagttggggataatcagcgcgacgaagaaatagacggtcagcagcgtggtgaaacggctgcgggttttgaccgtgcgtcgtctgtttaccctgttcggatcagcattcatatcgttacactaacctaaaaagcttcgtttatgctcagcaggaagccgctcgtcttcttgccgaagccgtaatcgagtcgcacattgacccgtttcttcaattcccagcgcaggccgacgccgtagttgggtagcgtctcggaccagtcgaaccgctccagatcgctgaagacgttgcctgcgccgccccagaaggtgcagccgatgcgccgccagatgcgctggcgcagctcgacctgaaacgttatcatgtcgttgtccgtgtagcggccctgataatagccgcgcatccgctgcgaaccgcccatgcgggccagcatcggccacggggttccctcggagttgaactccgcgtagaggtccgccgcgaggatgccgcccttccacacctgcctgtagtagtcggccgtgaaggtcgtgcgccacagcgaacgtccgcagttgcccagtcccttgggaaacagcgtctcctgcagactgacgtagacgccccggaaggggttgggtatgaagtcgcgcgagtcgtattccagaatcgccccgacgcccgtggcggtgtagtgcgtcttctgcccgtagaggtagctctcgcccagcggcttgaacttcttgccctgcgtatgctcgaaactgaggatgccgcccacataggtgttgggcagcacccggtgcaggtagcgcgcctttatcaggtaacgcttctcgttgtaggagctctcctcgttgtagcggccgtcgttatagccgatgccccacatgtcgcggggcgccgaagcgaacatcaccgtatagtcgatgcgcttgccgttgcgggagaagatgttgttgcccgtgacgcccagcgcatagaatcccgaaatcgagacgttggcgaagatcgaaatgtccgacggcgaagtgaccgagtccgtacggtctatgcggtagagtccggccgccagcagtccgatgccgagactcgtattcttcgaatagctggggcctccggcgaaggtgaagtcgattttcttctcgaacgtgcggtcgcgcgtcgatccctcgaaatatttcaccacgcgccgcgggaacgagagccgtttctgcggctggggttgttccggaagcggggtatagctgtaatgcagcgtgtcgctgccgttgatatacactccctcttgggccgctccctgcagcgcgaagcaaagggctaaagccagaacggcggttttgcgcagcatccggttatttgtacttctcgatcgtttcgtagaaatcggccttgtcctgctccgagagaacccccttgcgcaggaagaccagctctccctccttcgatacgatcatcagcacgaactggttgttgcagtcgcccagctcccaagccttgctcaggatgcggtcctgatcggcgagcaccagcgcgccgttcttggccgtgcgtttcttggccatgttgcgggccatgccgttgggaaccatcggggcgtccttgaggttcatcacgccgaagccgaaaatattgtcgccctgagcgcggtggttctcctccagctcgatcgtgaagtcgttgttctgcttgtgacggtcggggtccacgtaaaatatcatcaggttcttctcgccccaatgcggcagcttggccggattgccgtcgaggtcgagcacttcgacattatccactttgcggggcagctcctgagccgccgctgcggatgcggcgagcgtgaaggcggccagcatcccaattactttcatcttcatcgtaatcctgttttttggtttcaaaagaaaacaaatctgggcaaagttacaacttttccgccaacatacggacaatcagccgttataatattgtccgtatggttcacttttttggcttggcgggagtcagcgccgtgtcgaaggcgtaaagtccgccgccggaaataatcaggaagacgtagacgcccagccacacgaactccagctcccctgcgccgaatccgccccacgcgaacatcagcaggatgcccagcgagagaatcagcgccgacatccgcacccagatgcccatgatgatcgccaccgccagcagcacctcggccaccgttacgacgacgaacgtcgccgcgctgccggccgaggcgaacgacgggtacgaattgacgatttcgttgtaatcctgcattttgccgatattgtggaagagcatcatgcctcccgcgaacagtctcatgtagagcacggcccaatccatgtgccggtattgcccgatccagtcttcgattctttttcccatgccccggcatcgtgcaatttgtattccaaaggcgttccgggagcgattcgcacccggcctgcgccgttccggacgcgctcccgaaccgcagacggcccggcatggacggatatttccgccccgaagtccggagccgccgatgacacggatgccgaccggcctccttgaccgacacaaggtctccgggcggatatttcccgtccgccgcccgcttcgacacgctcccggagagcctgttccggcagaaacggccctgaattttcgtcttgtcgcccgattttcgttatctttgcgcccatgaaaaccaatatccttttcgtctgcctcggaaatatctgccgctccccggcggccgacggcatcatgcaccacatcgtcgaagagcggggactcggcggtcggatcggaattgactcggccggaacctacgcgggacacacgggcgaactgcccgacgcccgcatgcgccgcgccgccgcacggcgggggtacgacctcggccaccgcgcccggcagatccgggaggaggatttcgaccggttcgacatgatcgtcgtcatggacgacatgaactacgagaacgtccaccggctcgcgccgtcgcgcagggccgccgaaaagatcttccgcatgcgggagtttttccgccgccacccccgttgggaccatgttcccgacccctattacgaaggcgccgaaggcttcgagctggtgctcgacatgctggaggacggctgcgggggaattctcgaatacctcgaaaatccgcagtgacatgcaaaaaaagcaatccggagacgcccccgtccccggattgttgttttcgcagcggcttgccgaagccgccgtatcgagaccgcgcgtcagaagtcgagtccgaaactgatgctgtaagtattgtgcagcagcgtctgcttcttggcgatcaggtaggcgaagtcgagacgcaggtgcaggaaccggacgcccgcgccgaccgaaccgtaggaagggtagtagtcgcggcgctcgccgtagtgataacccgcccggagctggatgagctgcatcaggttgtactcggcgccgaccgacatctgaaatccccggactttcgaaggcgagaagtagtagcccagatccgtgccgacggttatctcgtgcacgtcgctgaggaacgtatccagcgccacgcccgccgtcaggtccatcggcagggtgtagggcgtgtctttcagatagccgcccagattgcccagcttggcgcccgcgcgcagcgtcgaatagcttccgacgttttccagcgggtgcgaccatgcggcgctcaggtccacggccagcgcgtccgccgaggtttcgggacgcttgaggtgcatgtagcgggccacgacgccgacggcccagttgccgccgatgcggcgcgagtagcccagatcgaccgccatgtcgttgttgccccgctcgcgcaggtactgccgccagccgatctgcgccagattgacgttgtcgaaacggcagaatcccgtcacggcgtagtagtcgaactgcccctgtccgtaataggacgaggatatctgcgacggcatctgcgagaaaatggccgtcgcggagttgttgtatatggcgtgcgacccagacagggtcgtcatggcgacgccgcccatgccgagcgtcttggcgtcgggcgtcggcagggtcgcttcctgcgctgcggcgcagagcgtcgcggcgagcagtgtcagtgtggttatcagacgtttcatacggcaaatatagcgaaaggcgggcggcaaaacgaaaatttgtctcctgatttgtccggaacgccttccatgtgcggcaaatatagcaaaaaagatgcaagttccgccggtgcgggcggccaaactccgggcacggcgcgcccggcctgcgatcggacttcgggacccgccgccccgcacgggccgcggcaccggcgtgcggagcatgatgccgtcaggctgaaatccgcttcaggcactcctcgaccagcttgaaaaaccgggagatatgcgcgccgtccacgaacgcatggttgacgaagatcgagagcggcatcacgagccgcccttcgcgcatcaccgccttgccggcgttcatcagcggatattccgtcggctggcccggcgctccctgcgcgtaggtcagggaggtgaaatagaggtccggcgtggcgctcagcaggaagacgtcgtaatcgccctgcgcctgcagcaccttttcggcgccgtagggatcgccgtcctgcggaatgtcggtgacgatggcacgcgcctcggcgtagaagcgttcgaaatcggcatggtaggggatgcggacggtgtaaaacgtgcggcccggaacggcgatgggcgagatgacgtccaccgtgtcgtgccagatcacgtttccgcggctgtctgtgcggtagcggaactccctgatttcattgaccgcgcgcagcacggcgtagaggtaatagaggaagaaggagcgtcccgcggctttggccgccgcacgggcttcggtgcagtcgatctcggtcgccaccgaaatccacgaattgaggaagttgcggaaaaaggcgtaattgtcccgccgctcccaagtttcgatgtctacggtatgtttcataaggtatggcgttaaacaaaacgtccgctcaagcagacttggcggacgcttttattgccggtccgatgccgcggggcaccgaaccgctgctgttttccgattgccgggagattcctaacagttcatcgcgccgcagcagtggatgacttgtccgctgacatacgacgaaagatccgatgcgaggaacagcgcgaccttggccacgtcctccggcgtgccgccgcggcggagcggaatctgcttgtaccagccctccttcacctcgtcgggcagtttgtcggtcatctcggtcatgatgaagcccggagcgatggcgttggcgcggatgccgcggggacccatctccttggcgatcgacttggcaagaccgatcatgccggctttcgacgccgagtagttgcactggcccgcgttgccgctgacgcccaccaccgacgacatgttgatgatcgagccgcccttctgacgggccatgatcggcgtcacggcgtggatgaagttgaacgccgacttgaggttcacggtcagcacggcgtcccactgggcttcgctcatgcgcatcatcaggccgtccttggtgatgccggcgttgttcacgagaatatcgatgcggccgaaatccttgacgatctcttcgatgaccttgtgcgtctcttcgaaattcgccgcgttcgacgcatagcccttggccttgacgcccagcgccgcgatctcggcttcggtggctttgccgttgtcgtcgatcacgaggtcggtgaacgccacgtcggcgccctccttggcgaattcgagtgcgatggccttgccgataccgcgggccgcgcccgtgacgacagccactttaccttcgagtaatttcatagctttcaaagtattaagaatgtttgcaaaatattctgtttttccttttttcgtccgaaagacgaacaaagttaagaaaaatattttgaaacgctccgccgccgccggaatttcgccaaatattactaactttaccgtccgtaaacgaatcatcacaaatccttagagatatgaaaagagacacccagattttcgatctgatcgccgccgagcgcagccgtcagatgcatggcatcgaactgatcgcctcggagaacttcgtaagcgaacaggtcatggaggccatgggctccgtgctgaccaacaaatatgccgagggttatcccgcagcgcgctattacggcggctgcgaagtcgtggacaaggtcgagacgctggccatcgagcgcatctgccgtctctacggcgccgaatacgccaacgtgcagccccactccggcgcgcaggccaatatggcggtattcttcgccgtgctgcagccgggcgacaccttcatgggactcgatctggcgcacggcggccacctttcgcacggttcgccggtcaacatgtcgggcaaatacttcaacgccgtgggctaccagctcgacgaggcgacgggcgtgatcgactacgacgccatggagcgcaaggcgctggaatgcaagccaaaactgatcgtcggcggcgcttcggcctattcgcgcgaatgggactacaaacgcatgcgcgaaatcgcggacaaagtcggcgcgctgctgctcgtggacatggcccacacggccggcctgatcgccgcaggactgctggacaaccccgtgaaatacgcgcatatcgtcacttcgacgacccacaagaccctgcgcggaccgcgcggcggcattatcctcatgggcagggatttcgaaaacccgtggggactcaccacgcccaaaggcgcggtgaagatgatgtcgcagatcctcaattcggccgtattccccggcattcagggcggtccgctcgaacacgtcatcgccgccaaggccgtggctttcggcgaggcgctcgaacccagctacaaggagtatcagacgcaggtgcagaagaacgcaaaggcgatggccgaagcattcgtgaagcgcggctacaagatcgtttcgggcggcacggacaatcacctgatgctggtcgacctgcgcaccaagttccccgaactgacgggcaagctggccgagaagtgtctggtggcggccgacatcacgaccaacaagaacatggtgccgttcgacagccgttcgccattccagacttcgggtctgcgcttcggcacgccggccatcaccacccgcggcctgaaggaggacaagatggactacatcgtcgggctgatcgaccgcgtactgcacgatcccgaaaacgaggacaacatcgccgccgtacgcagggacgtgaacgccctgatggccgattatccgcttttcgcttggtagcatgaaggaggtaatcgactttttccgccgcctgcacgacaacaacgaccgtgcatggttcgacgcccaccgcgccgaatggacgcacgtgaaggggcgcttcgccgccttcacggagcggctgatcgagggaatcgccgagttcgaccctgcggtgcgcggcctgcgggtgcaggactgcacctaccgcatcgcccgcgacacgcggttcagccccgacaagtcgccctataagacatatataggtgcgtacatcgctccgaaaggcaagaagtcgggattcgccggttactattttcatatcgaaccgtgctgcgacagcctgatttggagcaacgcgctttcggcggggctttactgccccgaaccggtcgtgctgcgcagcgtgcgggacgaaattacggacaacggcgcggaaattgcagcggcgatccggaaagccaaagggttcgaccttgtcgaggagaacaagctcaagcgggtgcccacgggatttcccgccgacagcgagtacgccgacatgctgaagctcaaggatttctacatcgccaagcggatcaccgaggagttcctgctcgcggacgacctgttggagaagactttggcggagttccgccgcacgcagccgttcgtagcgattctgaaccgcgccgtgcagttcgcctacgaggagatgatgtaattttatgcagacgatatgaaacggattcttgtattattcgcgctcttcgccgctgcggcgggttatgcgcagacggtcgaaaagcagaccttcgtctatgccgtcaagcagaccgacacgctgcggctggaccgctacgtggcgctcacgcccgacagccggaccaaaccctgcctgatgttcgtcttcggcggcggtttcgtgggcggccggcgcgacaatgcgagcttcctttcgtatttcgaatattacgcccggaaagggtatgtggtcgtgtcgatcgactaccggctcggcatgaagaaggccatgcaggccggaacgctcagcgaggagaccttccccgaagcgtggatcacgacccttgcgatggcgaccggcgacctctacgacgctacggcctacgtctgcgaccatgcgtccgcatggggcgtggacaaaacccggatcgtggcgagcggttcgagcgccggagccattacggtgctgatgggcgaatacggcatctgcaacgggcatccgctggcgcggcagaagctcccgcaggactttaactacgcgggtgtaatatcctatgcaggagctattttcgacacgcaggaagagctgcgatgggccaagactcccgcgccgatgatgcttttccacggcgatgccgaccgcaacgtcccctacgacgccgtgctgtacgacggcaacgggtttttcggctcgaagcatatcgccgatatgcttaccgaacggcgcatcccgcattggttttactcggtcgccaacaccaatcacgtcatggcgacccgcccgatgtacgacaaccgttacgagatcgacgcgttcctcgaaaagctcgtcctgaagcgtgaaccgctggtgatcgacacctatgtcacgccgctggaagcccccgaactgccgaaggcctttacgctctccgattatatcgacgccaattacggcaaatagccggctgtccgttccgttttatacgaccgtcctccacaggaggacggttttttttatgaaaagctcaccgtttttttcggtttcgaataggtgatagtcccgtttcgcttgtatatataagcaagaaacgaagttatgcgacaacaaatccagcaattcggcaggaccctgagcggcatggtcatgcccaatatcggcgcgttcatcgcgtggggattcatcacagcgcttttcatcccggagggatggtggcccaacggacagctcgcgcagctggtcgggccgatgctgacctacctcctgccgctgctgatcgcctacaccgcagggcgcaacgtcgccggggagcggggcggggtaatcggcgccattgccgccgtcggcgtgatcgtcggcagcgatattccgatgttcatcggcgcgatgatcatgggtccgctggcgggatatgcgatccgccggttcgaccgcatggtcgaggggcgcgtgaaggcaggcttcgaaatgctcgtcagcaacttctcgatcggcattctcggcatgctgctggccgttctgggctactatgtcgtcggcagcgtggtctccggcctgacgatgctcataagcagcggtgccgagctggtcatacgccacggactgctgcctcttgtgtcgcttttcgtggagccggccaaggtgctgtttctcaacaacgccgtcaatcacggaatcttctcgccgatcggcatcgaacaggcccgcgaaacggggcagtcgatcatgttcctgctcgaaaccaaccccggtcccggattgggcgtactgctcgcatactggcttttcggccggggaaatgcgcgtcagtcggctccgggagccgtgattatccagtttttcggcggtatccacgaaatctattttccctacatactcgcccgtccggtactgatcgttgccgcaatcgcgggcagcgccgcgggactgctgtttttctcgctctccgatgcggggctggtggctccggcgtcgcccggaagcatcctctcggtgctggcgatggctcccaaaggcaagacgctcatcgtcctgctgggcgtcgtgatctccgccgccgtgtcgctggtcgtcgccgcaccctttatccggcgcgcgtccaagaccgaaacggaaggcgatccagccgtcgggaagctcccgcaaagcacagcgggcatatcgccgcatgcagccggacgacccgtccgcaaagtgatcttcgcctgcgacgcgggcatgggatcgagcgccctcggcgcgacccgtttccgcaaacgcctacgggacgcggaaatcggcgttgcggtgggcaacagtgcggcggaccgtattccgtccgacgccgatgtggtcgtatgtcagtccgtactggcggagcggatcgccgcggccgcaaaaggcgccgagctgatcgtaatcgacaacttcctctccgatcccggtctggacgccctgttcgcccggctggagagcgcgaagccgacggcggcaggccccggaaccgtatcctgcggcgaatcggactccgatatgtccgatgcccggcttgcggaagccgtattgccttccgacgtctgcgacgcccgatctgccggagcgacgccctcttccgaaacatccgcgttccgaccggcagaaacaacagcgtctcccgacatgcccgtcgcggccgattcggccccgcaacccgaagaaaccgcatccgcccccaaggacgccgctccggacggcgccatcctgcaacccggaaatatccgggtcggactgcctgcggagccgaaggaggaggcgatccggcgggcgggcgaactgctcgtcgcgggcggatatgcccggccggagtatgtcgatgcgatgctgcgccgcgaagagctggcgacgacctgtctggggatggggcttgcgattccgcacggaacctccgacgccaaggagcgcgtgctgcgctccggcatcgtggtcctgcaataccccgacggcgtggatttcgacggcgagaaagcgcacctgatcgtgggaatcgcaggcgtgggggacgagcatctggagatcctcgcccggctgagcgcatcgttcgaggacgaagagctgctgcagcggcttatgaccgcgaccgacccgcaggtgatctacgacgcgctgaaatagccgcaggatgcacaaccgaaaaccgaccgaaccaacaacgacttatatgacatcgcaaaaagtaacgattacggctcccaacggcatgcacgcgcggccggccggggagctggcaaaacttgtcaagggccttgcgcccgtcaggatcactttccgcaccgccgcgaaggaggtcaatgccgcgagcatgctcgccctgctgtcgctggggctgaagtgcggcacggagatcgaaatatgtgccgagggcggcgacgaagccgccgccgtgaaggccgtcgcggcgttcatcgcaaacatgagcgagtgatgcgcgtgcttcggaccggaatcccggcggcgggaattgccgcaggaacggcgttcgtcctcgaacgccgcgtttcggccgcaccgtccgccgcgaccggagatccggcggccgaaacggcccgcttccatgccgcgctggcgcaggcgaaaacggagctgggcgtattggcggcggaaaacgacatcttcgcggcgcacttggagatggccgacgacccgatgctggcggaacaggtcgaagagcggatttcggaacacggcttttcggccgaacgggctttggacgaagcctgcgaagaggtgtgcggcatgctcgctgcgctcgacgacgaatacctcagaggccgcaccgacgacgtgcgggacgtatgcggccgcatacgccgtattctcacgggcgaaacggccgaaaatccgttcgccggacttgcgcccggaacgatcgtcgtggccgaggaactgacgccgtcggatacggcactgatggatttcagccgcatcgcgggcgtggtgacggcccgcggaagcgtcacgagccatgtctgcatcatcgcccgcgccaaagggattgcggcaatcgtcggagcatctgaatgcatgcttgagataaagacgggcgacaagctgataatcaacggagatacgggcgaaataatcgtcgctcccgataccgcaaccgaacggcgataccgcgccctgagcgcatcgcggaaacggcacggcgagcattgcctgaaaggtgcgcatacgcccgccgtgacgcgcggcggacggcgtatcgccgtgctggggaatgccggcagcgtcgcggaggtgcgcgcggccctcgatgcgggagccgaaggaatcgggttgttccgcagcgaatttctctacatgcagagccgcggcgggtttcccggcgagcagacgcagttcgaagcctaccggcatgcggcggagttgtgcggcgaacggccgttagttatacgaacgctcgatataggcggggataaagcattgccgtacatggatttcggacatgaggaaaatccgtttctcggatggcgcgccatccgcgtttcgctctccatgcacgacgtgttccgtacgcagctgagggcgttgctccgggcgagcgtattcggcaacctgcggatcatgttcccgatgattacgtcggtcggggagttccgccgggccgaagccgccgtgcgggagtgcatggcggagctggacgcggaaaaagccgcttacaatcccggaatcgagctgggcgtgatgatcgaaacccccgccgcggtcatggtcgccgacctgctggccgcggaagcgcggtttttcagcatcgggaccaacgaccttacccagtacgtcatggccgcagaccggggaaatccgcgcgtggcgcatctctgcgacccgtccgatacggccgtgagacgctccgtcgccatgacgctcgcggcggcgcgcagcgcgggcatcgaagccggcatgtgcggcgaactggccgccgacccggaagccacggcatggctgctcgaagcgggactggaggagttcagcgtcagcgcacccgccgtcgcgccgctcaaagagcggatacggacgctggacctgcctgaggtgcgaaaaacacccggcgcagccgaataaatttgccgcggcacgcggtttacactatctttgaatccgatttacccgtttaacccaaaataaactgcaaaccatgaaaaaaacactgctcctgctggccgccctgaccttgtcgccggccctttatgcgcaggactaccatgtcgtactctgggacaacgcgacggcgcccacctccaacggcctgacgggcgaggagatccagcccaaacccggccagtggtccaacacccagaaagccgaaatgtggatatacaaggcaggcgacaacgccacgggacaggcgctggtattcttccccggcggcggctactcgacgctttcggtcggcaacggccacaaggaggccaagtggttcgccgaaaacggcgtcacggccgccgtggtgaaataccgtctgcccaacggtcacagcgaagttccgcgcaacgacgccgacgaggcgctgcgcgtcatgcgcgaaatggccgctgagctgaacatagacccggcgaaagtaggggtgtcgggcacctcggcgggcggctatctcgccggcagcgtgggaacgctttcggaagtgaagcccgatttcatgatcctctactacccggtgatttcggccgacgccgacaaacgccacaaggggacgttcgtgcaactgctcggcgccgacgatgccgacaaacccgtcgcgcaggagttctcgctcgaaaagaaggtcgatgcccggaccccgccgacgctgctgttccactgcgacgacgacaaggtggtgccggccgtgaacagcgcgctcttctaccagaagctcaaggaacacggcgtcaaggctacgctccacatctatccgtcgggcggccacggctggggcatgaacccgaagttccgctattacgacgactggcagaaagccacgctcgactggctctcgacgctttgacgaacctgtgaatataactgaaagccccgccggaaagcggggctttttgtatgcggtttgctccggatgccggcggcggggcagcatccggctgcaaccccaaccggcgatgcggcggagcgacgttatttctggcggaagatcacctcgcagtgttcgcccgtcatgtactcgacgatgttgagcacctcttcgagcgagttcgaacgctggtagttgaacgcatagcgcttgtcgccgtaacggcccggcaccgaaatccgcacgccgtaggtcgtttcgatatgcgagatgatttcatgcagggtggcgttggccatcgtcaccagatcgtattgcgaaagcacgaggtgcgaagcgttcacgtgcgagatttcgaggttgtcggccgccgcgtcgtacagcgcgcgctggtcgggctgcaaggtgaccagattgacgccttcgggggtttgcaggcgcaccgaaccgtgttcgaggaccacttcggcctgcccggagttctcgtaggcctgcacgcagaaggccgtgccgagcacccgtacccgcaggtcgtcggtagccacggtgaacggcgccgcttcgtcccgcgcgacttcgaagaaggccgcgccggcgagtttcacgttgcgctcggtcggactgaaagccttgggcagcgtaaggcgggtgcgggcgttgagccatacctgcgtgccgtcgtcgagggtgacggtcgtcacggtttcggtattgttctcatagacccggtaaatgtcgggacctgcgaggaaatgccatgcgaatcccgcacacaccaccaacagcacggccgctgcggcgctcatcgaccagcgcagcagaccgcgccggcgacgggcgcgctcctcgccggcgattttcgcgatccgggcgtcggtactgcgcatgaaggccgcgaaccggccgaggtcggcgctttcggcgaagacgttgcgggcgttccagatacttttaagctcgaaaaagtatttccggtgctcctccgactcctccagccacgccatgaggaactgctcctcccgatcgctggtctcccccgcaaagtatttattgatgactgcgtccattataagcgtatcttccattttggttttgctacttactatacaatcctcaggatgaatctacccaaaggactgcgaattattacagaggaaaatgaaaaacaggagcatcagcagttccgatttcgacaatttcgaccgcagggccttcagcgcgaggtagatgtggttttcgaccgtactctgcgcgatgccgagccgctcgctgatttcgcggtgcgagaatccctgcaggtagctcagcgtgaagacctcgcggcacttttcgggcagggcggccaccgccgcgtcgatgccggcgcgcaggtcctgcgagtagatcttttcgatgatgggattgttgtcgggatcgtagtaggcgtatccgatgctctcgatccgctcctgatggtaggagcggtagttgcccgcatgacggtttttgttcacgtaattgaccgactggttgtagaccgagcgcagcaggtagccgtagagcgactgccggggatcgagcgtctcgcggcggacccagacgtttacgaaaacgtcctgcacgatgtcctgcgcccagtttcccttcaggaagagacgggcgtaagccatcagcggcgcgtaataacggccgcacatctcgtcgaaagcctcgcggctgccgtcgcggatcgccgccgtgagccgggcgttgtctgtcggaatggattccatgtttacaaagatacacaaatcttgcgtattcgccaccccgcacccggttttttcaccgtcctgcacaaaacgacggcgccggaacacatcgctgtattccggcgccgaagcagtcagagaatgcaaggcgtcagttcttgacgaccgatatctcgtcgatgtaataacggctcttcttggcgcctacgctggtgaacatcagcttgtcggtaggcagcagcccctcgatcacgacgctgtgcgatttccacgccagctcgctcccggcatcgccgaccgcgatcgtgtcgccgaccttgactttcgttccgtcgccgtggaccacatacagctccatcgactcgaactggtcgcggcaccagcccgccttgaagacaacggccggggcggtggtcgaagccgcggtccagacgtttacggcggtcttaaaggtcaccgtgacattcgccgccgcagtgagtccgctcatggcgggcgtctggatatagctctggttcgcgttgtcgccgccgagacggaaactgccgcagaaggcattgtgaactccgttgcccgtaaccagcgcaccggtttcccagccgtcgtccttgaagaacatcaaccggtagggatcgccgtaggtgccgctgccggcattcatggcgccgccgcctgccgaccagtcggtgtaggtgaactcggtcagcatggtcgaaagcccggcctcgctggtcaccttcttggccgatttgacgccgacggcggtcatgacggcgtcgccgcccataaagcggtcgaagtcttcatagaacacttcgccggcaggggccgtgcggcgcgctacggttcccgtaatgtcgttcgaccacgccgaatcggaatctgcggcgccggccttcaccctgagcctgtagcttgccgagggtgacagggcggccgaagcccactccgtgcctacatagttgaaggcgaagcgcagggggatgcttccgtatcccgaagctttcgaccagtcataggtgaaccgggcgctgcgggagggatcgccctcctcctcgatggccaccgtatattgcgagacgtttcccgcctgctcccattcgaggatgatgctcgacgtggttacggcggctatcctgacgtaaagcgtcttcgactgcagcgtcgccgcatcggagttgtccgcggcaagcgcggcgagcgccacgaccgagaagtcgtgcgaagtgcccgccgtcagcccggtcgccgtgaaggcgttgtccgtcacagtctgcggcgtgccgttatcgaccgtcacgctgtatcccgtggcgccggaaacggcgtcccatgtcagcgccacggtcgagaatccgggttcggccttcaggttggcgggtgcgtcgagcttgccctgcgaagcttcggcggtggttgccgaagccttggccgaccagtcggagtcggtggccgtgcggccggctacggccttgaccttggcgttgtatttggtttcgggcgtcagcttgtcgagcgtgcaggccgtgccgtcgatcttttcgaccagcacggctttgctttcgtcggtgccgtcggcccagcaggcgaccgtataggatgccgcgccgctcacggcgtcccatttgagcgtcagcttgtcgggctgaacggcttcggcgtcgaatttcacgttcgccggggccgcgagctgctcaagatgcgtttcgccctcgcaggtgacgacgatgtcgtcgagcaggaagcgcgtcttgttggcgccggcctgcgccggattcgaggagaaggcgatgcgcgacgccggggtgagtccttcgagcgtcacggtgtaggtttcgaacctgcccacggcggacgagatgtcgaccgttttcgacacgaaggcggtgcctttcttgctcacgacgttgttcgagccgaattccgccccttcgacggcttcgacgacgatgtcgctgccgtagacgttttcgccttcggcataggcgctggccgagaagctgaccttgacggtcgtgttcgcgggcagggccgtcagctggggcgtgtagaggatgccgatgccgccgcttccgccgccgcacttgatgtagcccggacgagtggaggtgttgcccgacgaaccccagcccttcatgccgagcgcttcgacgtattcggccgacgtgccgcccgtgtggatgtggaactcggtcgcccagttgcagaggggacggtcgccgtccgcctgcggattcacgccctcggccttctcccacgtcttgcggaagtcggtgcccgaaacggcgttgtaaccggccgccgaattcacgatgtcgccgccgtggatgaaggcggagaaatcctgcgccagcacgatgtcaccggccttcgcggggttgttcgcagcggctttcgggccggcttgggtcgtggttccggccacgacgggagtctggatattggcgaaactcaggttggtgatccgggcgtaataggtcgtttcgggatcaagccctgagaaggtgtagcgcacgacggggtagccggccagcgcggtgaagatgcctttgcccgacgagagtttgccgtcggcgagccagctgacgtagaggtcggtgcaggcttcgtcgcggaaaagctcgacgttgtagctgcgcgcggcgtcagtcgccttgtcgtcggtgtaggaccactcgaaggtcagcgtcgaaccgctcgccgcatggagtttcagctgcggatcgaggtcgaggatgcccaccgaagccatcagcatggccggtttgtcgtgctcggtgacgtacacccagtccgaagtggcggagtaggggtagttggcccgcacgcggccgtaatagatccggtcggtcggcaggtcggtgaattcatggtagtcgatgtcggcggtggtcatgcagagcgcttcgctgacggggttcatgtcgccgtccacgagctgcacggtgtacgatgtcgcgccgcgaacgaagtcccagcagatcgtgagcgacttgttgccgtattcgagcagtttcacgtttttcggggtcttcgacttgtaggcgtccgaaatctccacgccgtcgtccttgcaggccgtgagcgaaaccgcggccgagaacgagaacagggcgaacagaatgtatatgatgctttttttcatggttgttgtccggttttaatatacgagcttgatgtcgtccacataccagcggcccgccttcaccgtcgatccggagaaccagctgtcggccgtggagatgaagagcgacggattggccagcgatccggggttggggatgacggccgacacttcgacccacgtgtaggccgggatgtcgagcgaaacgtagctcttggtcgaagcgacgatcttgctgagcgtgcctttcgaaatccagaagccgtcgttcttctcgcagatgccgaccatgccctgatcgggtgcggcggcccagatgccgaccttgaaggtcagcagcatgtcgtagcccgcgggaatgttcagcactggggagatgatgttgccgggctgtccgtcggcgttgtcgctcgccgctccgaactgcatgtagccggggcacatgtagttgaggtaacccgtccagccctccatgccgatggcgcggtagaacgagggattgccgttgcgtacggtcgaggtgatgccgccgatgctggcgttggtgcccgccgtgacgctcaccgtctcgttgtcgaggctgaggttggcgacggtcttgtccgccgaggtcacgccggctttctggccgatgcagtcgccgccccacgggaatttgttgaagttctggaccagcagcggcgtctcttcgcccgcttggtcgaatccggcgcggacgatggtcgaaatctcgccgaagtccgtttcgacacccgcggcgtcggtgactttcagcgcgaaggtcacgatgccctgtttggtcgcggtgcccgtgaggggtatctcgatgaagccgttgcccggcgaggaaatcgaatagctgcctgcggccgccgtcagcccgttgccgcccgtctgggccaccgaaacggtgtatttctccgtgccgacggccttgatgtaggggatgcggaggctggcttcggattcggcgttcagtttcagcaggcccgacacgccgaaccgctgtccgttgtcgaagggcttccattcgaagatgccgttctcctgtttgatggcgatggcgacgttctcctcgccgcagccgtgcaggtagatggtcgccgtgcgttcgtccgagacgttctggtcgcaggtgaccgtgattttctgataggtgtcgggactcccttttcccgccagctggtccacgtgcacccagccgtaggcgccggtccactcccggctgtcgggcacatcgctgatataccagtcgcccgtggcgcgaatcgtaaacgtattgctcgattcgacgtacgagaaactcatctcgcgcaggttgcgtttgaggaacccgctgtcgtcgtcgctgcatgcagtcagaccgccgatccccgccagcgcgagaattatcgtcagtttgtgaaaaaatttcataatgattgatcgttagttttgttttaaaccgataaaaaaaatcagaaaccgactccgggtcctgccggacgtcaatttcctacacggtttctaacgatatcgaatgacttgcacgacaaatatagcgaattttccggacttccaaacaaaaacggaaaaattttacgaccttcccgcgcaaaagtaaaatattgataaatataggtatgaatatttaaattacaaaacgataaaaaaagggttttcgtttgggtagttttctgcagtcgcttgtatctaatgcaaaccggacccgaaaagtccggccgccaaccgaaccgccagcaactgaaacacgcaatattaactgaaaacaacctaaaaaactacccacgcgatgcctacctaatcaatcacaatcggcactacacggtttttatcggacgacggatgacttgcaaggttccgcagaccgtatgaaaacgaacacgctcaggcccgtcccgcagacggcgtcgggatttcattttgcaaccggccgcaggaagtaaccataattaaccgaattgaaactatgaagaatttattccataaaggactctgtctggtcatggcgctctgctgcatagcatttaagggttatgcgggggggggaacgcttcccgacgcccaagggcacgacctgaaactgtcctattcccgaacgacgctcaaaaccgttgccgacgcgatcacgcagcaggtgggcatcgtattctcctatgaaatcgcactggccgattatccgatggagaacctctacgttacggagcagggggccgcgctcgacgccatcctcaaaacggtattcacgccccgcggcatcgattaccgcgtggtggacaaggtcgtggtgctgacgcgcagcgcgcatcccgcacaaaccgtcaaggccgctccggccaaggcgcaggtgacgggcgtggtgcgggacgccgcaggcaacccgatgatcggcgtgacggtcacgatcaaaggcacgctggtcggcgtctccacgggcgtggacggcagctacaccattccggcggacaaggacgcgatgctgctcttctcgtacatcggctaccgcaatcaggaagagctggtggggcagcgcacccagatcgacgtcacgatgcaggaggaccagctgatgatggacgaagtggtcgtcgtgggttacggaacgctcaagaagcgcaacatcgtgggtgccgtcgagaatctggcgggcgacgcggtggagaaccgtccgaacgccgacatcacccgttcgcttcagggccagattccgggtctgaacatcgtgcagaccgacggtaaggccgcccacggaggtcaggtgaccattcgcggcgtgaacaacagcttcaaggcccgcgtcaacgacgggcagaaggagaacaaactcggacagggcggcagcgcgctggtgctcatcgacggcgccgagggcgacatgagctcggtgaaccccgacgacatcgcctcgatctcggtgctcaaggacgcttcgtcggcagccgtttacggcgcccgcggcgcattcggcgtgatccttatcacgaccaagaatcccgaaaaaggcaaggtgcgcgtgaattacaacggttcggtgtcgctgcaccgccgcacggtgatctgggaggacaacgtggtgaccgaccccgtgcagtgggtcgaggcgttccgcgaatcgtatctcaactcatcgccgacggccaccgtcccgtcgctgttcaacaactacatgccttattcgaacgcatggttcgaagagctgaaacgccgccgcgccgatccgacgatggacaactacagcatcgacgccaacggcaactacagctattacggcgagacgaactggctcaaggagatttacaagtcggtgaactactcgaccacgcacgccgtcagcattcagggcggccgcgagggcgtgagctactacgtttcgggacgctattacaatcaggacggcatctacaaggtgggcgaggagacctacaagaagtacaacctgcgcgccaaaggctcgatccgcatccgcccgtggctgacgctcgacaacaacaccagtctgatgagcagcaagtaccatcagccgatgatgcactacggccagcagatgatctcgcgtcagatcgacatgttcgcctttccgttcgcgctgctgaagaaccccgacggcacatggacgcagaccgccgccaagagcggatacgcggccttcgccgagggcacttcgtggcaggaggacaaccggctggaggtggccaacaccacgacgttcaacttcgaattcgtccctgaggtgttcaaagtctcggccgacgtgacctacaagggcgcacgctggacgcgcgaccgcatggagaacctctacacctactatacgggcgtgaacgtttcgggacaggacaacagctactcgtcgctcgaaaactggaactacatttcgaactacatctcgaccaacatcgtcggcaccctcacccccaaactgggagcgaaccacgacctgaacatcgtggccggatggaacctcgaagattacgactaccgcgcgcagaagacctaccggcagggcaacctctatccctcgaagcccagcttcacgctgatggacggcgagtattactcgaccacgtcgggcggttacacgtgggggctggtcggcttcttcggacgtatcaactacgcctatgcaggccgctatctggtcgagctgagcgcacgctacgacggttcgtcgaaattcccggccaactcgcagtggggattcttcccctcggcatcggtgggctggcgcctctcggaggagccgtggctcaaaccgcacgtggagggatggctcgacaacttcaagatccgcgcgagcatcggatcgctcggcaacgccaacatcgacccctatcagtacctcgaaacgatgacggccaccaacagcgcctcgatcgccaagtcgtcggtcatcatcaacggtcagaacgtgccttacacgtcggttcccgacctgattcccgacgacatcacgtgggagaaggtgaccacctacaacatcggtctggacctcgacctgttcaacaaccggctctcgttcacgggcgactactaccgccgcaacaccaccgacctctacaccgtcggtcccaacctcccgcaggtgctgggcagcgcggcgccctacggcaactacgccagcctgaagaccaagggctgggaggtcagcctcggctggcgcgattcgttcaagctgggcggcaagcccttcaactacagcctccgggccatgctctgggacagccgcagctggattacggactactacaacgagaccgacgacctgaccacctactacaagggcatggagatcggcgagatctggggcttccgcaccgcgggcatctacgccagcaacgccgaggcgctcaacggcccggcctacaacttcttcaagaacggcgagatgttccgcgcctacgccggcgacctgcggttcgtcgacgtggacggcgacggcatcatgaccaaaggcaaccgcacgctgtcgaaccacggcgacatggagatcatcggcaaccagtcgccccgctaccagtacagcatcaacatgtcgctgaactggaacggcatcggcctttcgatgctctggcagggcgtgggcaagcgcgactggtatccgtggaccgaatcgggcttcttctggggcaagtggaaccgcgcctacaactcgctgatgaagacgcagacgggtgacagggtagtgaagatcgacaagagcaccgacaactggcgcgtgacgaacatggacaagaatccctactggacgcgtatggtgtcgctcgccgccaaccgcaacgacggtccgctgacgtgggagaacgaccactacctgcaggacgcctcgtacatccgtctgaaaaacatcacggtcgattacaccttccccaagcatatctgcaagaaactgcgcatcgaggggctgaagatctacgtgtcgggcgaaaacctcttcacgcactcgccgatgttcaagtatacggacatgttcgaccccgaagtaatcaccagcggcgactccgacttcgcaagcacccagaaatcgggactcggcggcacgggtaacggctactcctatccgatgctcaagaccgtgacgctgggcgtaaacgtaacattttaaccgactgcaaccatgaaaaaaatcctattatacacgctgatgaccgtggcggccgcaggaatgaccgcctgcgaggacttcctgacgcgcgacacctacgaccagatcggcagcgacgaattctggaaatcggagaccgatctggagctatacgccaacggattcatccagaagatgatccccggcgacggaaccatcacgcgcggcgacatcgacgccgactactgcgccgtggacatcgccaccgacctgctgcgtcccgacggcaacgtctcgcccgacaatcagggcggctggaccgaaagcagctggaccaacctgcgccgcgtaaactacatgctcgacaacatgcaccgctgccggggccacgtaagcgacgaggtctacaaccattacgaaggcgtggcccgcttctggcgcgcatggttctactacgacaaggtgcggaccttcggcgccgtgccttggtacgacttcacgatctcggccagcgacaaggaggctctgaccaaaccccgcgacagccgcgaatacgtcatggacaaagtgctcgaagacctcaccttcgccagcacctactgccttgccgacgccaagtacacgaaaggctcggccctgatcaacaagtgggtggcgctggccttcaagtcgcgcgtatgtctctacgaaggcaccttccgcaagtaccattcgcgtgagccgtcgtccgacaagccgtggcagaacgacgtctacaacgccgacaacaagttcctgcgcgaagccgccgcggcagccaaggagatcatggacaaaggtcccttctcgctcgtgacgggcgacgtgaagaccgcctaccgctcgctgttcaccagcgccgggctgctgacgcaggaggtgatcttcggccgcgaatacagcaaggagctttcggccttccacgaaaccagctggtattactattcgccgacctacggcaccaagatcgccatgaccaagaagttcatgaacacctacctcacgaccaagggcacgcccttcaccgacatcgacggctataagaccatcgacttcatccacgaattcgacggccgcgacgcccgcatggcgcagacggtcatcagcccctcgtaccagatgaagatcagcggccgcacggtgccctattcgcccaactggaaggtgacccgcacgggctaccatccgatcaagtggtcgatcgacgacgatgccgacaacgtgctttcgaaggcggccagctggaactcgctgccgatcatccgttacgccgaggtgctgctcaactatgccgaagccaaggccgagctgggcgaaatggacgccgccgtctgggatcagaccatcgcgccgctgcgcagccgcgccggcgtgacgtcggtcatccccgccaaggccgatccctacatggaggcttatttcctcaatacggtgaccgacaaatggattctcgaagtgcgccgcgaacggggcatcgaactttgtctcgaaatgggtctccgctgggacgacgacatgcgctggcacatgggcgacctgctgacgagcgacaacaacccgtggacgggcatctacatcggcagcacgagctatacctacgactacacgggtctcagcaccgacgacaacggcgatcccgtgcccgacttctacatccgtccgggcgaggacaccgaacattcgatcgccatttcgaatacgggcgccaaccagaccttctcgctcaacggcgagggcaacatcgtctgggaataccggcgcgtatggagcgagaagaagtacctgcgtccgattccgctgacggcgatcacgcgcaaccccaatctcgaacagaacgcgctctggaagtaagaggacaataaaaacgacaagatatgaagacaagaatcatgttattctgctgcatggcggccgcgcttctgctggcgtgcagcaacgacaaatcggacggcgagggccgcgaacccggcgtcgagaccgagcttaacggcacgcagctcggcgagggcacgaccctctacggactggtgaccgacacgtcgggcaaccccgtgcagggcgtggtggtatcggacggctacaactgcgtggagaccgacgccaacggcgtctatcagatgatccgctacaagaaggcgcgcttcgtctggtacagcacgccggcagggtacgaaatcaacacctcggcggacaactatccgctgtactatgccgaaatcgtccacaagaacatcgccgaccgccacgacttcgtgctcaagccgctggcggctcccgaaaccgacttcacgctgctctgcatcgccgacccgcagtgcgccagcacggccgacatcagccgttacgtcaacgagaccattcccgacatcgaggcgacggtcgaaacgttcaaggccaaagggcgcgccgtgtacggcatcacgctcggcgacatcgtcttcgacacgcccgacttgtggagcaacatgaaggaggcgatggccaaccgcaacctgacgatcttccagaccatcggcaaccacgaccacctgaagaccgagacttcggacgacaaggccgccgccaacttcgaatcgcagttcggaccgcgcaactactcgttcaaccgcggcaacgcccacatcgtctcgatggacaacgtcttctacgtcggcggcagcaccccgtcgagcaactacaagggcggcatcaccgaccagcagctcgaatggctccgtcaggacctgtcgcacgtggcgaaggacaagctggtgatcttctgcgcccacatgccgttccgcggcggcacgagcgaaacggacgaaagccacatgaatcacgccggggtgctcgacctgctctcggagttcgccgaagcgcacatcatgatcgggcacacgcactaccagcagaagtacatccacacccgcaacggcaagaagatcttcgaacacatccacggagcggcctgcggcgcgtggtggacctcgaccctctgcgccgacggcacgccgaacggatacggcgtgtatgagatttcgggcagcaccgttcccaaccagtattacaaagcgaccaacaaggccgccgaccaccagatccgcgcctactcggccaagcaggtgttcggcacctccggcagcacgacgttcggcttcgccgccaacgcctcggccatgaacgacgcgaagtgcatcgtggccaacgtctggaattcggacacgggcggcgactggaaagtatcgctctggcagaacggcgcgaaggtgggggatatgacccgcatttcgacctgcgactactgggcctacgcctaccacgtgctctacttcagcaagagcgtgggcagcacgtggggcaagaagctcgaccacttctattacggcaggctgacctccgggacgcccgaaacggccgatttcgagatcgtcgtcgaggacggcatgggcaacacctaccgcacgtcgaaacttcagaccgacttcatcggattctgattccggcctgcaaaaagcgatgccgcgctcctttcggggcgcggcattcctttcatgcggaaatccgtcagcggagtcccagcttgtccatcatcctgaggggatagttcgtgatgccgtagacatcgctgcggatgccctgataccactgcatctgctcgtcggtgtcgatctgccacaggctcagccgcaccttgttttcgggaaagctcttggcccgcttggtgtccagcccgaaatcggcgagcttcatgttggcccacggaatgtctctggcgatgaagtcgcccggttcgtaggccgccgctccgtacgacacgggccacgccgagcggaccgcgggaatcaccttgtcgcgtatggcaagacggccgacgatgaatcccacgaaattcttggccctcttctcgtggacgatttgcgcggcggcgatgccggtccggctcgcttccgcattgccgcccgcctcgtcgccgagcgtcttgacgtcgatccacaactgcgtgcagccgccttcgagcaccacgtcgatgaactcctccagcagcggcagtttctcgccgttggccagcgtgcccttggcgcacagctcggcataggtggcgtccttgaagcaggtgttgccgaggtagtaatcgtcgtggtagacgaccactttgccatccttggtcaggtggatgtcgcactccgaggcgaagagcttcatctcgacagcctttttcagcccggcgacggagttctgcggaaatccggtctcggcataacagccgcggtgcgccacgaccttgttgtcgacgggttcgggttcgggatagaccgccggttcgcccgtctgctcccaccaccagtcgggcagcggttcgtaatcgtcgtcggagcatgccgccagccagacgcaggccgcacagcacgccatcagcagatatttcagctttttcatcgttcttgtcggttttggaccggggagcgcccttcggcgggccgcaccccggtcggttgattacttcttgactttgtagtttttcacgcagcggatgccaacggccgggttgccggcgtcgaggttgtcgttgaaccaatagttgctcgtcgccttgacgttgttcagacgccacgtcttcttgaccgaggagccgatcagcggcacccacgagtgggccgtgtcgccgtactgcccgtagccgttcttgttgagccgccatccggtcggatagaggttgaaatcgaaggcgtcggcgcccgcggcacgggcgggagtgctgttccagccctcctgcgtgcggagccacggagccacgttgttggcgttggtggcgacgagtttggcgatggtcagcatctcctcccggacggggtaggtcccatcgccgcgcgaagcttcgagcgccgcataggccagatcgtaccagtcgcggaagttggcgatatgccagccgtaggggcagatgccctgaatctgggccgagagcgccggattttcggcgaagaaccgctcgtcgtcggtcacggccttcatctctgcggacttgaagacgcgcgccgtgatctgcgtgccgacggcatcgacgaacgtcgaaccgacgttgtaggccgagggccattcgatcgaggtgatgccacggcccaagccgccggcgggcgtgcccagcaggatttcatcgagcgtatagagacgtccgtgacggtccgtgacggcctgatcgcccttgaccgatccgccgctctcctcttcgtcgtaggcgggattgcgctcgatgtaggggtcttggggatcgtagccgcccgacgtcgccgagccggaataggccggcaccagacgcgaccccagtttcatcgcgccgatctccggaccgccgttccagttcaggttgcgggtcatccatatcttcacgccgccgtccttggtccggaacgccttcgacgggcaggcggccgccgcgtcgtcgggcatgcagttggcgatcgctatgcgcgacagggtgtaggtcatcgcattgaggtcgatggtcagcgtacgcatgccgtcgatgtcgatcgcaggccccgcgggaaccgcatccgccgccgaattgagcgtgacgatccgcccgtcggccgcaagcgcgtaagcggggtagtaatcggcgcgcagcacggtgttgatgcggatttcgggtgcatttccagcagtgaaataggcgtcgaagcggtagacgcccgcctcggacttggtcatgcgccgggcgagttcgaaccggtcgtaatcgaacagcgacgcaccccagacatagcagtagaggtctttggccagctgcgtgacgggaatcttcgccgtggcggcgctcgtctcctcgctgccgaccgtgatatagacgttggccgtgcgcggctgctcctcgtcgtcccacggcgcggccgtgaagcggatcacgttgccgcccaagtcctcccacgaaatccagtcggcgtcctcgtctctggagaccgcatagacgtcgcccatgttggtcgtgaagctgacatcgaccgggacgatctcgtcggcgttgaactcgatctgcttcgggtccaccgtgacttcggcatcggggtagacgcccgtctgcacgacccggagcgtctcctgcgtgccgtcggccgccgtcagggtaacggtcgccgtgcgtttgtaggccgtattttcggtcgcggtgatccggaatccgcggtgcgtgacgccgtcggcgtcggtgacgctgcactccgtcagcgtgcaccacgtttcggtcttgtccgtctcggcgctccatgccatcgacctgcgtgccttggggttgagcgtgacgatgacgttctgtccctgatcctcctcggcgttccgcccggcgttgtcgagggtcacgacttcgggcgagaaggcgatgcgtgtggcctgcacgttgttgtccatgtcgtcggtgtccgccagcggattgcaggcgcatccgagggccgcggcgacgagcgcaatataacagttgattttcattgtcgttcgtttttcgggttatgtatcaataccagccctccgtctgtttgagcttggaattcttgatgatggactcctgcgtgatgggccacaggagaatgttggcgttgctttcgcgcttgtcggcgacatccttgttgtagtcccagaccgcatccagacggatcagcgtccaccacgtgcgcccttcgccgaccagctctttgaggctctcctcgacgatggcccgttttacggccgcgtcgctggggtcggtatagtgggcggcgttgccgtaggcgcgcttggtgatttcgcccagcgccgtcagcgccccgccgtagtccttccggtagtatttgatctcggcatccatcaggaaggcctcggcatagcggtagaggatgaagtcggagtcgaaaatgcgcgcgccgcttatcatctgcccgacgcccttttcggtccactcgatcgacttgatcgtcgtgccgtagtcggccctgttgtaggtcagcttcgtgcgcgtatcgccctcgaccgaggtcagcagcgccttgtagcggtcggtataccaccaccactggttgccgccggtgatgggcaccgggttgttctggtaggccgcttcgacgtagttgctgttccagccgaggtaataacccggtccgttgacggcttcgccgttggcctgatggacggcgaagatcacctccttgttgagcttgttggccgaggagaagacctgagcgtagtcgctttcgagacgcgacgccgagaggttcagcgcctcgatggccttctcggccatggtgaggtacgacgaaccgccgccggcgacgcggtacatccacagcgcatagtcggccttgagcatctgcaccgcggcgggcgtggctacggccttgtccgaattgtcggtcacataccgctcggcttcggtcagatcgctttcgatccgggcgaagatctcggccttcggcgcgcggggcaggtagaggtcgccggccgtggattcgtaccccgtaagggccagcggagcgtcgccccagatgcgtgcgatccagaaatagcaccatgcgcgggagaaataggcgttgcccagactgaaattgcggaccgattccgaaattcccatctccggcacgtgcttgagaatcaggttggcctgattgacggtcttatacatgacgctccagtcggcataggcgttgctcgaagacatggtgctggtgcgcacctgcgtctggtccacgcccgacagcgttttgttcgtgcccgcgccccagagaccgttgcgaaattcaccccagcagaggtagatgtcgtgtacgctcttgagcgcgtcgcgcatgtagaggtagatgccgtaggtcgccgtctcggcgtcgctttcgtcgatccacatgttgctggccgagagcttgttgtcctgcatgatatcgaggtcgccgtggcagccgctcatcgtgcacgccgcagccagcagggcagtcagtatctttttgcatttcatggtttggtagttttaaggggttagaacgtgaatttggcgctgaacaggatcttgcgcgcgggcggataggggctgaaccccgtggcataggtcgaagccgaattgtagagtcccccggtggtcgccgcttcgggcgatacgccgtgcacggccgtccagtagtagagcgtgttgcccgaaacggtcagggtcacgtccttcatgcccagccggctcgtccagcgcacgggaagcttgtacgaaagcgagatgtcgcggatgcagaggtagtcgcccttctcgacgaagacgtccgacatgcgcgagaagttgcggttgccccagtcggggtcgttggccgtgaaacgggcgtacttggtcttgtcgcccggctgcgaccagcactgcttcacgtcgttcaccaagttccagttgcagttgcccatcgtcgccatgaagtagcgcatctgcatctcgttctgaatcgagtggcccagcgcatagtccatgtagatattcagcgaccagttccggtaccggaaggtattgccgatgccgccggtcgagtggggcgtggcgtagccgagcaggaactggtcctcctcgttgatgatgtcccggccgtcgcgctgcgtcgaacccgcgcggttgacccattcgtagtcgccgatatccttgcgtccggcgatctgcctgcggtccgagcggcggtatccgcgcgacgaagcgtcgtacatcgccgcatcggcgtcggcctgcgtctcgatgatgtgatcgaccttgtaaccgtagatgcggcccatgcgctcgccctcggcgatgcccccgaactggctgccgtcgccgatggtgatgccgtccatgcggttgcgcacgttgccgttgtcgggcagcttcagcaccttgttcatgttgaagttataggtgaagtcggtggtccacgtgaagtcgccgcggctgatgttgaccgacgaaatcgccagatcgacgccgtagaagcggaccttgcccacgttggagaccaccgagccgtaaccggtggtgttgggcagcgtcacgtcgaacagcaggttgcgcgtcaccttgtcgtaatagtcgaaactcacgcgcacccggtcgtcggccagccccatgtccagaccggcattgacctgcgtcgtggattcccatgtcaggttgctgttcggcatttcgccggtcgtggtggtggacatgccgttgtactgatacgccgaattgtagctgccgtaggtgtcgtaaagcccgatgccgttgttgcccgtcagaccgtagctggccctcagtttgagcgagctgaccaccttgttctgcggccagaacgcctcctcgtccacgatccagcctgccgaagccgccggaaagtaaccccagcggttgcccgcggcgaatttcgacgaaccgtcggcgcgcatggtgaacgacagcaggtatttctcgcggaagttgtagttgacacgcccgaagtaggagatcagcacctcgtcggtccgcgtgctggtcgggtagttggtgatgttggaggtcccgacgttcagcgtcggaatcttgtccgatgccgccccctgcacgcgtgcgtcgatgctgttgttcttgtccttcatgtagtcgtaaccggccaccacgtcgatgttgtgatcttcggcgaaggttttcttccagttcaggtaagtctggaaatccatgcggttggtctccgtgaaggcctctttcgtgggccggatgttggtgcccgtcgtggggttgttcttcacgaagaagtggctgcgcgaatggcggttgtggttcgagaactgggccacggcgcgcaggccgtccacgatcgcccattcgaggttgatgttcacgctcgaccgcttggtcgtctcgcccgtatcgctgtagtaatagttgtagtaggcggcgggcagcgtggtgttgttcggacccatggcgggcgttccggccaaatcctccccggcttcggcgtcgtaccagtcgcggtgggtggcgggcaccgaaaggccgcggatcaccgaattgcgcttgttgagcgcgcctccgtcgagcatctgccgctcgatctgcgaataatcgaaggtcgtggtcgccgtcaggcgtctggtcaccttgaacgaggtgttgccgtggaaggtgaagcgggagaatcccgtagccatgccgatgccgccgtcgtccgtataacccgccgacgcggcataccggatgttttcgccgccgccgttcacgccgatgtagtagttctgccagaaggcgtcgtcgaaccactggctctgctggtcgttgtcttggaaaacgatgatcttgccggggttcaccgggtcttcgatccatttgtaacccttcggcagcgactcgcccggattgagatagcgcgtcgtccagcgcgaagcggcgctgttgccggctcccgccgattccgcgccgtcgaggatgctgagcgggtccgcgccgccgcagtagccttcggcgatcgccggacgcagcgtgagcaggtaatcccggccgttcatcagatcgaacttcgtggccggactctcataggcccactgcccctcgaaaacgatctgcggtcccttgtggggcgcgcccttcttggtggtgatgagaataacgccgttcgatgcgcgcgaaccgtagataccggccgacgcggcgtccttgagcacctcgatcgactcgatgtcgttcgggttcaggcccgccatttcgcgtacggcgccgtccaccagcacgatcggatcgttggagttgttgatcgacgaaccgccgcggatcaggaatttcggcgccgaacccggcgtagcgtcggtcgtggcgacctgcaagccggcgatacggcctttcatgccgtccccgacgagattcacgggcatgctttcgagggttttgccgtccattttcgagatcgccgaagtcacggtcttgcgcgtctgcgtaccgtatcccacgaccacgacctcctccagcaccgactggtcctcctgcatcgtgacgtcgatcaccgaacggctgccgaccggctcttcacgttccgtgtaaccgatgtacgagaagagcaggaccgcgccgggctccgcctcgaccgaataggtgccgtcggccccggtcgtcgtgccgcgcgtggagtccttcaccagcaccgtggcgccgaccagcgggcttcccgccgcgtcgcagacacggcccgtcacgctgttcttccgctgcggctccgcagtgcggtcgtatgtcagcacgaccgtgcggtccacgattttgtagcggaatccccgtttggtgaatacgttattcagaatccgctccagcggggcgttgctctcgcgtaccgacacgtcgcccatcggcatggacgccagcgccgattcgtaggagaaaagcacgcccgtctgcttggtgaaagcgtccgtaaaagtctgtagggtagcggacttgaccgttaggtccacatcgtggtttttccggaaaggggagcctccgtcgtcttcggcataggccctcaggctcaagccggtaaacaaaagaagcatcgccactccccaacggaagatggaatttttcttcatgattttaaggtttgcgaaaaaggttaatttgggtgaaaagccccgtccgcggcggccgtccgcggacgggacaggggatagctatttaccgcgcacgacctcgcagcgctgtccggtcatgaattcgacgatgtcgatgacctcttcgagcgagttggtgcgcaggtagttgatgtcgtatcgtttccggttgtcgggatcggctatgcgtatccgcacgccgtaattcgattcgatgcgggcgatgatttcgccgatcgtggcgttcttcatcgccacgaggttgtaacgctccgtcacgaaatgctcggcgtagatctcttccacctcgatgtcgtccttcgcggcgtcgaacacggcccgctggttgggatggagccgcacgagattatagccttcgggggtctgcaggcgcaccgaaccgcgttcgagcaccacttcggtcagcggatcggcggcatgcgccctgacgttgaacgccgtgcccagcacccgcaccgacaggttttcggtcttcaccacgaagggatgcgcttcgtcgtgcgccacgtcgaagtaggcttcgccgtcgatgcgcacgatacgctcctccgaacccgcgccgaccgcatattgcagttcggtcccgtcctgcatccacacctgcgtgccgtcttcgaggcgcagggccgcaatttcgccgctttcattcagataagtacggaacagctcgtcccccggcgttccgacgccggctaaccacgccgcggttacggcgacggcgaccaccgccgctgcggccgcagccgacgcccagcggcgccatgcgggacgccgccgcttcacctcgcggcgcatcgcttcgtcggcgtcgatccgcgcgttgagccggcgcatcatagcgtcgcagcgctcgccgagctgtttggacgaaagggttttgtgggcgctccagatcgcggcgatctcgaaatagaaggtgcggtgctcctcccgttcttcgagccatgcgtaaagccgccgctcttcggcctcggtcgtttcgtgattcaggtgcttgtataatacagaatcgatgctgtataatacggtgtcgtcggtgtgtgccaatgcgtatcttttttaggtgcttgcataataacatacaggcaccccggagaaaatacctactcggtacggcaaattttttcctatcgcatgaacagcagggcgagcagcaacagcagctgctccttggagagcttccggcgcagttgtttgagcgccgcatacatatgattctcgaccgtactttgcgagatgccgagccgctcgctgatctcgcggttcgagaggtcttcgaggtagctcagtttgaatacttcgcggcatttgggcggcagcgactcgatcgccgcgtcgagactcgcgcgcaggtcgtcggaatagagcttacggatgatcggactgttgtcgggcgcatagtaggcgctgcccatcgaggcgatccgctcctgatagtaggcgcggtaatcgccggcgcgcctgttcttgtccagatagttgagcgcgcggttgtagaccgaacgcagcagatatttatacagggagttcgaatcgtccagcgccgcgcggttctgccacacgttgtaaaagacgtcctgcaccacgtcctcggcccagtcgtccttcatgaaaaggcgggcgtaggagaccagcatggcatagtaccgcccgcaaagttcgtcgaaagccttgcggtcgccgttgcggatccgtgtcgtaagcagaattttctccatcggacaatctgattcgccacaaaagtaaacattctgaatttatgaaacaatcccccgtgttatttttaatttttttgtaattccgttaggtggtttcgcccgatcggttgtatttaatatgtcacaaccgaactacacgaccgatgggaaaaaacctctttccggcgccggacgccgcagcgcagtccccggcagccatgctccggcagtacggcggcgtttgcacgcacgacggcacctgccgccgcgttttcccatccccggcgcagacacatcatgcgattctggtaatcatcaatcatagatagaatgaaaaaagctattcaattcggagcgggcaacatcggacgcggattcatcggcgccgtgctggaaaaggcgggctaccatgtggtgttcgccgatgtgaacgaacagatcgtggaccggatcaaccgggacaagggctacacggtgcagatcatggacaccgtatgcgaggaggtgcgcatcaccgacatttcggccgtggattcgcggagtcccgaactcgcgcagcaaatcgccgaagcggagatcgtcaccacggccgtcggccttacgatcctgccccgcatcgcaggagccatcgccgcgggcatcgaggcccgcagggagcagggcgtcgagcagccgctcaacgtcatcgcctgcgaaaacggcgtccgcgccacttcgcagctcaaagccgcggtgctgacgcacctcgacgccgccgggcaggcctactgcgagcagtacgtcggcttccccgactgttcggtggaccgcatcgtgccgcccgtcaaaagcgaaaacccgatcgacgtagtcgtcgaacgcttcttcgaatggaacgtcgagcgcgccgcattcaagggcgccgtacccgaaatccccggcatgaatccggccgacaacctgatcgcctacatcgaacgcaagctcttcacgctcaacacgggccacgccattacggcctatctgggccgcatgaagggctacatgaccatctgccagagcatttccgacgagcagatccacgccgtcgtcaaagccgccatgcgcgagagcgggcgggggctggtggcgcgttacggcttcgaccgcgacgcccacttcgcctatatcgacaagatcatcggccgctttacgaacccctacctctgcgacgacgtgacccgcgtgggccgcgaaccgctccgcaagctttcggcgggcgaccggctcgtaaaaccggtcctcacggcccgtcagtacggcatcggcacgcccaacctgctgctgggcatcggcgcggccctgcactacgacaatccggaggacccgcagagcgtggagatgatcgccatgaccgcacggctcggcgctgcggcggccgtagccgaaatcgcggaactgcccgccggcgatccgctgcccgcgctcgccgcgcaggcgtacgccgaagtagaacgaatcatccgctaatccccgcctgcgacatgaaaaacacgaaactgctactgctggccgcatgctgcgccgcgatcatgcccgcctgcgcccaagccccccggctgcacaccgtgaagatcgattcgatcgaggagctgcaggcctatttcacctacgatcccgcgcgcgacgtgatcgtcagcggccaccgcggcggcatgatgcccggctatcccgaaaactgcatcgagtcgtgcgaaaagacgctgtcgctgatgcctaccttcttcgaaatcgacttcagcttcaccaaggacagcgtcatggtgctcatgcacgacctgacgatcgaccgcacgaccacgggcaagggcctcgtcgccgactacacctacgacgaactgcgccgcctgaacctcgtggaccgcgacggcaaagtcacgccctacaggattccgcgcctgaaggatgtgctggagtggggcaaggacaaggtggtcttcaacttcgacaacaagtacatcaacaccaaaggcgtgagcgacgaggtgcgccgcgcgagtctcgactactatatcaggcagctccggcccggcggcgagtggtccatgtaccacaacatcatgctgagcgtccgctcgatcgaagaggcgctctactactggaaccaaggcatccgcaacgtcatgttctgcgtcgaaatcagttcgatggagcacttccgggcatacgaggcttcgcccattccgtggaaatacatcatggcctatatccgtctggcggtcaatcccgaactccaacaggtctacgatctgctgcacgccgagggcgtgatgacgatgacctcgatcaccggatcgtccgacaaggtgaagaatccccacgaccgccgcgtggcctacatgcgcgaactgctggccgaacccgacatcatcgagaccgactatccctccgaattcatcggcctgccgtggtcgcgcgacgcgatccacgccctgcaggacgccgccatacgcggcaacagaaccaccaccgacctgaagtaaaacccgaaccaacctgaataaatgtctgcaaaacaactcaatccggcatatgccggcatgaccgaccaacaggtcaaacgtttcaaatactgggaattccgcaccatggcgatgtgcatcttcggttacgcgctcttctatttcgtgcgcaagaacctgagtatcgccatgccgtatctcaacgaggagatgggcatttcgaaatccgacctcggcctcttcctcacgctccacggactgatctacggactctcgaagttcgtcaacggcatctggggcgaccgcagcaacgcacgctactttctggtcacgggactcgttttctgcggcatctgcaacctgctcttcggattcagctcctcggtgctggcgctgggcatcttctggattctcaacggctggttccaaggcatgggcgtcccgccctgcacgcggctgatgacccactggatcgtccccgaacggctggcgaccaagatgtcggtctggaacacctcgcactcgatcggcgccggactggccatcatcttctgcggctatgtcgtcagcctgaactggggcgcatggttcgacgcttcgtcgatgctctcgcagcactggcgctggtgcttcctgctcccggcgacgatcgccctgctgggcgcggccgtcgtctgggccttcgtccgcgacacgccctcgtcggtgggccttcccgaactcaagaccggcaaaacggccgaaaaaccgcagtccaaagcggaggagaaggccgaatacaaggccttcctgcgccgcaaggtcttcctgaatccgacgatctggatcatcgccgtgggcaatttcttcgtctacatcgtgcgcttcgccgtgctggactggggaccgacgatgctcaaggagcacctgcacatggacatcagccatgcgggctggaccgtcgcggcgttcgaaatcgccggtatcgcgggcatgctggccgcaggctgggccaccgaccgtttcttcggcggccgtgcgccccgcacgtgcgtcatctgcatgctgatggccgccgtgtgtctggtgggactctattcgctcaacgagcatacgccgctgatcgtggccgttgcgattctgatggccgccggattcttcatctacggcccgcaggcgctggtcggcatcgccgcggccaatatcgccaccaagcgcgccgccgctacggcaggcggtttctgcgggctgttcggctatggcagcacgatcgtttcgggctggggactcggcatgctggtgcagtacaccgactggagcatcgcgctctatacgctggtgggcatggcgctcgtcggcacggcgatcttcgccgccgcttggaaagccaaacccaacggctacgacgactgacacgaagttttaggttaatgataatgtgtgagcgaaatccccgcagccgcgtacggctgcggggatttccatgttcagctattttccggtgccgggctattccaccgtcacggacttggccagattgcgcggctggtccacgttgcggcccttgtttacggcgatatagtacgccagcagctgcagcggcaccgagacgacgaccggcatcagacagtcggttatcaccggaacttcgatcgtgtaatcggcgctgcggcgcacgtgcgtatcgtcgcgggcgatcacggcgatgatcttgccgccacgggcgcggatctcctcgatgttgctggccgtcttttcgtaggtattgtccggcgtggcgatggcgaccgtcggcatttcgttgtcgatgagcgcgatcgcgccgtgtttcatctcggcggcggggtagccctcggcatggatataggagatttccttcagtttgagcgcgccttccatcgccgtggggtagttgtagccgcggcccagatagatgaaattgtgggcataggtgaagatcttggagaggtcttcgatccgcgggccgagcttcagcacctcttccagtacggccggaagttccagcaggcccttcgccacctcacggtagtactcctccgtcacggtgcctttctcgcggcccacggccagcgccagcatcgccatcacggtcacctgccccgtaaatgccttggtcgaagccacgccgatctccggtcccacatggatataggcgcccgaatgggtggcgcgggcgatcgaggagccaacgacgttgcagatgccgaagacgaaagccccggccttgcgggccagttcgacggcagccagcgtgtcggccgtctcgcccgactgcgacacggcgatcacgatgtcgtcctcgtagatgaccggattgcggtagcggaactccgaagcgtactccacctcgaccggaatccggcagatattctcgatcaggtgctcgccgatcagcgccgcgtgccacgacgtaccgcacgccacgaagatgatgcggcgggcttggaggaatttcctgcggttgtcgatcacgccagacagcttcacctcgcccgtttcggggttgatgcggccgcggatgcagtccacgatggtcttgggctgttcgtaaatctccttgagcataaagtgcggatagccgcccttttcgagctgcgaaatgctcatctgcagcttcttgatgtcgatcctgccttcgtggttgtccagcgtgacgatcttcagcggcttgttgcggttgatgacggcgatctccccgtcgttcacatagacgaaatcctgcgtatactcgatgatcgacgcggcgtcggagctgagaaagtactcgccccggccgatgccgatggccatcgggctgctctggcgcgccgcgatgatctcgtcgcggttgttcttctcgaccacggcgatggcataggcgccgaccacctgacggagcgcctgctgcacggcttcgagcagcgaacaggcattggtcgagcggatatattcgatcaggttcaccagcacctccgaatcggtactgctgcggaacgtgtagccgttctcttcgagcgcatctttcagcacccggtaattttcgatgattccgttgtgtatcagggcgatattctccgactcggagcagtgaggatgggcattgacgtcgttcgggacgccgtgcgtcgcccagcgcgtgtgcgcgatgccgatatttccgcccagctccttccctgcgaggaaatgttcgaggtccgagaccttgcctttgcatttgtaaacgttgagcgcaccgtcctcatcgaccatcgccacacccgcgctgtcgtaaccgcggtattccaaccggtgcaaacctttcaacaggatcggacaggcttcgcgcccgccgacatatcctacaatcccacacataattctttcagcatttttatcccgtcaaaaataagaaaatattttaaaaacgatattcggacaccccgaaataagaaaaaaagcaccgatttcggtgcttaaatgacatatttcagaatctcccgcacgagcgtttcattgcccgcggcctgcgacactccgcggtcgggcctgaagtccgcaacgacgcccccggcctcccggacgatcagattcgcggcgcacacgtcccactcgtgcaggtccagctcccaatagccgtccagaagtcccgccgcgacgcagctcaggtcgtaggccgccgaccccagccgccgcacgtcccgcacataggggatgatacgcgcgacgttgtcgctgttgttgtccggattgacgtccttgtcgtacggaaatccggtggcgatgaccgacgtggcgagggtctgcttggcggagacgtgcagccgcttcacctcgtcggagcggctcttcatgtaagccccgccgcctttcgacgcccagaacagctcgttcaggtagggcgcgtagacaactccggcgatcgtctcgccccggtattgcagggcgatcgaaaccgagaaaacaggaagcccctgactatagttcgtcgtgccgtcgagcggatcgaccacccagcggtaatcgctcccggcacgccccatcgaaccgccctcctcgcccagtatctcatggtcgggccagcgttccagaatcgccgcggcgatgtaggcttcgctctccttgtcggcgcgcgtaacgacgtcgtagacattggatttcgtgcggatcgccagatcgtcgccccggaagtaggcgagctggatctttccggcgccttcggcgagcggaaagatgaaatcgagaaattcctgatacatggccgcgcgctacttctgctccgcgaaatacttgtagaacagcggaatggtctcgacgcccttgtagaactgttcgagtccgtagctctcgttgggcgagtggatcgcgtcttcggccagtccgaagccgatgagcagcgacttgatgcccagaatcgactcgaaaccgctgatgatcggaatcgagccgcccgaatagaagggcaggggtttcttgccgaaagtctccgccacggccttctccgccgccttgtaggccggcatgtcggtcggtgcgacgtagggcatgccgccgtgcagcgacttgaccgtgaccttcacgctcttgggagcgatcgatttgaaatatttttcgaacagcttgctgatcttgcggtaatcctgattcggcaccagccgcatcgaaatcttggccgacgccttcgacggaatcaccgtcttggtgccctcctcgatatagccgccccagatgccgttcacgtcgagcgacggacgcacgcccgtacgttcgagcgtcgtgtagcccgcttcgccctccacgtcgccgatcgagagcgacttcttgtaggccgcgaggctgaacggcgctttgttgaaggccttgcgctcggccggagtgagttcgcgcacgtcgtcgtagaagccgggaatcgtcacgcgcccctcagcatcgaccaactgcgccacaaggcgcgtcagcacgttggcagggttggcgaccgcaccgccgaacagccccgaatgcaggtccttgtcgggtcccgtcacctcgacctccatgtaagccaagccccgcaagccgcaggtgatggagggggtttgcatcgagatcatcgaagtgtccgataccaatataatatcggccttgagcatcttcttgttttgctcgcagaatttgtagagactcggcgagccgatctcctcctcgccctccagcatgaatttcacgttgcagggcaggcactcctcggcgcacatcgcctcgaacgccttggcgtgcatccacaactggcccttgtcgtcgtcggcgccgcggccccagatacggccgtcgcggatgaccggctcgaacggctcggtccgccactcgctgcgcggatcgacgggcatcacgtcgtaatgaccgtagaccaatacggtcttggccttgggatcgaccgtcttctcggcgtaaaccaccggattgccctcggtgggaaacacctcggcatggtcggcgcccgccttcacgagcgccgcggccagccattcggcgcaccgcgtcatgtcgggccggtgctcgctctgcgcgctgatcgaagggatgcgcaggaggtcgaacaactcgctgataaagcgatctttatttgcgtctatatatttctttactttatccatttttccggggtgttattcggtcttcttcaatacgtagttttcggccagcggacccgtcacgggctgcttgtcggcgtcgagccggcgcaggcggttctcctcgaccttgtagtactcgacctcctcgccgttttcgggagtcagggtcagcaggttgcccctcacggagtagccgcccttcgtatcgaattccgcgtcacggtcgatgtatttcatgtgcaggtcgaaagtgccgtcctttttcagcgtcagacgggtctcgatgcccggacaatcggccgccggaagcgttccggcataggttccctgatagtcgagcgaggtctcggccgtatgcatgtcgggcgcttcggcgacggtttcggcaccgccggaagcagcttttttctgtgtatttccgccgcaggccgcaagcagggcggccgccgcgaggatcaaaattccacttttcataatctataaattaaatgttgcatatcgcttttatctcgccgatgaaacgctgcgccagtgcatcggcttccgccatggatttcgcctcggtgtagacgcggatgatcggctcggtattggatttgcgcaggtgtacccaattttccgcgaagtcgattttaacgccgtctatatcgttcacgttttcaccggcataacgctcctttatctcacgcagtactttatccacgtcgatcgccggcgtcagctcgatcttgttcttcgaggcgaagtacgagggataggtggcgcgcagctgcgtcatggtcatccccttgtgggcgagccacgtcaaaaagagtgccgtcccgaccagcgcgtcgcggccgtagtgcagctccggatagatcactccgccgttgccttcgccgccgatcacggccccggtctccttcatcttggccaccacattcacctcgccgacggccgacgcggagtatttgccgccgtgccgctccgtgacgtcgcgcagcgcccgcgacgaagagaggttcgaaacggtgtcaccgcccggattcttcgacagaatatagtcggccacggcaaccagcgtgtactcctcgacgaacatcgagccgtcctcgctgaccagtgccagccggtccacgtcgggatcgacgacgatgcccagatcggctttctcgcggcggatcgtctccgcgattccggtcaggttttcgggcagcggttcggggttgtgggcgaattcgcccgtcgggtcgcagttcagctccacgacttcgcaccccagccgccgcagaagctccggcatcacgataccgcccacggaattcacggcgtccacgaccaccttgaagcggcgtttgcggaccgcctcggcgtccacgagcggaagcgccagcacctgctcgatatgcgtccggttgaacggttcgcgcgaaagcacatgcccgatgccgtccacgccggggtactcgaagccctcctcctcggccatcgccagcacgcgcttgccctcggcgtcggtgaggaattcgccgtcggagttgagcagcttcagggcgttccactgacgcgggttgtgcgacgcggtgatgatgatgccgccgtcggcccgcttggtgatgacggccatctcggtgcccggcgtggtgcaaagcccgacgttgatcacgtcggcgccgcaggccagcagggtgccctcgaccagatcggagaccatttcgcccgaaatacgggcgtcgcggcctacgactatggtaagttttttgccgggattccgctcggcgatcagacgtgcgtatgcggtggtgaatttcacgacgtcggggggcgtcaggttctcggcctgcgccccgcccaccgtgccgcggataccggaaatggatttgatgagtgtcatattttaaagaggtttatctatacatatatttatgaaaaattgtcttcgaagttttgatattcgaggtaaatatattacttttatgccaattatgaaaattaaaaaacgactatcatgagaacgattcctgcttccgaattgattatcaacgacgacggttcgattttccacctgcacctgctgccggagcagctcgccgacacggtgatcctcgtcggagaccccggccgcgtggccttggttgcggaatttttcgacgccagagagtgcgaagtctccaaccgcgaattcaagaccgtaacgggcacctacaagggaaaacgcatgacggtcctttcgacgggcatcggcatcggcaacatcgacatctcggtcacggagctggacgcgctggccaacgtcgatttcgccacccggcaggagaaggcgcagaaacggcagctgacgctggtgcgtctgggcacttcgggcgccatccagcccgacatcaaggtaggggagttcgtcttctcgcgcacgtcggtgggcttcgacggcctgctgaactactacaagggccgcaacgacgtctgcgacctcgccatcgaaaaggctttcatggagcacgtcggctggaacgaactgcttcccaagccctacttcatcgacgccgacaagacgctgttcgagcatttccgcgacgtgacgcgcgagggcatcaccatcgccgctccgggcttctatgcgccgcagggccgctgggtgcgcctcgaaccgcaggacgcgcggctcaacgagaagatcgaatcgttcgactaccacggacgccgcatcaccaacttcgaaatggagggttcggcgctggccggtctggcggccctgatgggccaccgcgccgccacgatctgcacgatcatcgcccagcgcatcgcccagaacgtcgatacggactacaaacccttcgtgcgcaagatgatctccacggcgctcgacaaactcgcagttttagaataacagaaaccataacagaaaataaagaaaggaaacaaacgtatgaaattttcagtatcaagctcggccctgctctcgcttctggctaccaccggcaaggttatcagcaataagaacacgcttcccatcttggattacttcctgatggagctgagtggcaacgaactgaaggtcacgacatcggacctcgaaacgacgctcatcggctccattacggtagacagcgtggagagtgagggaaccatcgccgcacccgccaaactgatgctcgactccctgaaggagttctccgaactgccgctgaccatcgacgtaaacgataagaactgggaaatcacgatcaactggaagagcggttcgctctcgattcccggcgcgagcgccgtgagctatcccgccgtaccgcagctgagcgccgagaagaaggagctgagcatggacgtggatacgctggtcaacggcatcaacaagacgatcttcgccacggccgacgacgaactgcgtcccgtgatgaacggcatctacatcaatctggcgcccggcgcgctgacgttcgtgggcaccgacgcgcacaagctcgtgaagtacgagtccgagaccgcgaacgaggtcacggcttcgttcatcctgcccaagaaaccggccaacctgctcaaatcggtgctgctgaaggaggacgacgccatcgagatgagcttcgactcgaaaaacgcgctcttcaagctcaagagccacacgctcgtctgccgtctgatcgagggcaactacccgaactacaacgccgtgattccggccaacaaccccaacaaggtgctggtggaccgcgtcgagctggtgaacggcatcaagcgcgtggcagtctgctcgaatccgaccaccaacctgatccgcatggacatcggcgacaaccggatcaacctcacggcgcaggacatcgacttctcggtgtcggccaacgagaccatttcgtgcagctacgacggcgaggagatcacgatcggcttcaaatcgacgttcctcgtcgagatactctcgaacatggacacgccgaccgtggtcatcgaactggccgactcgacccgtgccggcgtcttcaaacccgtatatgacgacaagcagacaagctcgacgctcatgctgctcatgccgatgatgatcaacgcataacggcccctcagatgaagttaaacctcaagcgcccgatcatcttcttcgacctcgaaacgaccggcgtggacaccgccaaggaccgcatcgtcgagatttcgatggccaagatcatgcccgacggcgaagagatcgtcaaaacccgcaagctcaatccggaaatgcacattccggaggaggctaccgccatccacggcattacggacgaggacgtcaaggattgcccgaccttcgcgcaggtcgccaaatcgctcgaacagtttatccgcggctgcgacttcggagggttcaattcgaaccgcttcgacctgccggtgctggtcgaggagttcctgcgcgcgggagtggacgtggacttcaagcgccgcaaattcatcgacgtgcagaacatcttccacaagaaggagcagcgcacgctggtggcggcctacaagttctactgcgacaaggatctggacgacgcacactcggccgaggccgacacgctggcgacctacgaggtgctcaaggcccagctggagcgttatcccgatctggagaacgacatcgacaagctggccgaattctcgacccgcgccgaaacggccgactacgccggacgcatcctcttcaacgaaaaaggtgaggaggtcttcggattcggtaaatacaagggccgcagcgtggaggaggtcttccgcatggaaccgagttattacgcatggatgatgaacggcgatttcccgctctacaccaagaaggtcatcaccgaaatccgcatgcgcgaaaaactgaaatgacgatgaagcgactttgtgcgacagtcttgctgctcctgttgagcgtatgcgccttcgcggtgcagaagtcgggaacgatcgtttacatcaacggctcgaaattctacatccatacggtgcagcccggcgaaacgctttacgggctgtccaaggcgtacgaggtgggcgagaaggtgattcttcagtacaatccgtcggcaggcggcgggctgaaagcgggggagaacgtcaagatacccttcgtgacggccgtgcccgaacccaagtcggagcggaagctgcgcaggaccttcgactcccacaccgtcgcgcagggcgaaaccctgtacgccatttcgcgcaagtacgaaatcccgatccagaccgtcatcgaggacaatccgagtctcgatccgaccaacctgcggctcggagagcgcatcctgatccgcaagaaggagatcggctccgaagacgaggccggcgccaaggagcagtgggaagcctaccgcaatacgctcaacagcgtcgccgaggagggctatgcctatcatatggtcaagccgggcgaaaccttctattcgctgtcacgccgcttcggcatcaccgaagagcagctcggctcgctcaacggagggctgaaacccgccgacctgaaagccggagcgatcatcaaggttccgggttctcccgaagagctggccgccggggagcggcagcctgccgacaccgtgcgcgcggactccgtacccgacctctccgccgacaacagggtgaaggagatcgaattccgcgcactgcgccgtagtgcgacgctcaatgtcgccctgctgctgccgatggacgccggcacccccaatcccagctatctggagttttatcagggattcctgctcggactggacagcgtgaagaccaaatacggctattcggtgaacgtctgtctgtataacacggcccgcgatgcggagaaaatccgcgaaatcaccgagagcgacgccttccgcaataccgacctgatcatcggtccggtctacgaggaggggctgtatccggtcatccggttcgccgaggagcacaacgtgcccgtcgtttcgccgctggccaacatcacgggcatgaacagcgacgtgctgttccagatggcgcccgacccggcgcacaaatgggagaaggccgccgaactggtgaacggggaccggcaggtaacgctgatctacaccgaaagtacggacaaggagttcgagcaggagatgctgacgctgctcggcgattcggactataagaagcacacctataaatatgtccatccgtcggcccgcacgaacagcagttcgggcgatctgacgccgctgctggacaacggcgccgacaacgtattcatcgtcatgtccgacaacgaggtggacgtggaccgcattctggcggccatcgcttcggccgacaccaacatatcgagccgcggccgcacggccccccggttcgtcgtgctgggcaatacgcgctggaaccgcatgaacaacatcgaccgcacgatgttcttcaaggaccgcgtgatcttcatctcgacctaccacgccaagcgcgactcgcagacgattctcgacttcgacagcgcctatatccgctccttcgggtcgctgcccacgctcttctcgtaccgcggctacgatgcggcggcggtcttctgccccgcgatgtacaacgacatcgaatacgacatggaaggccggagctacacgccccttcagacctcctacctattcgggcagggcgaggagcgccacaaccacgtcaaccgcagctggatgagagtcaactacaacagcgatttcacgataaccgtcgaatagtaagaccatggcatctttgacaaacgcaatacccgaaaaaaccatcgagcgcctgagcgaataccgccgcacgctgctggccagccacaagcaggggatcacgcatatcttctcgcacgtgctggcgggcatccacggcatcacggccgtgcaggtccggcgcgacctgatgctgatcggcttttcgagcgacacgaagaaagggtacgacgtgcaggtgctcatcgaatacatcagccgaatcctcgacagcccctcgcagatgaatatcgccgtgctgggcatgggacacctcggacaggccatcaccaaatatttcaacggcaagggactcaagctgaaaatcaccgccgcgttcgacgtcgatcccggcaaggtcggcaagaccatcgacggcattccgtgctatcacatggatacgttcgaagaggtcgtcgaggacaaggacatcagcatcgtgatcgtctcctcgccgacgcaggtggcgccgagtctggtcgttccgatcatcaacgccggaatccgtggcgtgctgaacttcacctccacgccgctgaacttcccgcaggggatcgtagtcgagaattacgacatcaccacgctgctcgaaaaagtagcctacttcgtcaaggagaacgaagagaaaaacagcagcaacacctaaacaaagagcggcaggagagagagcaatgagggtttttcacggtttcgaagcgcttccgcatttcacgcatccggcggtgaccgtcggatcgtacgacggcgtgcacagcggccatctgaaactgctgcgcaccgtaaccgccgcggcccgcgggcagggcggcgaaagcatcgtcttcaccttcgagccgcatccccgcatcacgctcggcaaggccgacggcctgcgcctgctgacgacgctcgacgagaaaatctgcctcctcgaacggctggggatcgacaatctggtcatcatccccttcgacagagccttcagccggctggctcccgacgaattcgtccgcgactgtctcgtaggccatacgggagccgaaacgctcgtcgtaggcttcaaccaccgcttcggacacgacaaacagggcagttacgactatctggacagccacggcttcggcctgcgcataatagaggtctccgaatgcgacgtggacgccgaaaaagtcagttcgacggtgatccggcaattggtcggcgagggaaagatggcgcgcgccgcacgtctgctggcgcatccctatctggtaatcggccgggcgcagcgcaaccgcatccgggtggaggacccgctgaaactcctgccccctccgggcgaatacgatgcgcatatcaacggcaagccggcccggctcacggtcgatgccgctcaggaactgataacccgcgacatactgcccgaagggcgtgtcgtcataacattttaaaccatgctgagttacgactgtcaaataagggtttggtacaagcataccgaccagatggcgatctgccaccactcgaactatatctgctattacgaagccgcgcgcagcgaactgctccgctggctgggcatgtccttcgccgaggtcgagaagcggggtatcatgatgcccattctggaggtgcagtccaagtaccaccgcccggcctattacgacgaactgctcaccgtgcgcatcatgctgaaagagcttcccacggcccgcatcaacttcttctacgaaatctacaacgaaaagggcgacctgctcaatacgggcatgacgcagctgggcttcatccacagcgatacgcgccgcccatgccgcgtccccgactggttcctgcagctggtcaccgacaagtggacggaggagtagaagcggcagcgacacctccgatgattcccgctacggcaaggctccggagcgacgcaatggcggagactccaacggaacgatactgaaaaacaccgcatacgaaagaaccgcacccatcaggatgcggttcttttttccggaacgcgactccggctatttttcgatcagcgaaatcgaacgctggatgaaatccgtcaggttcttgcccttgagcatgccgttggtcagcagcgcaaggtcgatgatctgcttgacgagccggttttcgccgccgatctcgcgcagccgctcgttgcgctcgtcgcgcagcgtgacgatcttcttcgacagctcctcgcgcgtcgatttctcttcgggagtcagctcctcttccttcttgcccttcaccacctcgtcgaagcggttctcctcggctaccgccgcgtcgatcttcttggtgatcgacttcagcttgtcgccgtaggccttctccgcgtcggagaggatgtctgcgacgatggggtggttgccgttaaccgcaatggtgaagttgtcgggcatctgtccgtagaactggctcatgccgcctccgccgcccatcgcggccatctccttcatacggcgcatgaattcgttctgtgtgatgaccacaggcgcttcgtcgggcgacatggcctcgaacgaaatgttgtaatggatcttgtcgtccttgggcatctggctctcgaataccgggcgcagcagctcctgctgggcttcggtgagcgacatcttgatattctcctccttctggatcagcttgtcgatcacgtcgctgtccacacgcacgaagcgcgtctccttgttcttcgactcgtaccagttgatatagtggttgtccagctgaccgtccatcagcagcacgtcgtaccccttggccttggccgcttcgaggaacgtgtgcttctccacgggatcgtccacatagaggaagacgaccgtcttgttcttgtcggtctggttctccttcaccttctccagatactccgcaggcgtgaaatacttgccctcgatattcttccagagcatgaactcctgcgccttctcggagaatttctcgtcggtcaggatgccgtattcgatgaatatcttcagatcgtcccacttcgcctcgtagtccgcgcgcatggtgttgaacagctcctgcagacggtcggcgaccttgcgggtgatgtagctcgaaatcttcttcacgttggagtcgctctgcaggtagctccgcgacacgttgagcggaatgtcgggcgagtcgatcacgccgtgcagcagcgtcaggtattccggcacgatgccctcgacctgatccgtcacgtacacctgattcgaatagagctgaatcttgttcttctgtatctcgaagttgttgtggatcttcgggaaatagaggatgcccgtcaggtggaacggatagtcgatattcaggtggatcgagaacagcggctcgtcgctcagcgggtatagctcatgatagaactccttgtactgctcctcggtgatgtcggcgggtttgcgcgtccaaagcggatcgacgttgttgatgatgttgtccttgtcggtatcgacgtacttgccgtccttccactccttgaccttgccgaaagcgatgggcacgggcaggaaccggcagtatttgcgcagcagctcctcgaccttcgaactttcggcgtactccagcgaatcctccgaaagatgcaggacgatcgtcgtgccgcggtcatgctccgcatcggtctcctccatttcgaattcgggcgtgccggtgcagctccaatgcacggtcttggcctctttcttataggatttggtgaagatctcgaccttgtcggccaccatgaacgacgagtagaagcccagtccgaaatgaccgatgatcgactggttcttgtacttctccataaactcctcggcaccagagaaggcgatctggttgatatacttgtccacctcttcggcggtcatgcccacaccgcggtcggtcacggtcagcgttttggcctccttgtccacggcgacgtgaatcgtcaggtcgcccagctcgcccttcatttcgccgatcgacgaaagcgtcttcagtttctgggtagcatcgaccgcattggaaatcagctcgcgcaggaaaatttcatggtccgaatagaggaactttttaatcacggggaagatattctccgtcgtaaccccgattttgccgtttttcatagttttatatttagctgtattttgattcatttcatccgaccatccatcaacaaaccgtgtgccaccgcccgttttctgccaaactgtcagtcgggcatgacaaaggccgccgtaaaaagttgccgcggcgggaattttgccgtatatttgtccgacttcaaacagttaccactatggattttctctctctggcaaaaaagcggtacgcatgccgcaaatatgccccggcaaaagtcgagcaggaaaagctcgacatcattctggaggcgggccgcgtggctcctacgggcgccaaccgccagccccagcggctcatcgtcgtacgctcgcaggaggggatggagcgtctggcacgctgcacccgcgacttcggcgctccctgcgccgtcatcgtctgcgccgacaccggcgaagcatggacccgcaaatacgacggtaaaacgatcggcgacatcgacgcttcgatcgtcaccgaccacatgatgctggccgcaacgtcgctggggcttgacacgctctggatctgcatgttcaaacccgaagccgtccgcgaagagttccggctcccggaacatatggaacccgtcaatatcctgctcatcggctacggcatcggcactcccgccgaccccgaccgtcacgacctgctgcgcaaaccgctcgcggaaacggtcgtatacgaaaccttctgaccggggcggaaacccaaaattccccggcagcaaaggcggcggtttttgcgaacctccgcatccgtgcacaccggaagattccggctacaaccgacagcaaaaaataagcgaaggcctcacgggccttcgcttatttcgtatctgcgccggtcatgcgcgttatttgctgcgcacgcagcgcaccatcatggccgtagcaggtacgaccccgcctgcggaaaccgacggattgttcgttgtgctggccgtagaccatgccagatagcaatactgtcccggcttggtcgcgctctcatcggccgtccatactgagatgatattcggcagcatggtcttcgtaccgtccttgtacaactgtccggaaggcaccatgtagatattctgcatgccgtcgctgcacattctgaacgcataaggctcgaattctttcgccccgtcggcgacaagttccagaagctgctccgaagtgggcatacgccacgtcccggcaggcgccacgagcgaacacgggtctacatcgccgtaggggacgtccgcatagttcggaatcgactgttcgtcgggtccgtaaaccacaccctgatatttcgtcgaactcgaaaccgtgccttcgaacttgatgccgtacttgctcttccacttgaagtacataccgcgctccttaggttccgcaaaggtataggccccgtcgacgacagtcaggtagccttcgctccaagtcaccgagaaggcgtccgtcgcggggttggcctcctgccggacgctctttccggtgtcggagccgttgacccagatggcgagcgtgcgctcctcgcccgcattttcgggaaccgagaacgaaacggtcggattctccttcgatccgttctgcgtcagctccagcccgtcgctgcctttgatgaccacggggaacgacgcaaggtcgctctcgcactttacgctcagcgtaaacgcttcgtaggtggctttcgacggagagtgggatatgtaatccacatagtttttctttcccggctgtacgaacgagatacccgaataaacccggttgatgaacagccgccattcgcggtttccgacttcgtcgttcttgggcacggtcagcgtaacctccgtctcggacgacgatgcgtcgatggaccgaatctccccgtcctcggcttcgatatcgacctcgtaagccgggaattcacccggatcggtcttgacggtaagcttgaacgaagcattgtccgtcaccgaagccggcgtatgcgacacataagaaggctggcggatattcttcacgcagcggagcgaagccatgttcgtgcccgcaagatcgtaatccaccatcgaatagtcggcgttgagtacataaatcacaccttcacccgcataattggcgcccagtccccaatatccgccgaactgagactttccgctgatctgccccgaagcaagttccagcgcgccgcagaaaggcatgaaatagtccgagctgagataccccatgccggtaatgccgtccaatacatgctggttcatgtagtcttcccggtcgtaaagacagaaaagctccatataagtcggcgtacgcagcccggcatcgatcatcgcacacggatcggtattcggctggcggtaggggatgtcggccagcgccacctgcacggcttcgggcgtataggccgttccggcgtacgaaccgccgtccgacggcacgccgtatttgctgccctgacggaaatagagtccgaggtcggacatcttgtcggcaacggcgaatttaccgtccataagcgtaacgttgcccttcgcccaatagaaaccggccgtcagtacgagcgcggcctcctgccgggcttcgacgatcttcgtccattggggttccgcacccgcatcggccatctccacaacgatattgcgttcgttctcggtatagttgcccgcgatttcgacgtcgatgctctcggtccgctccgtcaccgccaccggatcgccgaccttgtcgccgagcgtcacgcggtactgccattcgacgaaaatcggatcggccgcgcgggtctcgatgctcgtggtgaaaccgagcttgtaaccgccgccgttgtaaggaaccgtttccggaatggtcgtggagtcgtattcggttacacaatagtcttttaaggcaggctcctgttcagcctcgacgatccgaatccaccgggggggggtagcggcatcctctgttacagccatttccacgacgaccgcccgcggttccttgctgtagttggaaccgatgacgaccgatacttccgttttgggttcggtcacggctatcgcatcgccgacagcctcaccgagcgtcacacggtactgccacggttcgaatacgggaacgaccggctgggagcgagtttcggtgcgggtcgtaaaagtcatcgtgtaggcaccgccttcggcaggtatcgtctcaggaatggtcgtcgatgcgaattcggtcaccgtatactccgtttttttcgtcggttccgtattgtcgtccgaacaggccgacaatacgacacacaacatgcctaacggaaggcacaagcatttgagtaaatttttcttcatagtacaaattaaaaaatgagtggacggctaaagtagtgattttattcctcgcaaacaaacccggacgaacaaaaaagtataatacgcacaaaatgagagatcggctaaatccttgtaaatattgatatttattacgatttatcgctgccaagccgaatcatgcttacatgttttccgcacatcagatcaaaataatacaaatccgcagcaaaacacgccccgttgcaagccgaaaaccaaaatacaaaaaataccgctcatcttgaacgtccatgacacttttttgtaactttacaaggcaggaaggtccaccggaaactgcgccggatgcgcgacgagcgaaagacaacggaaaaagcaaatacggaactacaaatcaaagcaatatgaagactaaaaaatcaggaatattaattttattcctttgcatattctgcgtcgacggctgcgacaatgacgataaaaaaggacgagaagtaaccgattacaaagaatatattcttaccgttgcatccagaaaagttccgggagtattgacttccgacggacacaattatctgacagacgtatatgccgtaaaaaaagagctgtccgatgaatggattcccttcggcaatatcgaaggatttgactttgaagaaaaatacgagtgcaaaataaaaatcagcgaaacgagctacttggattacggcatgggagaacccgcatggacggaatatgaacggcttgaagtaatatccaaagagaaaaaggattcggaggagatgccgttgcactttattcccaaatggtattatgaaaaccatccccttcctcaatacagatatgcaatagaatctgaaaacaaagagcttatcgaagaagttttgaaagccaatcccatccttcccttggattatcattatttgctttatcgggatgaggataatcacccgaaagggattgcgataaaagacgacgacgatttattcggtcccagcattataaaaagcacaaatagaaatccagaagaaatgccggagtcctacaagctgcttcctcccgaagaacaggtgcaaggtttcatggaatggacattttcagatgaatcgggaaatgcaaccgattacccgtcattcgatgtgtttgtcgcccattcttctcgatcgaggagcgttggtcccgcacccgaccttgtctgtctctataaagaccttacagaacattacaaaaaccagtaccccgatgccggagtaaaaacggttgtcgtttctttcacaatagacatataacaaaataaaggcaacgccctaaaacatgtcaatccgctgaaactctgaaaccggaaccggcacgcggcacggacatccctcaaaatcacctatagcgcaaaaagacagcgggccgaaattcggcccgctgtctgcgttgaaaaatccgtacggattccccgtttcgtaaaggcaggtcacttggcatacagccggaacttcatgcgccagctttcgcccggagcgatcgcctgaaaaccttcggccgcagggtccgcggcgttcggggcgttcgtcgtccacgactgcggttcgggacagcagtagggcacccggccgccgttgttccagatcgtccaataggtcgtctgccgatcgacctcgtagaaggtacggacgcccgtgcggagattctcgaccagcgcaccccggaaaggcttgccgtccacctcgatttcgcgcagcgtgaagcccgcttcgatcggctcgcagtccgttacccgcaatccgccttcgcgcagtctggcgaactgttccgacaacggcaacttacgccctgtcgggatattacgcccgctcagctcaacttgttctccaactgcgacgcgcatcacataatccgccgcctcaccgcccgcaaagggaatctgcatcggcgtatgaaacccgacgcccacgggcatcggctccgcactgcggttggcgaacatcacctcctgctccagcccttgggccgtaaggcggaaagtgatcttgcatttgaactcgtgcggaaagtcgcggaaaatcgcgtcgtttccggcgttcgaatagtagcggcactccaccagcacctcctccccggtctcccaagccttcgacacggcgaaaggctggctcttgaggatgccgtggtggtaatggtgctctttggcattcgtgatgggaaagcggtaagtccggccgccgaacgtatagcgcccgtcctcgatccggttgggcggaaacaggatcggcagtccgaagacatgcggccgtcccttgaacgtttcgacctcgtcgtcggccggcgcccgcagaatctcggcgcccagccgcgtattggtcagccggatgaggttagcgcccatgcccggaatcagcagggccgtatagtcgcctttcgagaactcgacggcccgcatcccatgccagtcggtgctgcggagcattttagagcagtttttcgatcttctccgcgagtgcggccttcgacgcggcgcctacctgcttgtcgaccagttcgccgcccttgaggaagacgatggtcgggatgttgcgcacgccgtatttcatcgtgatttcgtcattctcctccacgtcgcatttgccgatcagcacgcggccctcgtattcggcggcgagttcgtccacgatgggagcgatcgtgcggcacggaccgcaccactcggcccagaagtcgatgacgacggggagttccgatgaaattacttcctgaaaattctctttcgtgattgctaaagccataattattaagttttaaaatgttattatgcgatggaatactttatctcgttatcgtccagatacgaaaccagcgactgcgtcagactcaccttgtggctcttcgagaagagactgagcgaaacatgcgcttcgcggtcgatcacgctgatgcggaaaagggtctcgccctttgcctccttcaccttctccgtcaattcgcgtaccagcgtcggggttacgtcctcgacgggcagcagcacgttcatctccttgatcatcgtgtcgcgcatctccgagagctgcaccatcgagatgatcttgaactccagctccttgtcgttatagggcttgggctggacccgtccccggacgaagaggaaataatccgagaagaggtacttgcggaaattctcgtaatccttgctgaacagcgcgaattcatgcgtgccgttgtaatcctccagcacgaatttgccccacggcttgccggtcttggtgatgaggttctgcacgctgacgaccatacccgcgacggcgatctcctgccccttgagcgcttcgaggttttccagctccgtaagctgggtcttgcacatgtggttgatgatgatcttgtagtcgtcgagcgggtgcgccgagaggtagagaccgatcatctcgcgctccttggccagcgtttcgagctggctccagtcggcgcatgcgggcagcacggggcgctggatgtcaacgtgtccgccgccgccgaagaggctctgctgggcgttgttcttctcggcctgaaaacgctggccgtaacgcatcagctgctcgatgaaggtcacgcccgtattgtcgcgcgcgtccgcaccgaagaacttgccgcggtggaagcccgatatcgagtcgaaacctccggcataggccagattctcgaaacacttgcggtttacggccgagaagttcacgcgctccatcaggtcgtatatgtccttgaaacggccgttggcgttgcgctccgcgatgatgctctccacggcggcttcgccgacacccttcacggcccccagaccgaagcgcacgtcgcccgccttgttggacgagaaggtgcgcatcgattcgttgatgtccggaccgagcacacggattcccatgcgcttgcactcgttcatgtagagcgtgagctgcttgatgtccgcgaggtttcggctcagcagggccgccatgaactccgaagggtagtgggccttcaggtagccggtctggtaagcgacataggcatagcaggtcgagtgcgacttgttgaaggcataggaggcgaacgcctcccagtcgccccagatcttgtcgcagatcttctcgtcgtgtccgcgctgcttacagccctcgatgaacttgggcttcatcttgtccagcacgtcgcgcttcttcttacccatggccttgcgcagcgtgtcggcctcgccgcccgtgaagccggcgagtttctgcgacagtagcatgacctgctcctgatagaccgtgatgccgtaggtgtcgttcaggtactcctccatgtcggcgatctcgtaggtcaccggctcctgcccgtgcttgcgggcgatgaagttgggaatgtactccatcgggccgggccggtagagggcgttcatggcgatcaggtcctcgaagcggttcggcttcaggttgcgcaggtgctttttcatgccgggggactcgaactggaacaggccggtcgtgtcgccgcgggcgaaaacctcgtaggtcggcgcatcgtcgagcgaaatgccgtctatgtccacatcgacgccgtgcaccgccttgacgttctccacggcgtccttgatgatcgacagcgtgcgcagtcccagaaagtccatcttgatcaggccgacgctttcgacctccttgccctcgaactccaccacgttcagctcggcatccttggcaatggccatcggcgcgaacttttcgaggtcgtcctgaccgatgatcacgccgcaggcatgcacgcccgtctggcggatcgagccttccagcttctcggcgtatttgagcgtattgcggatcagctggttgggcgactcgcgctcggcggccagctccggagactccttgtagacgaaatcgaacggcgtctcgccgtgtttcttgtcgggcgtgaccttgtcgggcaccagcttcgaaaggcggtcgctctccgagagggccagcttctgcacgcgggcgacgtccttgatggccatcttgggggccatcgtgccgaacgtcacgatctgggccacgcgcttctgaccgtacttctgcacgcagtagcgcagcacgtcggcgcggccgtcctcgtcgaagtccacatcgacatcggggagggagatgcgttcgggattgaggaaacgctcgaacagcaggtcgtatttcagcgggtcgatattggtgatcttcagacagtaggcgaccaccgaaccggcggccgagccacggccgggtcccaccgacacgcccatttcgcgtgcggcgcggatatagtcccacacgatcaggaagtagcccggaaatcccatccactcgatcgtgctcagctcgtatttgatgcgctcctcggtcttttcgtccagcacgtcgccgtaacgcatgtgcgcgcccttgtaggtcaggtccttgaggtagcagtactgtttggcgaccatcagccggtccgaaagctccttgtcgccggcaaccagctcctccagctccggaacggtggcgcaggcgccgatcttcgccagcatctcctcgtcctcaatcttcttgacgaacgactcgcgcagttcgccgagggcgatcgggaaatcctccggcggcgggaagttgggcatcagcggggcgtgcgtcagcttgtaatcctcgcacttgtcggcgatttcgagcgtcgtggccagcgcttcgggatggtccgggaagagcgccgccatctcttcgggcgacttgagatactcctgaaacgtatagcgcatacggttcggatcgtccagatcgcggcccgtattgagacagatcagatggtcgtgcgccacggcatcctcggcgaggatgaagtgcacgtcgttcgaacagatatacttgacgccgtatttggccgccagctccagaatcaccttattgacgcgcagctggttttcgtagacgtccgcgtccttctgcggatcgcccgaagggtgcagctgcagttcgaggtaatagtcttcgccgaagatgttcttgaaccactggaccacgcgctcggcctcctcgatgtcgttgtgcatgatggcctgcggcacttcgccgcccaagcacgccgagcagcagatcagcccctcgtggtactgttcgatcagctgcttgtcgatacgcggcttgtaatagaatccctcggtaaacgagtaggagaccatcttgcagaggttgtgatagccttcgaggttcttggccagcaggatcaggtggtcgccggccttctcgtccttgtccttctcgaaacggtttttcaccacgtagacctcgcagcccagaatcggcttgaccccggcgtccgtggcggtgtcgtgaaagttcttgacgccgtacatgttgccgtggtcggtaatggcgatagcgttcatgccgagggccttggcccgcttgatgagcggcttgatggcggcggcgccgtcgaggatcgaatactgggtatgtacgtgcagatggacgaaatcgggcatggttctaactcctgtttttatggcagaacaaagatagggatatttccgcagatttcgtggcagggctattgcattttatcaacaaaatgcttaactttaaatatccaaccaataccgagaaattatgcaagacgaaaccatggttgtattagcggaatacaacaccgtcaccgaagccgagatagccaaatcgatgctcgacagcgcaggcatctggtcgatgatccgcaacgaatatatgtcggccatttatcccataggcaccatgcccgcacaggtcgtcgtccgcgaggaggacgccgagaaagccaaagcgatgctgcggcacagatagaacggcaagagcttccggaggttccggaagctcttgttttatcgccggggcggtcggcccgccaacgggacggccctcgcgcttccgccggccggattcgtctccgcccggcgttccgggagcgtcattcggccatccccagaaaattgaccccgtattcataggcggtccgctggggcactccgcgcaccttgcggggcgtccatttgcccttgctgctcctgatgacgcggatcatctcgcgcgacagcttctcgtcgggcgacttgattacctcgccgatggtgattttcccgtcgggttcgatgtagaagcgcacgcgcacgacgccttcgcccttcgcgccgcggccggtgaatcttccgtcgtaacgcaggcgcagcgaagcccattcgtgaaacgtcttgtcggggtcgccgcccagaaagagcagcggatcggcgtcctgcttcttggcgatcttctccaccggcagacgcatcgtcagccgccagctgtaggtcgtcggcttcccgtccttcatcgccggagtccacttttcgagccgccccagcgcctcggtcatcgcctcgcgcgtgcagggcgtcgccggctccacgccgaccgaatccttccctgcgcatgtccggtccagaaaccgccactgcgtcacatttcccgtctcatcgaccgtaaagccgacgacgacctgcgacgaaagctcggcggcgggaatctgcgccgcatcgacgatcttctcggtctcgccgataagacgcgccataaaacgcttcgcatccgacccctgaaagcggggcggcacggtctcctgagccgcggcgccgcaccacacggcgagcgcagacaaacagatagccattcgcttcatactgctgttgtttttcaaggtcattcgttccaaatccgccacgaggcctcggcctgttcgcgcagcatcgtttcgccgttgagaatatgcgccccgcgctgacgtccgtagtcgaggaactgcgtcaggggcgggttgtataccagatccaacagatagtgtccgggcgtcacgaagccgtagggaatccgcggcgcggcatcgacggcggggtaggtccccacgggcgaagcgttgacgatcagacggctccgctccacgacttcgcacggcagatcgtcgtaggtatagttgcccttcgccgtgtcgcgcgacaccagatcgaacgggattccgcgctcggccaacacatactgcacggcctgcgaagcgccgcccgtccccagcaccagcgcatgttcgggctgttccccgcccagcagttcgtcgagcgaggcgcgcagtccgaccacatccgtattatggcccgtcagcgagccgtcggccgcacggcgcacgcagttcacggccccgatcatccgggcgtcgtgggaaagggcgtcgagcagcggcatcacctcgcgtttgtaaggtatcgtgacgttgaatccgcacaagtcgggcgtacgggccagcaacccctccagcgcgccgatgtccggcagttcatacagcgcataggcgcagtccgcaatcccttcccgctcgaatttggcggcgaaataggcggccgaagccgagtgccccagcgggcgtccgatcagtccgtaacgacgcatggcctactcctcccgctttttcacgacgatacgcgccgccagctcgatgcagtagatcgtgagaaaccccacgacgcagagcacgacggcctcgcgcagcagggcgtcctgctgcgcaagggcttcgaaacgccccggcgcgacgttgcgctcgacgagcggcatgatcttgccgtggctgtcagtataggtctcgacgacctccttccacggccacaccttgttgagcgaaccgaccatgaaccccatgagcaccgcgaccgtcacgtcgtgccagtgcttcagcagccacgagagcaggtgcgaaaagctgatgatgcccgccgcggcgcccacgacgaaaatcacgatgacgggaacgttcaggtcgcccacggcctgcatgatgaactggtacttgcccagcagcagcaggatgaaggcgcccgaaatgccgggcagaatcatcgcgcagatggcgatcgcgcccgaaagcaggataaaccaccacgtatcgggcgtctcggcgggcgtggcgacggtgatccaccacgccgcggcagcgccgatcagacatgccgcgacggtctgcacccgccagcgtccgatctgcttggccaccagcagcgccgaagcgacgatcagaccgaagaaaaacgaccagatggcgatcggatggttcgtgagcaggtaggtcatcagccgggccagcgagaaaatcgcaatggcgatgcccagcagcacgggcagcaggaagcggccgttgatatgccgccagaattctttcagccgcagcgtgccgagcagccgcagggcggtggcgtcgacgcttttgatcgattcgatcaattcttcgtagatgcccgaaatgaaggcgatcgtgccgcccgaaactccgggaacgacgtcggccatgcccatggcgcagcccttgagcgtaagtaacagatattgggaaaacttcataatcctgattttagccacaaatataataaaattgcgggaatcgcacacactccgccaacagacgctccgcacgaagagagcgtgcgacaggtttccggcatcgaaaacacccccgccagagccaaactccgacaggggtggaatcgttgaaaccggacatgcccgacagccttatttccggccgggaaggctatacgccgaccttctcgcgctcccggcgctcgaagaattcgggtttgctgcgccggataaaagcgacgacctcgctcagtccgtccgcaaatttctcgaaatcctccttatacaggaaaatcttgtgccggtcgtacgaaaaaccgccgtcggggttggtcaccttgcggctctcggttatcgtcaggaaatagtcgccgccgcgcgtgccccgcacatcgaaaaagtaggtgcgccggccggctttcacggccttggtcagaatctggtctccatattcctccgcgtcgcggcgaggcgttgtctggggtgtcatggcgtggtagttttgggattgcactaagattaattcatataacgaatataagcaatttaatcctaaaatccaaaactttccgccttaattttcaggcatcagcagcggggcgccctcatgttcccagccgccgagaatctccaccgcacgccgataggcgccgttctgcgccgggttcatcacccggtagaaagcccccgtatcgaacagccgctgcgccacgagcgccttcagctggacgcgcatcagcggctccgatgccgcaaaacccgcctcgtcgaactccacgccgcgctccgcccccagcgccgtcaggcccgtgagcatctcctccccgacaccgaatccggcgtcgaaagcggcgaaatcggggtaggtgcgccccagcctgccgcgctcgcggtccatgtacgagatgacgtattcattgaccacgccgcggcggatcagattggcgtagtagaccgagaatcccgcagtatcggcttcgaccatgacgtcgggacggatgccgccgcccccgtagaccgtgcggcccgtgcgcagggtccggtactccggcgccccggcgtcgagcgaatcgcgcaccgcatcgtcgtagcggcgcaggtggtcgaggtagtattcgcggcgtttgcccttctcgtagggacgctggatcacacgccccgaaggggtgtggtagcgggccacggtgatacgcacggccgagccgtcgccgagtccgatctgacgctgcaccagccccttgccgaagctcggacggcccacgaccacgccgcggtcccaatcctgcacggcccctgcgacgatctcgctggccgatgcagaattctcgtcgatcagcaccgccagaggcccgtcgggcgcctcgccgtcgtgcggattgcgcagcgacatcggcggcacggcgcgtccttcggtcgagacgaccagcgcgccccgcggcaggaagaacccggccatttcgaccgcctgctccagcaatccgccgccgttgccccgcaggtcgagaatcaggctttcgggccggcccagcttgtcgaacgcctcgcggaactccgacatcgtcgtgcgtccgaaacgattgaccttgatatagcccacgccgtcggcggccatgtaggccgcatcgaccgtgttgagcggaatcttgtcgcggacgatcacgaaatgcagcggcgccggctccccgtggcgcacgacgtcgatttcgacccgcgtgccggtcttgccgcgcaggtgcttcggcacgtcggtctgcttgaagcccacggcgtcgagcgtgtcgatgcgcacgatgcggtcgttgggcatgacgcccacgcgctcggcaggcccgccgacaatcgtattgaccacgatcaccgtatcccgcagaacattgaattcgatgccgatgccgctgaactcaccgtcgaaactctcctgcacgcccttcatatcctccgcgccgatataggccgaatgggggtccagctcttcgagcatcccctcaatggcgctttcgaccagcggccccatctccacctcgtcgacatacagcccgtcgaggtagcggtaaacctgcatcagtttccgcaactgctgtgcggccccggtctcctgcgccgcgaggggcagggcgaaaagggcggtgaagaaaagtaagacgatacgcatagcgatagaattttaagattcgacaatttaaaaaaccggccgtactgctccggacaagccggtgccgcagcacgaccgggatatcggttttcggggtgcgcctaacgccgggactccaaatccgctgccagagcggcgaaaggcacctgacgctgctcgcccgaacgcatgtccttgaccgtcgcggcctgcgcctccagctcctgcgaaccgatgatgaccacgtaggggatgctccggcggttggcgtactccatctgtttcttcatcttgccgcactcagggtagatttcggcggcgacgcccgcatcgcgcagcgagcggagcagctgcagcgacgcggcctcctcctcggcgccgaggttggtgaagaacacccgcgtcgtgaagctgacctcttcggggaaaaggttcagccccgtcatcacgtcgtatatgcggtccgcgccgaacgaaatgcccacgcccgacatgttgggcatgccgaaaatgccggtcaggtcgtcgtaacggccgccgccgcagatcgaaccgatggcgaaatcgagcgccttgacttcgaagatcgccccggtgtagtaattcagtccgcgcgccagcgaaagatccagctccaccgtcaggccgatgcccgaccgctgcacgtagccgaacacggtctccatctcctcgatgcctttcaggcccgtctccgagaccgccagcacctcgcgcagtttcgtgagcttctgcgaattgtcgccgctcagctcaagtatcggttgcagtttgtcgaccgcctcctgcccaagtccgcgctccagcagttcggccttcacgttgtccagcccgatcttctccagcttgtcgatggcgacggtaatgtccatcatcttgtcggcgtggccgatcgcctcggcgatgccgaaaagaatcttgcggttgttcatcttgagcgccacgcggatgcccagcgcacggaacacccgctcgacgatttcgatcagctcgacctcgcacagcagcgaccgggtgccgataacgtccacgtcgcactggtagaattcgcggtaacggcccttctgcggccggtcggcacgccatacgggctgcacctgataacgcttgaacgggaacgtcagctcgccctgatgctgcacgacgtaacgcgcgaaaggcaccgtaaggtcgtagcgcaggcccttttcgcagattctggacgcctgacgcacctcgtcgtccgacagccccgcggcgtaatcgcccgaattgaggatcttgaaaagcagtttgtcgccctcctcgccgtatttgcccagcagcgtcgaaaggttctccatcgagggcgtttcgagcggcgcgaagccgtaggtgcggaacacccccttgacggtgtcgaaaatatactggcggcgcatcatctccgcgggggagaagtcgcgcgtgcccttgggtatggacggtttttgtattcccattttatttcgtgtttatcaatctttgtgcggactactcttcgatcagtttgcggtatttcacgcggtggggcgtcgtatcgcctccctgcgccttcttccactcctcgtactcgctgtacgatccctcgtagaagaccaccttcgagtcgccctcgaaggagaggatgtgcgtagcgatacggtcgaggaaccagcggtcgtgggagatcaccacggcgcagcccgcgaagttttcgagaccctcctccagcgcacggagcgtattgacgtcgatgtcgttggtcggctcgtccagcagcagcacgttgccctcctccttgagcgccagcgccagatggagacggttgcgctcgccgcccgacagcatgccgcacttcttctcctgatcggcgccggagaaattgaaccgcgccacgtacgcgcgggcgttcacctgccggttgcccagcataatcaggtccgtgccgcccgaaatcacttcgtaaacggttttctcagggtcgatcgacttgtgctgctggtccacataggccagcttcacggtcggccccacgcggaacgatccgcccgtcggcgtctccagccccatgatcatccggaagagggtggtcttgcccgtaccgttgggtccgatcacgcccacgatgccggcgggcggcagcgagaactccagatgctcgtacagcacccggtcgccgaacgccttcgacacgtcgtgcgcctcaatcaccacgtcgcccagacgcggaccgttgggaatgaatatttcgagtttctcctctttctgcttggcgtcctcgttcatcatcttgtcgtaggccgacagacgggctttcgacttggcgtgacgccccgacggcgacatgcgcacccactccagctcgcgttcgagggtcttgcggcgcttcgactcctgcttctcctccatggccatgcgcgtggtcttctggtcgagccagcctgagtagttgcccttccacggaatcccctcgccgcggtccagttcgagaatccagcccgccacgttgtcgaggaagtaacggtcgtgggtcacggcgatgaccgtacccttgtactgctgcaggtgctgctccagccagtcgatcgactcggcgtcgaggtggttggtcggctcgtccagcagcagcacgtcgggctgctgcaacagcaggcggcacaaagccacgcggcggcgttcgccgcccgacagcaccttcaccgactggtcgggatcgggacaccgcagggcgtccatcgcgcgctccagcacgctgtccagctcccagccgttcacctgatcgatctgctcgtacagctcgccctgacgctcgatgagcttggccatcgtgtcgtcgtccatcggctcgcagagcttcatgttgatctcctcgtactccttgagcagggccaccgtcgcggcgcagccctcttcgaccacctccctgacggtcttcgagtcgtcgagcttaggctcctgttccagatagcccaccgtgtaacccggcgagaagaccacttcgccctgaaagttcttgtcgatgcccgcgatgatcttcatcagcgtcgatttacccgaaccgttcagaccgatgatgccgatcttggctccgtaaaagaaggagaggtagatgttgttaaggacctttttctgattggtgaacgtctttgaaacgcctaccatcgaaaagatgattttttcgtctgccatattatatgcgttatgttcgttgttccgattttcctatccggcaaagataataaagattccgcaatcttccgacacgaaacgacaaattagggtcgggaaccgcgcaccttcccgaccgagagagagccggcttcccggcagggactccctgcgccgcaaaaaaaggcggccctgcaccgttccgatacagggccgccagcttgcgaactccgtcaatagttctctttcttcggctcgaagtaggcctgcggatgcttgcaggcggggcagagcttgggagcctcttcggcttcgatgacgaaaccgcagttgcggcactgccaccagatcttgccgtcgcgcttgaagaagttgccgtccgtcaggcggctcagcagcttgaggtagcggcgctcgtgctcggcctcgacggtcgagatcatcttgaaggccgtggcgatttcgatgaagccctcttcctcggccaccttggcgaactcacggtagagaacatcccactcctccttttcgccgtgagcggcagccagcaggttctcggcagtggttccgatcggaccggtggggtagctggccgtgatctccacgtcgccgccctcaaggaacttgaagaaacgctcggcgtgctccttctcctgttcggccgtctcggcgaacacgcctgcgatctgctcgtaaccctcctttttcgccttgctggcgaagaatacgtaacggctgcgcgcctgactttcgccggcaaacgccttcagcagattctgctcggtccttgtacctttaatgctcttttccataatcttatattgtttagtgtgtgtcgtttatttccgtacagcaaagataggaaaatccccgacaattcgccaaattatcttcatcgtttgtttttatacggctattcggattacttatagacccgatcgagcatctccgccacgtccttccggaacagggaataggccgccggcagagccatcgtgtcgccgacctcaggcggaacgatccggtagccgggcatcgccacccacaccggcaccggatcgagcgtataggtcatacggccgtcgggatgccgcacggcttcgatttcggcatcagccctccgtcgcagtagcggcggcgctgattggagacgaagttgcccagcgaatagagcaccacgtgcgacgaatcggtctcgaagggctgcaccacgtgcggatggcttccgacgatcaggtccgcgccgttgcggcgcagaaagcgcgccagccgccgctgttcggcattcgcctgccgttcgtattcgttcccccagtggatgcagaccgcgatgcagtccggcgatccctcgcgcgccgcggccagatcggccgccatgcgcaccgtgtcgatcaggtttacccgcacgccctccggcacggggattccgttggtgccgtaggtgtagttgagcagtgcgaagcgcacgccgcagtgttcgagccaaagcggattgttggccgcacggtcgagactgtccgtaaatacgcccgtatgccggatgccgcaccgccgaagttccgcgacggtcgtatgcaccccggcggcgccgccgtcgcagcagtggttgttggccagcacggccacatcgaccccggcgtcacgcagtgcgtcggccagcgccgccggagagcggaaacagggatagcccgtatagcggtcggtgcgggtgagcgtcgtttcgaggttcacgatcaccagatcggccgcacggaagcggcggtgcaggtgagcgaacacctcccggtagtcgaaccccgtttcgcggcgggccgccgtgacctgcggcagatgctgcatcacgtcgcccccgaacagcagccgcacgcacaccggcttgggcggcggaagggcaggctcccgctccgactgcttcgccggaacgcagcacgccgccgccagcagcagccacggaagaatatgtcgagcggatattttcatggtatgcgccccaaagttagctttccgtacgataaaatccaaaaaccgcactatatttgccgtcccgaaccgccgagcacgatttttgccgtcgttcgggataccgcgcggcgcaggccgcggcaaaaacgcgcagcggtgcggcggaccgtttcgcagcacgcaacgccgccgtgcgccgcaggctccggcccgcacccgccgttccgcatccggcggcggcggaagggaacgcaccgcgcgcagacacggtgcagccatgacagacgccaacgcgaaaaaaacgtcgaacatatgcgtaacataagtaatataaagggagtgctctacgccgttgtctcttcggccacgttcgggctgatcccgctcttctcgatcccgctgcttcatgcgggcatggcctcgccgacgattctcttctaccgcatgctgctctcggcggccatcatggcggcggtggcgctgctgctgaaacgcaacttccgcatctcgcggcgcgacttcggcgtgctggccggcctgagcctgatgtacgccgccacgtcgctgggactgctgcgctcgtacgactacataccgagcggcgtggccaccaccgtcaattttctctatccgctggtggtgaccatcgtcatgacgctcttcttccgcgaacgcagttcggtgtggatcgtcatcgcggtcttcatttcgctcgtcggcgtggcgctgctggcgtggggcgacgcgggaaacaacgatccggggcgcggcctgatctatgccgggacgaccgtattcacctatgcggtgtatatcatcggggtgatgaagagccgcgccggacggctcgacccgctgatcgtggcgttctacgtgctgaccttctccgccgcggtgtttctggtctacgccctctcgacgtccggcatcgcggtagtccacacatggcacatctggcgcaacctgctgttgctggccctgctcccgacggtgctctccaacctgacgctggtgctggcgatcaagcatatcggctcgacgatgacttcgatcctcggctcgatggaacccctgacggccgtactggtcggtgtcgtccacttcggcgaacgcttcgacctcgactccgcggccggactgattctggtcgtcacggcggtcatcatcgtcattctccagaccaatcacacgccccagacgccgccggcaaacattccgcccacgcagccgcaggagtaagacgctgtccgccttacacagccgaaaatcgcggccgcagcccgcgccattccgcgccggacggcgactctctgcccgcaggcgatccgccgcgtcgcgccgactgccgttcaggaccggctcggcggcaggcaggcgcaacggcctatttcttcttccggttcggattggccgggaaccatcccttcgccacacgtccgcgctgctcgaacagctcgccgatcgaccagagcgacgacgcgccccagacggccagcagggtggaccagaggatatgccgcacggcgaccgacgccgcgatcgccgcgacgcccatcaacaggaaaaaccaccagcagcgcacgccgaagtaatattcgcccttgattacgaaggggtggaacagaccgatgatcagaaacgtagcgacgccgatcaccagccccgtaaggttgtattccgtcagaaattccatcatgattccgcaacagtttgaaagcaaatatacgaaaaaaagagcggcccgcaccggaccgcccgaataaatgacgccgacaaggccgtcagaagctgtactgcaccattacgttcacgcggttggcgtggttcttcatgctgttcatgtccttgcgcgaaccgtagaggtactcgccggccaccttgcagcgcggcgtgagcgaatagaagatgttgccgaagatatactgcccctgcttgtactggtcgtcggtgtaatagccgtggctgcgctgcacacggacggtcgaatagccgcccgaaacgaacaggcgcggcgtgatgttgatctgcccggcggcctgccagccccacatcggcatcatgcgcacgagcgacggatcttcgggattgggcgtgaagtcaagccccgaacccgtcaggtcctgaatatagggggtgatgccctcgccgtaaacgccgttcatgaagagccggaaccagtcgcagcacttgatcgtaccgctgaactgcacgccccagccgagcagcgaggtggtcgaatttttcgagaccttgtgcatgtaggggttgcggatgacgcccgacgcgcggatatggctgctgcggtcgtcgccccacgcatactgcagatacatcgggaagtcgggcacgcgctggtgcatcggcttgaagttttcgccgtaggtcgcgctcacattgggcatttcggccgcaacgccgaaggtcatgtgccggcgggcgaacgaaacctcatagcggatcatcgtggcgaaattgaagttgtaggcgttcggtccctgaaagtcgatggtcgtgggcgcggcctgcaggtcgcagaacgtcgtcacgtcgcgtccgagggtcagccccttgaacgacacgtaagccgagcgcaggcggggcgtatagctgccctccgcgccgccgcggaagtcggcgtccatgtaaatcaccacgcggcccagcgcccgcgtgttggtgatcgccttcatgaagagacgcgaagtcgaggcgtccatcatcagcttctgtttcgaattgtaattgcccggcacgggaatgtcgtagggcacgaagtcgatgttgtccacgatgccgtcgaagtcgtatccggcgcgcaggctcacgaagccgcccagcgagaacgagaaccggttgttcttcgacgcgaatacgaactggggcttctcggactgctggaagccggggcggtgcgtctcgatatagtcctgcgtggcgttgtccatcgccagccggttgagcgccgcggcctgacggctgccgcagccgccgcagttgtaaaccgtgtccacttcgtgcacggagatgagatagaccgtgggcgaatactctccgttgcggccgtcacgcatgtgtcgctgggccgaagcggaagacgcaagcagcagagccacaatcaaaagtcgaaatgttttcataagctgaattgatttggttttaaatttgtccgatatgttttgtttttggagcacaagcagttgatgttcaaacccccgatcagcaagttatatgccaaaggatgccgcacgccattcgatctgccggaacgcgcggcgcttccgtcccgcggcaaaaggcgctccgccggcttcggacaggcttggtttgcacgcggttttcactatctttgccggagataaactcccgcacggacaggcagcgtccccggcagcggcaaatcgatttgccccagcccccgacttgcactatctttgccgtggataaaccgccgcacggacagacgcccggcaaaccggttccgcacccggcccgcatcgtcttcgtgcgttaattaaaataaggtatgtttctctggtttacttcgattctgacgctcgcggccgcggccgcagacatcatacactaccgccggctgcggcggcgcggaacctccgcacgcaacctgcgcctgttcgtcgcgctggccgccgccaccgacgccctgccgccggtcatcgccctgaccgacgccctgagccgcgacaacaccacgggattcatgctcttcgccatgtgggcgttctgggtatggatgatcaccgtcctgccgcgcatcgcctgctatttcttccggctcgtcggcctgccgcgcgccggcatcgccgccggcatctgcgtggccgcactcctgatttggggcaccacgcggggaaggacgcaaatccgcgtcagccgcaccgaagtctgctccgaacggattcccgcgggattcgacggtttccgcatcgtccagttctcggacgtccacctcggcacgctcgtctgccccgaagcggagctgagccgcatcgcggacagcatcaacagcctgcatcccgacctcgtcgtcttctgcggcgatctggtcaatatccgcggttcggagctggacgcccgcgccatgcgcctgctgggcggcctgcgcgcaccgtacggagtcgtagcggtcacgggcaaccacgacgccggagtatacatcaaggacagcatcgcgcatcccgcccaagcgagtctggccgaggtcgtcgcacgccagcgggaaatggggtggcgcgtgctggaggacacgaccgtctacctgcggcgcggcggcgacagcatctcgctgacgggcctttcgttcgaccccgcactgcggcacctgcgccacgctcccgacctgccgcccgcgaacctgaacgccgcctaccgcggcgtccccgactcgctctacaacatcaccgccgtgcacattccccagctctgggaccaaatcgccggagagggatacggagacctgaccctttcgggccacgtacacagcatgcagctgaaaatacgccttttcggacacgccttctccccggcgcagctgatctacacgcggtggagcggccgctacgacgaaaaaggccgcacactctatatcaacgacggcacgggatacgtcgcattcccgatgcgtctgggcgcatggcccgaaatcacactcataacgctgaaaagatgcgggtaacactttccgccgcggttacggccgacggctttctggatgacaacagcccccggaggctgattatctcgacgcccgaagactgggcggaggtctaccgtctgcgcgccgcgcacgacgccattctggtcggcgccgaaacactgcggcgcgacgacccgtcgctgctcgtgcgcgacgaagaggtccgcgcccgccgcagggagcagggattgccgcccgacatcgccaaagccacgctcaccggcacgggcgaactttcgcccggactgcgtttcttcaccgaaggcgaagccgaacgctatgtgttttctccacacgaaatagatagtttacagaacattgcgacgattatatcaaccgaaggaccaattacggcgaagctgatcgtcacccagctggagaagcggggcatcgaacggctgatggtcgagggcggggcggcggtcctccgcatgttcctcggcgaaggcatggccgacaccctgcggctggccgtcaacccacaactgcggctcggctcggcgggcggcgcggaattccgcttcacaccgcctcagggcactccgcagacccgcgaaaacttgggcggcatggaggtcacgacctacacgctgcatcccgacacctccgccacagacctgcgtttcctgaagcaggccgtggacgaaggccgcaaatgcacccccagcgccacgtcctactgcgtcggcgcggtcgtggtcgcggccgacggccggatctttgcagggcacacgcacgaaacctcgccgacgcaccacgccgagcaggaagccatcgccaaggcgctggcagccggagcgccgctccgcggagccgccatgtactcctcgatggaaccctgctcgcagcgggccagcgaaccggagagctgcacgcagctcctgctgaaatacggattcgcccgcgccgtcttcgcgctctacgaacccgactgcttcgtctgctgccgcggtgcgctcaccctgcgcgaagcgggcgtcgacgtacgggtctatcccggactggccgggggagtgtgggaagccaacgcccacctgaagcgctgaaaccggcgcaatttatgtccataagggcctaaaattggcctcttttaccggaaaatcgcgcaacatatcgggataacttatatatttgtgttttaaacgtatcgatgaatatgaaaacagcagtcggaatagcttttgcggcggtattcgcaaccgtcatcccgctgtcggcgcaggaggtcaaacagacgctttcgctcgacgaggcgatcgccgtcaccctcacggaaaatcccgcgatgaaggcggccgagttcgaggagaaggccgcgacgcaggagcgtcgcgcggccatcggcctgcgcatgcccaaaatcaacgtcacgggcgcctatgcctatctgggcaaggacatcggattcgacttcaacgagatgaagggtcccgccaagaacctcgcaggacagctgctgggcagcggactgataccccccgaagcgatcccctcgatcaacggcctgctcaacccgctgctgaacgccgactggttcctcacgctgcaggaccggagtctggggttcgtgggcggcgaggtgaccatgccgatctggctgggcggtaagatcaacgccgccaaccgcgccgcacgcatcaacgaacgcaccgccgcagagcagggcaaccagacgcgcaacgccctcatctccgagctggtggagcgttacttcggccttgcgctcgccatgcaggtcgtcgaggtgcgccggcaggtcgtggacggcgtgcgccgccacctcgaagacgccatagccctcgaaaagaacggcatgatcgcccagagcgaacggctctacgtcgaattcaagatggccgaggccgagcgcgagctggccaacgccaagctgcaggccgaaaccatcgccagcgcactctccaacacgctgggacgcgaaaacgcatggcagcccgtgacgtcgatgttcatgatcgacaaggtcgaggatctggcttactatcaggatctggcgcaggaccgcaatccgttgctcaatcaggtttcgctcaaacgccagctggccgaggagggcgtccgcgtccagcgcgccgacttcctgccgcaggtggcggccatcggcggcggctcgttctacaactatcaggtttcgggcatcgtgccccgctgggccgtgggcgtgggggtcaatatcaagatcttcgacggcctgaaccgcgaatacaaatattcggcggccaaacagaccgcacgccgcgtcggcgccctgcagaacaaggccggcaaggatatttcggtgctggtcgagaagctctacaaccagatgatgaactaccgcaaccagatgacctcgatcgacgcgtcgctgaacttcgccgaggagtacctccgcatgaaaaacgccgccttcctcgaaggcatgagctcgtcgtcggacctgatcgacgccgagctgaacctcgcgggagtgcgcaccgaacgtctgcaggcagcctacaatttcgacctgctgctggcgcagctgctcgaaaccgcaggcatcagcgacgaattcccggcctatgcgcgccgcagcgacgcacggcccgttctgttcgataaaaaataaaatccgaaaaatatgaaacgcagcaacatcattggaatcatcgcggccgccgtggtcatcatcgtgtcggtcgtactgatcagctggtatctccgcagatcgaccccgacgctgattcagggcacggtggagtgcacgacctacaaggcctcgtcgaaagtgccgggccgcatcgacgacatgaaagtcgagcagggcgaccgtgtggagaaggggcagctgctctacacgctctcgacgcccgaactggaagccaagctccagcaggccgaagcggtcaagagcgcggccgcggcgttggatcaggccgccatagccggcgcccgcatccagcagatcgaagcggccatgaacatgtgggagaaggcgcaggccgggctggaactggcgcgcaagacctacgagcgcgtgaaaaacctctacgagcagggcgtagtccccgaacagaagatggacgaagcgtcggccaactacaaagccatggaagccacggcgctggccgccaaagcgcagtacaatctggccatggacggcgcccgcaaggaggacaaggaggccgccgcggcccgtgtccgtcaggccgaaggagccgtcagcgaagtcgaatcctacatcagcgacgccatggtctattcgcccgtcacgggcgaggtctcgaccatcatcgccgagcagggcgagctggtcggcagcggctatcccgtggtggcgatcctcgacatgagcgacatgtgggtgactttcaatatcaaggagaccctgctccccgcgattcgggtcggcacccgcatgagcggctacgtgccggcgctggggtatgacgtggagttcgaggtgacctatatcgccgtgcaggccgacttcgcgacgtggtcggcgacccgcacgcagggcggtttcgacatccgcaccttcgccgtcaaagccaagcccacgacgcatatcgaaaacatgcgtccgggaatgagcgtactcgtggattgggacctgatcgggaagtaggagagtgcgatgctgaatttcctgcgtaatacctatgccgttctgcggcgggaactgacgcgcctcgcgcaccagccgatgtatttcgtgctgatgctcgtgctgcccgtcgtgtcgttcgcgttcttcgccctgctgttcaacaagggcgtggcgcgcgacattccgatcgcagtgctggatcaggaccacacctcgctctcgcgcaaggtcacgcagatgatcgacgacacggcgacggcaatggtgtcgtacggcattcaggacatggacgaaggcgaacggctgatgcgcgaaggcaagatcatggcgatcgtgcagattccggcattcttcgagaaaaacatcctgagcaacagccagacgcatatcgagacctacatatcgggaacgaacatcacggtgaacggcctgctgtcgaaagacatccagaccgccgtgacgaccttttcgggcagcatccagatccagctgctcaccaaacagggactcaccgagctgcaggccatggcgcagctgatgcccgtgcggttcaacaagcacgtattgttcaatccctatatcaattacggctattacctctcgccgagctttatgcccatgatgctcctgatcttcatcgtcatggtgacggtcttcaccatcggcacggagcttaagaagggtacggcgcgcgaatggatcgagacgggcaacggctcggtatcggccgcactgctggggaaggtcctgcccgtgacggtggtgatgttcctcatgtcgctggtcatgttcctgatcatcttcaaggtcgtcggcgtgcccctgaacggcagtctgacggttatcctgctgagcacgctgctcttcgtgatgagctatcaggccatcgcggtcttcatcgtctcgctgctgtcgaacctgcgcctttcgctctcgatcggcggcggctattcggtgctggccttcaccttttcgggactcacgttcccgatcatggccatgtggcccgccatgcagtacctgagcaggctcttcccgttcacctactacaccgacatcttcgtcgatcagatgctgcggggcgccccggtcgtctgctcgctgcccgacatgtgctacatgtcgctgttcattgtcttaccgcttctgtgcctgccgcgcctgcggaccatctgcacggaggaaaaatactgggggaggttatagcatgagccgtttcacacatcagatgacctcttattggcagcagatgctgtcggtcatgcgcaacgagttccgcacgatcttcaccgatgcgggcgtggtcctgatcctcgttctcgcgctgatcatctacgccaccgtctactcgatggcttacggggcgcaggtgctccgcaacgtgccgatcggcgtggtggacgaatgccgcacgccgaccagccgcagcctgatcgagaccttcaacgccgggccgaacacctatgtggcctacaatccgacgagcatggaggaggccaaggatctcttcttcaaacgcaagatctacggcgtggtctacatcccgtcggattacgaggagaaactgctcggcggcctgcaggccaacgtcgcgatctacgccgacgccagctacttcctcatgtaccggcaggtgtttcaggaggtcgtgacctcgatcggcgccacgggcgcgatggtcgaattccagcgtctgatcgccaagggagccaacctcccgcaggcgcaggccacgacccagccggtcatctaccagtcccacaacctgttcaacccctatctgggctacggcacgttcgtcatgcccgcgatcatcatggtcatcatccagcagacgatgctcatcggcatcggcatgatcggcggcacatggcgcgaattcgggctgtaccgcaaactctgcccgcccgaccgcaagcggatgtccacgctcccgatcgtactgggcaaagcgctggtctacggcatgatctattccgtgacgacgttctacatcctcggtctgcattacaagctgttccactatccgatgaacggcgcgacgggcacaatcgtggtcttcatgctggcgtacatggcggcctgcatcgcgctgggaatcgccatttcgacgctcttccgctaccgcgagaattcgctgctgctgctgttgtggacctcgattccgctgctgatgctcagcggcgtctcctatccccgcgaaggcattcccgactggctgttcaacttggggcagatattccccagcagccacggcgtaaacgcctttatccgcatccagagcatgggagcgtcgctctccgaagtgctgcccgaaatcaggatgctctgcattctggccctcatatacggcggtctggcctgcatcggcatccacttagtgctcaaccgcgcggacaaggacgacatcccatcgccgcacacctccaaaccggaaaagtgacggcgacgcccaagcatccgcaggaaccgccccgtcccgtccgccgaaagccggacggccatcgacccggcacaccggcacaaggacgaagcggaagcaggcttccggcataatgacaaaaaagacgtcaggcgcaatgcctgacgtcttttttgtccgaaccgcaccggttaccgcggaccgtggaagatacccggaggcggcccgcccggaccgccgggtcccatacggcggggtcccgactgcacggccccgtcgtaatcggagatgttcttcgaacccttcttgccgaagcggcgcaggttgtaggtgaactgcaccatgtaataacggccgatcacgctgttggtcgcattctgcgtccatcccgaacccgtcgtgcgggcgaaagccttgttgcggttgagcaggtcgttcacgccgaacatgatctcgccgcgcttgttcttgaatatcttcttgccgatccatgcgttgcagagcaggtacgaatcgtcgtaatcgttcgtgaaaccgatatactgcgtgtaagccacgctgcccgtaaaggtgaagcccagcgggaagacgaacttcatgttgccctgcgcccggtggttgaagtagcggtttttggaacctgactcgcccagcgagttggtcgcttcgttgtaggtgccgttccacgagagcgtgaagtccacgttttcggaaatattgctgcccagcaccgtgttgaagtcgtagccgatattgctcgtgtcattgcgcttgccgcccgtgatgaatccgtcggcgtccacctctccgcccagcatgctcggcgtaagcgagtagctgacgcccgccatcacgttgaagttgctcttcaggaagccgatcggaaaaccgtagctcaggtgcgtccgcaggctccagtagccgtcgagattgacgggcgtggagtagtagttgggcttgtactgcacgccgcccaacgtgatcgtgccgggattcgacaccacgtgcgtcgcattgtagtcggaggtgttctgcatcgagaacatccacatgaaggtccgacccttctcgacgttggaattgatgtagtggaaattgacgcggtggctgtaggtcggattcagatcgggattacctttggtgatattctgggcgtccgatacgtcggccacgttctgcaggtcggtgatcgacgggttgtcggtataggacgatacgtagagccgcagcgaattctcgcggttgatgttcaactgtcccatcatgaaataggtcacgttgttgtacgaatgcctgatcttgtcggcatcgtcccgcacgatctgcccgtcgagcgacgaacgctggtaaaagacattggcgatgaacgtattgcgctccttcgaatagcggaatccgggacctgcgctctgcgtcaggtagttgctccggtaggagttcgaaagcgctccgtcgggcgtcagtcccgcgatcgaataatccgcgccggtgatatacgacttcttgtcgcgctcctgataatcgtacgaaatgcggtactgaaggcttacctgcgcatatttggcgacgggttccgtgtaggtgaactgtccgcgcaggcggtagctgctcgacggcgcgaggttgcgcaggtagcgcaggcgcgtgtaacccgtcgtgtcccatccccacggcgcgtcgacgccgtcgggccggaggtccgagagcggcagcacgttcgagaaggagttcgagttgttggtattgtccgagtagttcacgtcgccgtcgacggtgatcgtacggccgtccttgcccagtttggcgcggtaaacggcattcgtccgcacgttgtaaccgtggcgcagggcgtcgctgcggttctcggtgcggctgtaaccgctttcgccgaactgccagccctgcgtcgtgctcagcgggtcgttcgactggtagctgaagctcggacggaccatcagattctggttgtcggagattttccactccagacgggcattgaagcggtggttatacgactcggtatccgagtagccgcgcgtcgagagcgtgtccacgggcatcggcgactcgtaccatttgtcgatcgtcgaacggttcctcgtgtcggtgttgttgaagaaatagctgccctgaaacgacacctgatcgcgcttgccccatgtatcggagtagtttacgccgatggcgttcaccgacgccacgccgctttgggggcgcaccatatactggcccacgccgccgcggcgtccgcgccccgaaccgcccgaaacgcccagaatatcctcgaacgagaagttctgctggttgatgttgttgaacaggccgatgaccgacacacggctgctgccgctgaagatattggcgttgccgcccacgacgtatttgttcttggcttcggtcttggtgtcggcgtcgtaaccgtaaccggcatagagcttgccgaactgcccctgacgcatgttggcgtgcgtaacgatgttgagggccttgtagccctcgccgtcgtccatgcccgaaaattcggccgcgtcgctcagcttgttatagacctccacacggtccacggcctgcgccggaagcgacttgatggccgtcgtcacgtcttcgccgaagaactccttgccatcgacgaaaaccttcttgatctgctcgccctgcgcctcgaccgcgccgtccgacacggtgatgccgggcatcttcttcagcagcccctcgacgtcggcgtcattggtgaccttgaaggctccggcgttgtaacttaccgtatcgcccttctgcgaggtacgcagcgccttggcctccttgacgaccgtttcgatctgcacgccgggcttgagttcgatcctgccgatgttctgtttgccggccgccacccggaaggtggtttcgtaattgttgtaaccgaggaaggagacggtgagtctgtattcgccgtagggcagcgagggaatcgccacggcgcctttatagccggaagtgaaatactgtttctgatccggagtcccgaccggagcgacctccagcacggctccggcgacgctttcgccggtgtcggcgtcgagcaccgttccgctgaccgcgcccttttgggcgaatgcggccacggcgaaaagcaggaatagggttgagagtagtagccgtttcatcttaatgttctgtgtactttctgattttgcgcatgcgaagatagcttttttctcgcagacggccctccgatgcggggtgaatcgacaaaaaaagggcgtcagccgacaaccgacgccccgactgcaacaaaccggtcgatgttcctaacctcactttttctcctttccggagcgcggtccgtcgcatttcctgtcccccgcgcagggggcgcacttgcggccttcacgcacggcggccttgtcgccccggccgtccttcatccggggaccgcggttcatgccgtggcgcgggccttgcatctgcttccactgctcgaactgttcgggcgtgaggatgcctttcatcttctcggcctgcgccttgcggtatgcgcgcatctgctcggcctgcgcctgcatctcctttatatcctgcaggttgacctcatagagctgcttcgactgcttttcgctgaggttcagcttctcggtcatgcgttcggtcctgcgctgggccatctgctcggccgtcggccgctccttcatcatcggagccttcttcgaatcctgcgcaaaagcgcccgttccggccagcaggcacaaagccgcggcgactgcaaaaattctctttttcataatctcaaatatcaatggttaattcaatccgtcaatcggacccgtttcggtccccttacgatgcaaaggtaaggccaaaccggaaaaacggaacggcaatgcgggtcaaacgcccgaagctcagggtcaaacgcctattcggcgggttgaacggacgtgagccacgccttgaattcggggacgcgggccttggaaatgacgatgcgctcaggagtttcgagcacaagactcagcgaaagacggctgccgaaccacacggaaatctccttcacggcgcggcgcgccacgatgaactggcggttggcgcggaagaaatcggcttcgggcaggacggcctgcagcgcttcgagcgtcttgtcgagcggataggacgccccggcgaaggtataggccgtcaccttctcgttgcaggtatagcagaatgcgatatcctcgcgtttgagcggaatgatcttgtcgcggacatgcaccagaaaggtctgctcgcggcgcgccgcggccagcgtgcgcacgcgcgaaccgtaatcgctgcgctcgcccttggacagccgcatgagcttgtcgagcgcccgctgcacgtcggccgcattgagcggcttgagcaggtagtcgatgctgttcaccttgaaggcctccagcgcatagcggtcgtaggctgtcgtgaagatcaccggcgccgtgacctccacggcgtcgaatatgcggaacgaatcgccgtcggccagatggatgtccatgaacagcaggtcgggctgggggttggcgcgcagccaatcgacgctctcctcgacgctttcgagcgtatcgacgacacggatgtcgggagccgcctgtttcagaatggctttcaggttcagcgcggcggcggtttcgtcctctatgatcagtgctttcatcctgcaagggggttatgcagcggcatccgcacgacgaactccttgtcggtgtcgatgatttcgatgtcgcggccggttatcaggtgccagcggttgcgcaggttctccagtccgatgccggtcgaaggttcgggttcgagcttcggcaccttgggattggagaccaccagccagccgttctcggtgcggatcgaaatgtggaacggcttgctgcgggttatggtattgtgcttgacggcattgccgatcagcggctgcagcgagagcgccggaagcgtccacgtgcggtacttctcctcgatgtcgatgtcgaagaagagcttgtcggcatagcgtatcttgaagaggtagctgtacgcctcgacgaatttcagctcctcgtcgagcgtcatcagcgtactctgtccgttctggatgatgtagcggaacgtataggagagttggtcgatgtaggtcagcgccttctcgtcgtgcttctcgcgcacgagcatcgccagcgaattgagcgaattgaagaagaaatgggggttgatctgtcccacgagcatgttgtaacgggtcgtgaggttctcgttcttgagccgctcgttctccatgacgacggcctgctgcttcgaattgagcacgtagacccagccgtagagcatcgacaccgccacggcgaacgaacacttcagcagcagcatgtagtcgaaaatatggtcgcccatgcagttcagcatgatgcgtcccgaacgccactccgtgaccggcgcgaccatatacagcgcggcggcggccagcacgcaccatatgcagtggcgcacgaagcggcccggcgtgtacctgcggcggacggaggtgaggatcgaaagcatgatgaacgaaacgaccagataatagaagagctgcagcgcgagttccgtcgttttcgaaggccggttgaaaagcgtgctgtaatcgaactcctcgccgttgcgcatgcgcagttcggtcatcaccggatgcgccccgtgacggcgcggcgcggccagattcgccaccagacggtcgccgtccttcaggttcatccggtagatgcgctgcatcatcacatagacgctgtcgccgttctcgtagacgatgtagccgtgaccgtcgggacttatccgcagcgttccctcctcgccgcgcgcaatgacgctcgccttggccggacgctgctgtccgtcgctcttctgatcgacgatcagcagcagcacgtaggagaaattgacgaccagactgacggccagcgccaccagcaggttgagaatcaggtcggaatatttcggttgcagccccatccgccgtttactcctcctctttgaaccacgacgcatagagcatgtagtcgcgggccgtgcggcggatgatctcctcgcgctgctggggcgtcacctccttgaccttcttggccggcacgcccgcatacaccgaattgggttccagctgggcgttggagagcaccagcgcgttggccgcgatgatgcagcccgacggaaccacggcgttgtccagcagggtagcgcccatgccgatcaggcagttgtcgccgatgcgcgcaccgtggatgacggcgttgtggcccaccgacacgtcgctgccgataatggtctgcgacggatgcggcgagccgtcgtaaagcgtgtgcagcaccacgccgtcctgaatattcgtgcggtcgccgatgacgattttgttcacgtcgccgcgcagtacggcgttgtaccagatcgaacagtcgcggccgatggtcacatcgcccagaatgacggccgtctcggccagaaaggtattttcaccgattgcgggcgtatgtccccgcacctttttaatcaaagccataagtttatatgctgttaaatgtcacttcgcctttgtatcgtctccgcgtgtccgagggcggacattcacggcaaagccgtgttttcaggtctgaccatcccctaaatcccctcctcggaggggacttggcattagtgcggacacatgctattgaatgtctcttcgtgtttggcttcctgccagtactcctccatcttttcgagcggaagctcgtggagcgtatgtccttcggcggcagccttttcctccatgtaattgaagcggcggatgaacttcttgttcgtacgttccagcgccgattcggggtcgatgccgtagagccgcgacgcattgaccagcgcgaagaacaggtcgccgaattcgccttcgagcttctcccggctgccgggggcttccgaacgcatctcggcttcgacctccgcgatctcctccttcaccttgtcccacacatcctcgcgccgctgccagtcgaaacccgtcgcggcggctttctcgcccacgcggaaagccttgaccatggccggaagcgagcggggtacgccgcccagcgtgccgctcttgcggtttttcttgcggagtttcagggcttcccagttctccttgaccgcgtcgggcgtattggcgtgaatatcgccgtagacatgcggatgacggtatatcagcttgtcgcacagggcatcggcgacctcgccgaaatcgaaggctcccgcttcctcgcccagcttggagtagaacaccacatgcagcagcaggtcgcccagctcctccttgatgccctccatattgtggtcggtgatggcgtcggccagctcgtacgtctcctcgatggtattgctccgcagcgaatcgaaagtctgctcgcggtcccacggacactcgcggcgcagcgtgttcatcacttcgagcaaacgggccgtagcctccagtcgtttatcttccatgctcagttacagtttacggcaatggctgttcgggaagcggagtcggccgatctgcctgagcgcgcccgtccatgccggaatttattttcagcaaaggtagcaattcggcggaaaaaaagtaactttgtccgaaacaaaattccgtaccgccatgaaactgcgatacctgctgccccttgcgggggtgttctgcacctgcctctcgacatacacccagccgtcgccggcccgtcaggccttctacgagggcgcctgccgcatcagctcccggacgatgctctgttacgaaacgccgctggcgccgctggccgcctacctgcgcgaatatatcaacgtcgaaacggccagcgacagtatgtcggccgacgacgcgatcgtgctttcgaccgatccgacgctgagcggcgaagccttccgcctgacggtgctcccgcagcggatcgaaatcgcgggcggttcgtacggcggcgtattcaacggcgtgcaggccctgttccggctgctgcccgccgaaatatacgccaagaactgtccgcttccggtcgagatcgcctgcacgaaggtcgaggacgcgccgcgcttcccgtaccgcggcatgatgctggacgtggcccgcacgtggatcgatgcagctggagtgaagcgttatatagacttgctttcctatcacgggatcaacaaattgcaccttcatctttcagacgacgaagggtggcgtatcgaaatcagatcgcaccccgaactgaccgagatcggcggcttccgcggcggcgattcgcccgtgcgtccggtctacggcaaatgggacgagaagtacggcgggtattacacgcaggacgagatgcgcggcctgatccgctatgcggcggcgcgcaacatcgagatcatccccgaaatcgacctgccggggcacagccgcaacatcgcgtcggtgcatcccgaaatacgctgcaactatccgcccgacacggtttcgaccaacggttacgactaccgttcggcgtggtgcgtggcccgcgaagagaattacgcgctgctggccgacattctcggcgagttatgcgcgctgtttccctcggagtacatacacgtcggcggcgacgaggtggacatgacccagtggaaccgctgccccgactgtcaggcgctgatgagccggcggggcatgaccgatccgcaccgattggaagacctcttcatggagcgcatggcggcgattctcgcggccaacggcaagcgtcccggcgtgtggaacgaagccgtgaccacgggcggcctctcgcgcgaatgtctcgtatacggctggcagagcgtcaaggcgtgtctcgacgctacggcgaaaggctacaagaccgtggtgatgccgggcgaatacttctatttcgacatgcggcagacgccgcaggaggaggggcacgactgggcggcggtcttcgacgccaaaaaggtcttcggattcgactttacggaaaagggcttcagcgatgaacagatgcgcaacgtcgtcggcctgcaggggacgttcttcagcgaagcctacgtttcgcacgagcctgaaaagcccgactatctggactacatgtgttttccgcgcatctgcgcgctcgcccgcatagcttggcgcggcaactgcgaggggtgggacgcctattacagggagctgaccgaccattacgaccgcatggcggccatgggcatccgcttccggcttttcccgcccaaggtaagctacaaggagggcgccttcaccgtcgtggcggacgacggctcggaaatcttctacctcgaaggcgattcgcccgaagagcatcggtacaccggccccatcaaaaccgacaaaccgcatctctaccgcttcctgacgcgctacaagacgggacgcagtccctatgcggccgacaaatcctactacaggacccttgcgcccgccgtgacgatcaccacctcgatgggcgaaagcacgcagttcccctacacgaacgcctcggcctacaagggacttgcacgcacgcgccgcgcctgccgtcagcaggactggatactctacacctatgaacagccggtgaagtgccgcgaaatgtttttgcagacgggaaaccgccagctgcccaaaaccattataaccaccggttatgccgaggtgtcgtacgacggcacaacatacgagcgtgcgggcgatctggaaaagggcagtataactttaaagcccggccggccggtgaaagccgtgcgcatcgtctcgacctgcgacgacaacggtacgccctacgtcacgatccagccgccgcagataaagccggtactgtaaaacggaccggaaaagcgactatgacacgggaggagccgccttagcagagacaactaacgcgatacagtgcgcctcctgcctaaataaacgatgacaatatcgcactgcaataccgctcggcatttcaacggccgtatcaatgcggagagtcggaaagagtcgccgctctgacggcaaagaggtagaagaggtattgcgcggcataataggtaatcatcacgacacaggtccggcagggaacgggcgcgacgaagcgtccccatgcgatcacggagtcggaaaagacgaacaacagggccgcaaggcggaaccatgcggcatacgctccgcggtactgaagcgcaccgtataacattcccgcgataacgagtccataaacggcgacgcccgcgcgttcggccggatcggcggcgcggggaacgatgcagacgaacagaaacagcagcagagccgtcagcaccggccagacaaaaggccggggcgcaagttgcgcctgcggcaagaagtagcacatgtaggctccgtgcgccaaagcgaaaaacagcatctgcggaatgaacatccccccggcgcccgccgcatcgccaacggccgacaacaagagcgccgcgccgaccggaatcagcggtttcagccggagataaaagagcgacagcgacagcagcaggaccggataagcgaccttatacggaatcaccgccgccttggtaaagaacagcgcggcgccggctgcgaaaaacagcgtggtcaggcagagcgttcgggagattcgttgcatggtttcggtaaaaaagccgcctgtacttacgaacaggcggcttcgattatggtcaataagctcgtcggcatgaccgtggcgggcgtgtgcccgcaccgagatgcgacgagcggcattcggattgggatcaaccgcggacctgagcgccgcaccgctgttcgaactgcgcggtgaggttcctcatcgccttttcgatcgtcttctcgtcgagcgtgcgggtcttgtcttcgaggatgaagctcagggcgtaggatttcttgccttcgggaagtttgtcgccctcgtagacgtcgaacagcgaaacgctcttgagcagtttgcgctcagtggcgaacgccacgtcgcgcagcgccgagaaggtcacctgcttgtcgatcagaagggccaagtcgcgtttcacttcggggaacttcgaaagctcctcggccgcgatcttatgcttgcgggtcgatttcacgagcgcgtcgaaattcatctccagatagtaaacatcctgcttgacgtcgagccggcggcggattttagcacttaccgtgccgatctgcagcagctccttgccgccaagcgacatcgagagcgcctcgccgaagaggtcgttctggagcgtctcggtccggagcgcatagatatcgatgccgaagcggcgcaggagtttctcggccacggcgcgcagcgtgaagaacgacgcggcctgcggccgggcgttccacgacgcaggctcggccacgcccgtcacggcgatcgccagacggtactcctcggagtaggccgcgaggcggttctcctccgagcgtttcgactcatcgtagaaatagcagttgccgaactcgtagagtttcaggtcgccgttcttgcggttggcgttgagctgcacggcttcgagcatgttgaacagcagcgtctggcgcatcacgttcaggtcggcgctcagcggattgaggatgcgcacgcagttttcgggcttgtaggattccagcccctcgtagtaggccgccttggtcagcgagttggacatgatctcggtgaagccgttggaggtcaggaaatcggcagcgagattcatcagcttgctgcggtcgggcttcggcgcataggagagcgtcgagcggacgcgcgagggaatctcgacattgttgtagccatagatgcggagaatatcctcgacgaggtcggcttcgcgctgcacgtccacgcggtagggcggcacggcgacactcagcacaccctctttctcggcgagaatcttcacttccagcgcggcgaggatcgtgcggaccgtatcttcgggaatcttcttgccgatcagcgagtcgatgcgggcgaaggagatgtcgaatttgaagtcttcgacaggattgggatagatgtcggtaatgtcgctcgaaatctcgcccccggccagctccttcatcagcagagcggcgcgcttggcggcatagacctgcatgttgggatcgacgccgcgctcgaagcggaacgacgaatcggtgttcaggccgaaacgcttggccgtcttgcgcacccacacgggattgaaataggcgctctcgataaatacgtcggtcgtcgtgtcgccgatgcccgaatccagtccgccgaagactccggcgatgcacatcggacgctcggccgagcagatcatcagatcgtcggccgtcaattttcgctccacgccgtccaacgtcacgaaaggcgtgccttcggcgcaggtgcggaccacgacttcgcggccttcgatcttcgccgcgtcgaacgcgtgcaggggctgccccagctcgaagagcacgaagttggtgatatcgaccagattgttcttgggattgatgcccgcggcgcgcaggcagttctgcatccactcaggcgaagggcctatcttgcagttcttcaccgtcacgcccgcatagcggggggccgcttcgtggttctcgacgcggacggtcaccggcaggtcatggttgtcgggagcgaaggccgagacgtcgggcatcttcacttcggcgttcaggccctgactcctgaggtaagccgccagatcacgcgccacgccgatatgcgacgcggcgtcgacgcggttgggggtgagtcccacctcgatcaggtagtcgtcctcgatgccgaggtattctttggccgtcatgccgacgcgggcgtcggccggaagttccataatgccgtcgtgcgaggccccgatgcccagttcgtcctcggcgcaaagcatgccgagcgactccacgccgcggatcttgctgcgtttgatcttgaattcctcgtcgccgccgccggggtagagcaccgtgccgaccgtggcgcagagcaccttcagcccggcccggcagttgggcgcgccgcagacgatctgcaggagatcaccggcgccgacatcgaccgtcgtgaggtgcaggtggtccgaatcgggatggtccgtgcaggtcagcacctcgccgaccacgacgccgtgaagcccgccctttacggtctcgatcttctcgaaaccctcgacttcgagtccgatgtcggtcagtatccgtgcgatttcttcggccggaagatcggtgtcgagatagcgtttaagccagttatacgaaatattcataattaaaagctttaatgttcctcttgcagttcaacatgccggaccgccttccccgcggcggaaggccgcgtttgcaggtccggccgccccggaatccccgccaaggcggggagtgccgccgtcacagcgtccggaacggcatgctaaaatcgaacaaagatacataaaaattgttaatctcgtcgagattggcgcactaaatcgcgccggcgcttccgaccggcttttcgacggacgggcacggaaaaggggaggacgccatatatgtaggtatcgaaaatatccgccgaaaaatttggatttaaggatcggacccgctatatttgccgaaaagaatatgattcgcaatttcaacatacaggcttggtggtggcgctcgttgactctcgtggacaatgagtgcggctccgtgcgtgtatagttgaaacctgataccagccacaagcccgttgtttacgagagagtaaacagcgggctttttcttttgcactttcacaaaacaaacggaaaaataaaaaagagtatgaaaacgaaaaaattctgcctgaccgagaatcagatgcccacgcaatggtacaacatcgtggccgacatgcccaacaaaccgctgcccccgctgcatcccgcgaccaagcagcccgtaaccaaagagcagatgagcgccattttcgccgaagagctgatcgatcaggagatgtccgcggagcggttcatcgacattcccgaagaggtgcaggagatttacaaaatatggagacccacgccgctcgtgcgggctacggggctggagaaggcgctcggcacgcccgcgaaaatctatttcaagaacgagagcgtctcaccggccggatcgcacaagcccaacaccgcagtgccgcaggcctactacaactacaagcagggcatccgccgcctgaccaccgagacgggcgcggggcagtggggcgcagcgatcgcattcgcagccaagcatttcggcatagacctgcaggtttacatggtcaaggtcagctatgagcagaaaccctaccggcggctgatgatgaacacttggggcgccgagtgcatcgcatcgcccagcacgctcacggcatcgggccgtgcggcgcttgaacgcgacccgaactgttcgggaagcctcggactggccatttcggaggcgatcgaagtggcgctgcaacaccccgaagatacgcggtactgtctgggaagcgtgctgaaccacgtcatcctgcatcagaccgtgatcggacaggaagccgtggcgcagatggagatggccgacgccgagcctgacgtggtgatcggatgcttcggcggcggcagcaacttcgcgggactgggattcccgttcctgcgcaagaacctcacggaaggcaaaaaaatccggatcgtggcggtcgagccgtcgagctgcccgaaactcacgcgcggcagtttccagtacgacttcggcgacgtggcgggattcacgcccctgctgccgatgtatacgctggggcacgatttccagccgtcggacatccacgcgggcggactgcgttaccacggcgcggggtcgatcgtcagccagctgctcaaagacggactcgtcgaagcgcagtcgctgccgcagaccgagaccctcgccgcaggcattctcttcgccaagaccgagggcatcatcccggcgccggaatcgacgcacgccatcgccgcggccatccgcgaagccatgcaggccaaagaggaggggacgcccaagacgattctgttcaacctctcaggcaacggcgtgatcgacctctacgcctacgaacagtatctggcgggagcgctgaaagactatgcgccgggggatgcggaaatcgcaaagacggtcagccggctggagcagctgatatgaccgggaccgacgataccgcaaataaaaaaagacagcccgcaatgggttgtctttttattttgacaccggcggtttcgggaccggaagccggtctgcatccaaacggaagggtgtgcatgcaaatcccgcgcttcgacacggtcgtcattacctcgaccccagccagaggaagaacatgccgacgaggataaaggccagatcgaaggctttggagcggaggttgtgctcgcggaacagcacggcgccacacaagaaagagacgacgaccgaactgcggcggaccatcgacacgacggagaccatggcgtcgggctggtgcagggcgtagaaataggcgaaatcggccagcacgaggaagaacgagatcagcggaatggcccaagtccagtggaacggggtggtcgtacggcggcgcggccaccagaggatgccgacgacgaccgacatcaggccgaacagatagaggttgcaccagccctgcacgaagaccgggtcgaggcgcgccatgatatatttgtcgtacagtccgcttacgacggcggccagagccgccaccgcgatacagagtatccagacgttgtgacggaaatcgaccccttcgcggcggctcgaacggctcagcaggaagagcgagaggagggtcagcacgacgccggtccactggcaggcgttgagccgctcgccgaagatgagcatggcgccgacaagcaccatgacggggcgcgtggcattgatcggaccgacgatggtaatcggcaggtgcttcatggcgaaatagccgaaaatccacgaagtgaggacgatgaccgctttaagcagcaccagtccgtgcgcccggagcgtgcccgaagaggcggccagtatcgtgccgtcgaaccacccgaagccgcactcggccgagacgatcatcggcagcaggaaaagcgccgagaagagggtgttgagcagcagcaccggaagcaccgcattccccgtgagggattgcttcttggccgcatcgtaaaagcccagcagcgcggcggaggtgaaggcgagggtcagccacataatgcgaattcggcggattgacgtccggttcggttcgggagcgttcggcggttcgggttacagacggcccgtctaccggatttcgtcgctgtaaaccgcgcccggaaggtcgtggaggttgtagcgcgacgccatcgacatgccgtaggccccggccgacttgagggtcagcagatcgccgcggcgggtcttgcgaagcgtgacgttttcgtcgaatacgtcggtcgattcgcaggccgtgccaacgatggtgtacttttcgcgcgcctcgtcttccgaggtgatgttttcgatgttgtggtacgaaccgtaaagcgcgggacggatcagctcggtcatgctggcatcgacgatcaccagcttgcggcccgtggcggtggtcttgttgaaaagcaccgtcgtaatcagctcgccgcactcggcgacgatcgaacggccgaactcgaaatgcacttcgcggtcgccgacggcgaggtggttgtgcacgatcgagaagagcgacgcgaagttgggaataggctcgttctcaggcacgtcgtaattgacgcccaagccgccgccgacatcgacgaagcggaacgagaagcccagcttttcgaggttctcgacgatgacgttcaccttgttgcacatgttctcgaacacatgcagctcgcggatctgcgaaccgatatgcaggtggatgcctacgatccggatgtttttgagcgatttgatctccttggcatgctcaagcacctcttcatatgaaatgccgaacttactgtcggcctgaccggtatcgatgcagtgattggtcttgggatcgatgtcggggttgatgcgcagcgccacgtcggtcttcttgccggcctcgcccgcaagccggtccacgagttccagctcctcgatcgattcgcagttgatcgccatgatctcctgtccgatggcgtagcgaagctccttgtcgcgcttgccgacaccggcgtaaacgatacccttggggtcgaatccggcttcgacggccttgcgcagctcgttgccgctcgcgcagtcgatgcccagcccgtattcacggataatagccagcagatggtcgtcgtagttggctttgatggcgtaatgcaccttgtagccgtactttttggactcgtagacgacgctttcgagggtctggcgcaacagcgccgtatcatagagatagaagggggtttcgtagccccgaagcttttgtgcgatttgtctgctcagcattttatcctaacttttacctgattgaagttgcaaatataagctatttggtttatttgagcaaatccgcgattattccggcggccagcgtgaggctcgcaaggccgttgagcgtgccgaaagcgatgccgatattgcgctggcgcgagggcgtcacgagcaggtgttcgagcaccagcaggcccgtgaaaatcccggctccgatccagaaccacgccgaaccggggcagcaggaggcgaaccacaacagggcggcgacgctcacggcgtgcaggccgcagctcaacgccagcgccgtgcgggccgaaaagcgcgcgggaatggagtgcaggcccctttcgcggtcgaaggcggcgtcctgcagggcgtagatgatgtcgaagccgccgcaccacgtcatcaccagcagcgagaggatgcagggttcgagggcgatacgccccgtgacggcgatataggccccgacgggcgcgatgccgagcgaaagccccagcaccagatgggccagcgcggtaaagcgtttgcagtagctgtagaacagaatgatgaacagcgccacgggtgacagcagggccgtcagcaggttgatcgtcgaagcggcggcgatgaacagcagggcattgaccgccacgaagcgaagggcatgccggggcggaatcacgccggcggggatttcgcggcccgcggtgcggggattttcggcgtcgatgcgacggtcggcccagcggttgaagcccatggccgtattgcgggcgaagaccatgcagagcaggacctgcaccgcgcgcgtgagccaccacgcagcgtcgtgcgccccggcgggcagcgtcgcataggcgtagacaaagccgacggcggcgaaaggcatggcgaagatcgtatgggcgaacttcaccagcgaaaggtatttcgatacggtattcatgcggaaacggtgtttgcggctgcaaagatagcgaaagccgagggcaatcgcaaaacgagttcggattgccgggacgggccggaaaagcggggcggcaccggcgcgacgaaaggagaaaatcaggatcgcacgattttccggcggggcagggcggacgcatccccggaaatccaaaataattcgtatatttgcacacatttttagatgaatatatgaagaacatacgcaatttttgcatcatagcccacatcgaccacggaaagagcacattggcggaccgtctgttggaaaaaaccaacaccctgaaccagcgcgaaatgcaggcgcaggtgctcgacgatatggacctcgaacgcgaaaagggcatcaccatcaagagccacgcaatccagatggaatacaaggcccgcgacggacagctgtatacgctcaacctgatcgacactccgggacacgtggacttctcgtacgaagtttcgcgcgccatcgcctcgtgcgaaggcgcgctgctggtggtggacgccacgcagggcattcaggcgcagaccatatcgaacctctatctggctgtgggacacgacctcgaaatcatccccgtactgaacaagatcgacatggactcggccatgatcgacgaggtgaaggatcaggtgatcgacctgatcggatgcaaagacgaggacatcctgctggcgtcgggcaagacggggctgggcgtcgaggaggtgctcgaagcgatcgtacagcgcattccggcgcctgagggcgacgagaacgcaccgctgcaggcgctgatcttcgactcggtgttcaacccgttccgcggcatcatcgcctattaccgcgtcttcaacggccggatccgcaaaggcgagcacgtgaagtttttcaacacgggcagtcagtacgacgccgacgaggtgggcgtgctgaaactcaagatgcagccccgcgacgagatcaaggccggagacgtggggtatatctgctcaggcatcaagacctcgtcggacgtgaaggtcggcgacacgattacgacggtgacgaaccccgcgcgggaagcgatcgccggattcgaggacgtgaagccgatggtcttcgcgggcgtctatcccgtcgaagccgaccagtacgaagacctgcgcgcgtcgctggagaaactccagctgaacgacgcgtcgctgacattcgagccggagagttcgctggcgctgggattcggattccgctgcggattcctcggactgctccacatggagatcattcaggagcgcctctaccgcgaattcgacatggacgtcatcacgaccgtgcccaacgtgtcgtaccgcatcaccacgacgcagggcgacgtggtggaggtgcacaacccgtcgggactgcccgaagtgaccaagatcgccaagatcgaggaaccctatatcctcgcgcagatcatcaccaagtccgaatttctgggcaacgtcatcaaactctgcatcgacaagcgcggcgtgatgaaaaaccagaccttcatcacgcaggaccgcgtggagatcaacttcgacatgcccctttcggagatcgtcttcgacttctacgacaagctcaagagcatttcgaaaggctatgcgtcgttcgactaccaccgcacgggataccagccgtcgaagctcgtcaagctggacatcctgctcaacggcgaaccggtcgatgcgctttcgtcgctcacctatacggaccacgcctacgacttcggacgcaagatgtgcgagaaactcaaggagctgatcccgcgccagcagttcgacatcgccatacaggccgccatcggcgccaagatcatcgcccgcgagacggtgaaggccgtgcgcaaggacgtgacggccaagtgctacggcggcgacatctcgcgcaagcgcaagctgctcgaaaaacagaagaagggcaagaagcgcatgcgccagatcggcaacgtggaggtgccgcagtcggcattcctcgccgtattgaaaatggactaaacgaaccgaccatgaagaagaccatcatcgacctgttcgaaggctccgtggagaaatacggcgccaagacattcctgctggagaagaaacaccgggcgttcgagcctacgacctacgccgagaccaaggagctggccttggagaccggggccggactggcagcgatcgggattcgccccaaggacaaagtcgccatactggccgaagggtccaacgcatggatcgtctcggagctgggcatgttctacgccggggcggtcagcgtgccgctgtcggtcaagctcgaagagtcgaacgacctgctgttccgcatgcgccacgccgaagtgaaggcgctgttcgtatcgaaataccagctgccgaaaatccgccgcatacgcgccgagctgcccgaagtcaagcatatcatcgtcataggccacataccgctggagccgggcgaaaccgcgctgggaacgctccgcaggctgggccgcgactacctgtcgaagcaccgcgaggagttcctcgccatcggacgggggatcgggaacgacgactatgcgacgatcacctacacgtcgggcaccacggccgatcccaagggcgtcgtgctgacgcaccgcaactacacggccaacgtcgagcagtcgctctcgcgcatcgacattccgtcgtcgttccggacgctcatcatactgccgctggaccactgcttcgcacacgtcgtggggttctacatcatgatcgcatgcggcgccacggtggcgacggtgcaggtcggcgcgacgccgatggagacgctcaagaacattccgcagaatatccgcgaagtgcgcccgcacttcctgctgtcggtgccggcgctggccaagaatttccgcaagaacatcgagggttcgatccgcgccaagggccgcttcacggagcggctgttcaatctggcgctccgcacggcctacctatataataaggacggctacggccgggggcagggctggcgcgtcctgctgtggcctgcggtcaggctgttcgacgccgtgctgttccgcaaggtgcgcgaagccttcggcggaagcctgcgcttcttcgtgggcgggggcgcgctgctcgacgcggagctgcagcggttcttctacgccatcggcattccgatgtttcagggatacggactttcggaggccacgcccgtcatctcgaccaattcgcccaaataccactggcaccgtttcggctcgtcgggcaaaatcctgattccgctcgacctgaaaatcgtggacgaagcgggccgggaggtgccgcgcggggaaaagggcgaaatcgtgatccgcggcgaaaacgtaatggccggttactggaagaatcccgaagcttcggccgagaccgtgcgcgacggatggctgcacacgggcgacatggggtatgtctcgaaggacgacttcctctatgtgctgggccgcttcaaaagcctgctgatcgcttcggacggagagaaatacagccccgaaggaatggaagaggcgatcgtggacaaatcgccctacatcgaccagatcatcatacacaacaaccagagtccgtttacgggtgccatcgtcgtgccgaaccgcgaagcgctgcggcgggagctggacagccgcgggatcgcgggcgaaaagcgggcggagacggcggcggagatcctcggcggcgaaatcgaccgttaccgggccggcggcgtattcggcggggagttccccgaacgctggctgccggcgggactggccatcgtggacgaaccgttcaccgagcagaacgggctggtgaacagcacgatgaaggtcatgcgcaacaaggtggaagcgcatttcggcgaccgtctcgattacctttacacgcccgaaggccgcagtctcaaaaatgcgaaaaacctcgcatcgctgaaaaaaatcgtggcgtaaaggtaaatttaccgccccgaaaccttgaaaaatcgaaaaatgcggagtatatttgtactccgaaatgcgggagtagctcagtggtagagcatcagcttcccaagctgagggtcgcgggttcgacccccgtttcccgctcataaagccctgcgaaggagggcaaacgtgcaaaaaccttgtgtatcgacgatacgcaaggtttttgcatttccggaggtgactgcaagttcccgacgagatccggtttcaaaccgacgccatgcaaacaagggaacgggagcctgtctgcctgcgcggcggccttgccgggaccggcggtcggtttcttgcgcggaatcggtttcgaaaaaaaacttcgcggtttcgtttcgaatcccggatttttttgatagatttgtagacggaggggacggcaaccccgcgccgggcggagaaaacagcacaaaaacacaagcatatggaacaatacattttggcattggatcagggaacgagcagctcccgtgcgatcgtattcgaccgcaaagggctgattcgctcggtcgcgcagcgcgaattcacccagctgtttcccaaaccgggatgggtcgagcacaatccgcacgagatatggtcgtcgcaggcgtcggtcatcgccgaagcgatcgccgcaatcgacatcaacggactgaacatcgcgggcataggcatcaccaaccagcgcgaaaccacgatcgtatgggatgcggagaccgaagagccggtctacaacgccatcgtctggcaggaccgccggacctcggagtactgcgaccggctgaaagccgacggcaaaaccgaattcatccgtgaaaaaacgggactgataatcgacgcctatttcagcgcgacgaagataaaatggattctggacaacgtcgccggagcgcgcgaacgggccgagaagggcaagctgatgttcggcacggtcgatacgtggctgatctggcggctgacgcgcggcgaggtgcatgtgacggacgtgagcaatgcgtcgcgtacgatgcttttcaacatccatacactgcagtgggacgaggagctgctggaactgttcgatattccggcttcgatgatgcccgcggtgaagtcgtcgagcgaagtgtacggagcgaccaagaccacgattttcgcgcacaaggtgcccatcgcgggaattgcgggcgaccagcaggcggccctgttcgggcagatgtgcgtcgagccggggtcggtgaagaacacgtacggcacggggtgttttctgctgatgaacagcggcgagaagccgatcgcctcggcgaacaacctgctgacgaccatcgcttggaagatcggcgacaaggtcgactacgccctcgaagggagcatcttcgtcggcggctcggtcgtacagtggctgcgcgacgggctggggatcatccgctcgtcgtcggaaatcgaagagctggcggcgtcggtgcccgacaccaacggcgtctacttcgtgcccgcgctgacggggcttgcggccccgtactgggaccagtatgcgcggggcgcgataagcggcatcagccgcggcacgacggcggcgcatatcgcgcgggcggcgctggaagggattgcctatcagacgctcgacatcgtcggggccatgcagcgcgattcgggcatcacgctccgggagctgaaagtggacggcggcgcggcgcgcaacgacctgctgatgcagttccagtcggacctgctggacacgcgcgtcatacgccccagcgtgacggagaccacggcgctgggcgcggcttacctcgcagggctggcggtagggtattgggacagcatcgacgacatcaaacggcagtggcaggccgagcgtatcttcgagccgacgaccgaccgggcgcatatcgccgaggccgtggagggctggaaagacgccgtacggcgggtattgcgcagttaaaccaaccaatcggaaccgcatatggaaatcacatttttcaccaaatgcctgttcgagttcatcggaacgctcgtgctggtactgctgggcgacggggtagtggcctcgacggtcctgaaacaatcgaaagggtacaacggcggctggatcgtaatcaccatcgcgtggggactggccgtgatgtgcggcgtactgatcgcgggaccctattcgggcgcacacctcaatccggcgctcagcatcgggctggccgccgcgggttcgttcccgtgggcgtcggtgccgggatacgtcgcggcgcagctgctgggcggattctgcggcgcagtgctggtatacatctattataaggaccacttcgacgcgacggacgatccgggtgcgaagctcggcgtgttctgcaccatgcccgccatcatggacaagccgcggaacctcttctgcgaattcgtcggaacgttcctgctggtattcgtgattctggccatcggcaacgaacagaacacgcccgaaatagggctggggagtctggggagcctgccggtgacgatgctgatcatggcgatcggcatgtcgctgggcggaacgacgggttatgcgatcaatccggcacgcgacctgccgccccgcatagcccacagcatcctgcccatcagagcgaaagggccgagcggctggggatacagctgggtgcccgtcgcaggccccgtactgggcgcgctcgcggcggcgctggtctacggatgcgtctatatctgcggctgagcggagacgcgacacgatgaaaacgaccctcgacggggtcgtttttttgttgccgcacgtgtcaggtcatgcaaaaacggagtttcaccgcaggcggattttccccgaaccgagggaagagggaggaaatggcatgcgccgtccgggcgaatcctgccgaacccggacggtggggcggcagaacgaggcggcaagacggagcggcaggacggagggcaggacggagcggcaggacggtgcggcaggacggagcggcaagacggagcggcaggacggggcggcagga

SEQ ID NO: 12051 - DNA, 332581 bp, Unknown
  gut microbiota DNA sequence
tgatggttatattatttgcaaacataaaaaagaggctgcctaagttagaattgttagacagcctctttttgtatgtggaagcgctcccggaaccgccacgggcttatgtatttccggagcctgcccggttcctgtttgtcagtcaatagcctcccggccgagcggcctgatttttatgttccggtaggccacttcgtcgaaatggtcctgcagggctattctgccgcgcgggaatttcccgaaatccgcgccgttgaatttgtctgccccgttccatttgctccgggcgatcatccgttgccattcggggctgttcatatcgacttgtgcggttatgatttcgttgagtcggaaagtcaccttccccgcctgcttcaggatgcggacccgattccagcagcctgccggattggggcgcgaggtttcggatgcgtctatcaggtcgtacatcgccccggccagatgcgtggggtcgaaacggtcggcgcctgcccggttgtccagcacctgcatttctacgccggtactcgacgcccagccgtactccggaccctccttcactccgaagaagataccgctgttgccgccttcgctgattttccactccagccgcaggtcgaaatcttcgaattccgcatccgtgaccagatcgccgcgccccttttcgccgggcgggagcctgaaccgcagctccccgtcgcagaccgtccagccttcggcagctttgtcccggttgaaggtgtgccatccggcggtcgtgacaccgtcgaaaagcagtatccagccttcggcctcttcttcgggcgtcagcgtattgggcttttcggccggttgcagcgcttttggcggcaccgcttccggggtcgatgcggcttttgcggattcggacgtgcgtgcggccgtcaggccgaggatcagggcgcctgcggcgagcagggcgtatttcaagggtttcatatgttcgggtgttcagaggttatgtaacatgccccaagcggcgagcagtgcgaggtaaggtcccagttcgcggcgcaactgttcgacggcccgctgcttgtagcggttcaccgatttgacgcttacctgcatctcttcggctatttcgtcgtaggtgcgcccttcgagagcgcttttcacgaaaaccgtgcggtagttttcgggtagccgttcgagtgtccggtgcagcagggcgtacagctcttgggggccgtacagcgcgtcgggcgacgaagcgtagaccggttcctgacgggcgcagttctccatgtaccccagttcgtagagccggtgcttcaggtggttcagacagcggttcttgacggcgctgtgcaggtatccgcccgccgtgccgtcccgcagttccatttcgggcaggcggtcccacagggcggcgaagatgtcggccacgatgtcctcggccgcaggcatctcccggacgaagcggaaggcgtacagacatagcggggcgtaatacgcctcgtacagttcgcggaagagttctttccccccccctcgttgtccgccgtcccggtgatatgtcattcgtcgtggaattttccgagtaaaattagggattaattcggtgcgatgcaatccgaatatgctatttttcggattttttgaaaaaaagtcggctgagctgtccttttttctggcgcgggttgtattataagaaaagaacgatcccgaatggagcgaaataatacgaacctgcctgatcccgaactgttgctgcgctacctgcgcggtgaacttcccgatgccgaaaaaacggccgtggagcggatggccgccgccgatccgcggctgtcggacatactcggcgacatgcgccgcgccgaagcgctttcgcaggacctcgtccgcatggaactgctcgacgccgaagccggattcggccgcgtgcagtcgcgtattcgtgcccgcgcccgtgaaagggttttccggcgcgccgtgcgctgggcggcagtactgatgctgccgctgttggtcagctcattggttttcggttggctttattacagagaacgtatgcctgaggagcttttcgccgaggttgcaaccccggccgggacggttatccgctacgacctgcccgacggttcggtggtctggctcaacgccggaagccgcctgcgctacccggtgcgtttcgcgggcggcaaacgcgaggtcgaactccggggcgaagcctatttcgaggtcgaagccgaccgcaaatcgcctttctatgtccataccgacgccggcatgagcgtctatgtctacggcacgtcgttcaacgtcaacgcctacgacgacgaacccgcgatccgcacggtgctcgaaaagggccgtgtgaacgtcgtcgcccccgaccgcacgacggtgcgcatcgagccgggcgagcaggtggttttcgaccgtaggacgggtgcgctgacctgctcgcaggtgcgcgtcgaggatgaatgcgcatggcgcgacggacgactggtgttccgcaatacgcccctcgacgaagtgctgcaccggctggcgcggcattacaatgtcgatatcgaattccgcaaccattccgacgaggtgttcagataccgcgcgaccttccgcgacgagaccctcacccagatcttcgactacctgagcgcttcggccgacatccgctggcgcgtcgtggctcccgaacggcgtgacgacgacagctacacgcgccgccgcatcctcgtcgaacaattttagaccgaccccgaacctgcttctgcaaatactaacctatgatgaaaccttcgcctatggaataaatcccgacgcttttcttggaaaacaggaggaacggctgcaaggcagccgctccccggacttgccgcggcgtgtcgccaaaccccgccgcggacgctaacatcagtttatcaaatccaacaaacttcagttatgtgcaaagatatgaaaaataatccttcatttattgcatttagacacaaatgtttctgcccgtcgggacccggtttgcggctgtggctgctgcttgcggcgctgtggctttgtccgcagctgctgccggcccagcagacccggagcggagtgcatcttacgcgcacgaccgtcgacgaggtcatgaactatatcgaggagcactccgattatacgttcctctacaacgacaagaccgtggaccgtacgcgccgcgtttcggtcgataatgcggcgggcgacatccgggcgattctcgatgcggttttcgccgggaccgacgtccgttacgacatccgcgacaaccagatcatcctctcggagaagcggccgcagaagcaggcaggcagggacgacatgatcgcgggccgtgtcacggatcagaacggcgtcccgctggtcggcgtgagcattctggtcaaaggctccgcgcgcggcaccacgaccgatgtttcgggccggttcgtgcttcgcatcgaaccgggcgacgtgctggtggcctcctatctgggctacgaaagcgtcaaggtcgccgccgattcgcgcaccggcgtcgagatccgcatgcaggaaagctccaaggcgctcgatgccgtggtggtcacggcgttgggtatcaagcgctcggaaaaggccctgtcctataatgtgcagggcgtgaagggcgaagatatgaacatcgtcaaggacgccaacttcatgaattcgctcgctggcaaggtggccggcgtctcgatcaatgccagcgcgggcggcgtcggtggtgccacccgcgtggtgatgcgcggcaccaagtctatttcgggcaacaacaacgccctctacgtgattgacggtgtgccgattctcaacgtcaccggcggctcggtggacagcgaatacggacttgccggcggcgagggcatctcggacatcaatcctgaggacatcgagtcggtgaacgtgctgacgggaccttcggccgcggcgctttacggttcggcggcagccaacggcgtagtgctcatcaacacccgaaagggcagtgcggggaaacccaaaatcacggtcagcaacaatacgactttctccagcccttttatgatgcccgaattccaaaacacgtacggcaacaaaatcggcatctacgccagctggggcgaaaaactcgcgaagccctcgtcgttcgacccggccgacttcttcaacacgggtgcgctcgtgcagaacaacgtctcgctctcgacgggcaacgaccggcaccagacctacatttcggccggtacgaccaacggcacgggcattcttcccaaccacgaatattcgcgctacaatttcacattccgctccgtcaccaaactttggcgcgaccgcctgacgctcgattacggcggcagctacatcatccagcgcaaccagaacatgtcggcgcagggcaagtacttcaatcccctgacggcggtctacaccttcccccgtggcgaggatttctcgaccgtgcaggcttacgaacgtttcgacacgggccgcaacatgtttctccagtactggccgtggggcgatcaggccatgaacatgcagaacccctactgggtgcagtaccgcaacatgcgcaccaacaaacgcgaccgctacatgcttaacctcaatgccaaatatcaggtgaacgactggctcgacatcgcgggccgcgtgcgcatcgacaacaccgtgggcgagaacgaaaaaaagtactgggccagcacgatccagctcttcgccggcgagaacggcagttacttcgccaacaaacagcatgtcaagctcttctacggcgacgtgatcgccaatgtggacaagcgtttgggcaaggacttcacgctggcggccaacgtgggcgctagctggtcgcgcgaacgctccgatctggtgggcggcggcggtaagctcgacattgccaacttttttacactcaacaacatcatcaaggagtaccgcacgctggaacagaaccggaaacattcgatgctcaccgtttcggctttcgccaacctcgaactgggctggcgcagcatgctctacctgaccgccacggcccgcaacgactgggcgtcgtcgcagagcggcaccgagcagttgtcgttcttctacccctcggtgggcctttcggccgtcgttaccgagatggtgaagctgccccgctggatctcgttcctcaaactgcgcggctcctatgccgaggtcggctcgccgcttccgcagtacctctcgtcggcaacctaccagttcaacagttcgacgggttattacgaaacctacacccgcttcgtgcccgataagctctaccccgaaatgacccgttcgtgggaggtcggcatggatctgcgcctgtggcaggagcgcctgaccctcgacatcacctactacaagtcgaacaccaacaaacagactttccagattcctatttcgggcagttcgggctattcctcgatggtcgtgcagtcgggctgcgtgcagaacaagggcgtcgaggccgtgctgggcgtgaagctccggtcgggcgatttctcctacaacgcgtcgttcgcctacacgctcaaccgcaacaagatcaagtcgatggtgccttactataccaccctcgacggacaggtcggctcgttgaaccagatcaccaaatccaatatcgacggcggagccgcgtcgtttatcctccgcgagggcggcacgatgggcgacctgtggaccaagaatgtcatcaagaaggacgaggacggcaattacttggtcaatgccggcggcaaactcgaaatcgccgcgctctcgcagaaggtcggttccgtccttcccaaatacatgctctcgatgaacaacgacttccgctacaagggattccgcgccggtttccagctccatgcccgcgttggcggcaaggtgctttcggcgacgcaggcctatctcgacggttacggcgtgtcgaaagcctcggccgcagcccgcgacaacggcggcgtccccgtcaatcagggcaaggtggacgccgagacgtggtacaccacgatcggcaccggcaaggtctattcgcactacatctacaatgcgaccaacatccgcctgcaggaggcgtcgatcggctatacgctgcccaagcggtggttccgcgacgtctgctcgatcgacatctcgctcgtgggccgcaacctgtggctgatctactgcaaggctcccttcgaccctgagtcggcctcctcgaccgatacctactatcagggcatcgacttcttcatgcagcccagcctgcgcagctacggtttcagtgtcaaactcaacttctaacacgaaattcccatgaactttaaactaggcatacgtcttctggctttcgcggcggcgctctgcatggctgcctgtgacttcgaggacatcaaccacaacccccacgaaccgacggacaaggacctcgaacccgactattacggcacgggcctgctcttcatgcagatgcagaattacgtgattccggtcgagaagaaccaatatcagctctgcgagaacctgatcggcgacaccttcggccgctacatggctcccaccaacgacggctggaagcagaaccacgcgactttcaacgcgtcgctggcgtggctcaactcggctttcaacaacgtccttcccaacatctactccgcgtggttcaagcttcgcgcactgaccggcggcaagggcgagcagttcgcttgggcgcagctgctgcgcattgcggccatgcaccgcatgaccgacaagtacggcccgattccctactccgaagtcaccggaaactcgatcgccgtggcctacgatccgcaggatcaactctacaaacggcttttcgacgatctggacgacgtgatcgacgagctgaccaacttcgtgcagagcaatcccggcctgaagcccatggagcgttacgatctggtttacgccggcgattacgccaagtgggtcaaattcgccaattcgctcaaactgcgtatggccatgcgtatcgtgaacgtggaacccggctatgcgcagcagaaggccgaacaggccgtgtcgcatccgctgggcgtgatcgagacgcaggacgaaagcgccttcatctccctcaaacagaacccgatctatgtctgctggaacccttacagcgatacgcgtgccgctgccgacatcgtcagctacatgaagggttacaacgatccgcgcatggagaaatatttcacggcttcgaccttcaaaggcaatccgtgggtcggcctgcgttcgggcatcaccgtgcccaaaaaagactgggcgctggcctatgcggctcccaatttcccggcctccgacctcagcctgatgtggatgaacgccgccgaagtgtcgttcctcagggccgagggcgcatggcgcggctgggcgatgggcggcacgccggaattcttctacaagcagggcatcgaacgttcgttcgaacagtacggactttcgggggcggacgactatgcgaacgattcgacgctgaaacccgccgattacgccgaccccaacaaggactacagctacagtatcaaggcccggaccgacgtgacgatcaaatgggccgaggacggccgcgagctggagcgcatcatgacccagaagtggatcgccatctacccgctgggacaggaggcgtggagcgaacagcgccgcacgggctatccccgcttcttccccgtggtggtcaataacggcggcgacaacgctctctcggagggcctcgcgcgccgcattccctatcctccggccgagcaggagcacaacggcgacaactacgacgcggccgtgggcctgctgcacggtcccgacgattatgcgacccgcctgtggtggaatcccgaacagtaaccgttaaaaatcagagaaagatgaaatacgctattataagaagaggaattttcacagttctgggtgcggcggttttcggcggcgccctgctggcggccggatgcagcgactggaccgaatcccggcccgaattcatcgacaagccgggtcatacggcccgatattacgccagcctgcgcgactacaagaactcggaccacgcccgctatttcggctggtatgccggctgggtgggcaccggcgcccgcatgtccaactcgctgcgggggctgcccgacagtctggacatcgtttccttgtgggagaaccagaccaatctcgaccgcaaccgcatggaggacatgcgctatgtccagcaggtcaagggtaccaaggtgctcttcaccttcatcgtgcgcaactgcggcgacggctgtacgcccgccgaatacgccgggtcggtcgaggagaagagcgccttctggggtttcgtcgaaaatgacgacgcggcccgcgaagcggcctgccgcaaatacgccaacgcggtctgcgattcgctgttcaaatacggctacgacggcttcgacatcgacttcgagccttcgtacggctattcgggcaatatcgccatgaaggcttcggtcgatcccaaaccgatgctctggttcgtgggcgagctttcgaagcgcatcggcccgctgtcgggttcgggcaagatgctggtgatcgacggcgaaacgtggtcgtcgcccgccgagctggctcccgtctacgactacatcatcgaacaggcgtacgaggcgcgggaaccggaggaccttcaggatcgtttcgaccgctatatcaagcacttctcgccccatcgcgacgcggaggagctggcccgcatctggtttgtcaccgagaacttcgagaaacaccgcggcacgggcggcgtggcgtatgtcgagcaggacggcacgacgatgaattcgctgctgggcatggcccgctggaatccgacgctcgacggccgcacagtgcgcaaaggcggctgcggcgtctaccgcatcgaaaccgaatatgcgctcaacacccgtaagggaacctttccgtggtcgcgcgaggcgatgcaggcgatgaatccttcgaataactgataacattagctttgtagagtatgaaaaccagaaataatatattccgattaatgtgcatggcctccgcgctgttgctgctgggcggctgcgacgatgcgaaatatggggtgatccgccatgcggtctacttcaccgacgccgaggattcgccccagaagagcgtggtcatcgaggagagcggcggccggattcccattacggtccgctccgtgggtcgcgtcgaaagcgatgtcacggtgcattgcgtggtcgatcccgccgtgctggacgactataacgccaaggcgggcaccaatttcgcgctcctgcccgaagcgatttacacggtgcccgaaagcttcctgattccgcagggacaggctgtctcgatcgccggagtcatcgacgtcggggcctataccgagcagatgaagaattcagggtcgcagttcgcccttccgctgcgtcttgtcagcggcgaaggcggcccgcagctgctggcgtcgtccgagtgtctcgtgctgtcgctcgatcaggtgatcgtcacctcggccatcgtgttgagcaaggcgaaggccccttttatccacctgcccttctcgcaggcttacgagctgagccagtggacgctggaattccgtttcaacaagtcgatgatgaccaacaccgtcggccagaacatcgcctttggcggcgacgacggcggttacgaagtccgcacggccgtgggggcttcgcacaagttctatgcaaaggtcaataccgtcgagatgtccacgcccgcgacactcgaagccaaccgctggtaccacggcgccgtggtttgcgacggcgtgacgatcaacgtctacctcgacggcgaactggaaatctccaagcctgcgccgggcggcatccagaagttccgcgcccgcttcgccttcggcaacggtttactgatggccggcgagaagctgatgggcagcgaatgccgtctttggagcgtggcccgcacgcagagtcagatcaaattcaacatgtaccgcgtgaatcccgaatcggaggggctgctggcctattggcgtttcgatgagggggagggctgcgagttcacgaatctggccgatcccaaggctcccaaggcctacctcgccaagtcgatcagcgcggcagcccagccgccctacaccggtgagccggagtgggtgcacggcgtgcgctcggacgaaaactaaccgatacgatgcgtccgggcataaggcccggatgcatcgcaataaaccaaacacatggaacttacgaaaataatttctccgctgctggcggccgggaccgtgttgcccgccgccgcgcagccgcaggccgggacgacggcacccgaatcccgtaaacagccgcatatcatcctgatcgtcaccgaccagcagcgcggcgatgcgcttgggtgctgcaatccggcggtgctgtcgcccaatctcgatgcgctggcgcgtgacggcgtgcgcttcacccgcgcctattcgtcggctccgagcagcactccggcgcgcgccggactcctcacgggcatgtcgccttgggggcatggcctgctgggttacggcaaagtcgccgagcattatcccttcgagatgccgcagctgctgcgcgatgcgggttactggacgctgggtatcggcaagatgcactggacgccccagaatgccacgcacggttttcacgcgacgctgatcgacgagagcggccgccgcgagtcgccctatttcatgagcgactaccgcaagtggttcgcctgtcacgctccgggactcgaccccgacgccacgggtatcggctggaacgcgcaccgcgcggcggcctatgcgctgcccgaagagctgcatcccacctgctggaccggcgggcaggccgtggcggccatcgagggcttccgctccggcaaacccctcttcctgaccgtttcgttcgcccggccgcacagcccctacgacgctccgcagcggctggtcgacgcctacgacggcgtcgatattcccggtcccgccgtgggcgactggtgcgccggattcggacgcgcaaccgatccggagaagaatcccgacgccgcatacggcgatttcggcgccgcgtacgtgaagaattcgaagaagcactactatgcctccgtcaccttcatcgacgagcagatcggcctgatcctccgggcgctgcgcgcgaggggcatgtacgacgacgcgctgatttgcttcgtctcggaccacggcgacatgatgggcgaccaccatcattggcgcaagacctatgcttacgaaggttcggcgcatatcccctttatcgtgaagtttcccgccggaacctccggctgcccggctcccggtgccgttgacgaccgcgtcgtggagctgcgcgacgtgctgccgactttcctcgacgcggccggcgtcggaattcccgacggcatggagggactctccctgctgggccgcggtccgtggcggccgtggctcgatctggagcacgccacctgttacagcgacgacaactactggtgcgcactgaccgacggccgctggaaatacattcggttcgtgcatacgggctgcgaacagttgttcgaccttgagacggaccccgccgaactgcatgatctcgcgggcgggaagcgtcatgtctccgaactgaacctgtggcgtgcgcggatggccgaacatctgcgcgtgcggggcgaagagtgggtgcgggacggaaaacccgtcgtgcgcgggaaaacattgctgtatggtcccaattatcctgaaaattgattaaatttgattcgttatgcgaaaatggcgatatatcgtgccggtcgtcggtggctgcctgccgctggccgctgcggggcagggggcggccgaaaagccggcgtcccgtccgaatgtactgttgatctatgccgacgacgtgggtttcggcgacctgagctgtaacggttacggttcggtccccacgccccatgtcgaacggctggcgcgcgagggaatccgcttcaccaacgctcactgcgccgcttcgaccagcactccggcgcgctactctatgctgacgggcgaattcgcatggcggcggcccggaaccggcgttgcgcggggcgatgccgcggcgatcattccggccagttgttacacgatggccgacctgttccgcgactgcggctaccgcacggccgtcgtaggcaaatggcatctgggactcggctcgcagaccggtgcccagaactggaacgaagaggtgcggcccaatcccgccgatctgggattcggctactcctacatcatggccgccacggccgaccgcacgccctgtatcttcatggagaacggccgcggcgtgaacctcgatcccgccgatcctgtcgaggtgagttacgagcggaatttccccggtgagcctacgggccgcgataaccccgaactgctgcgcatgcacccctccgagggacacgatcagtcgatcgtgaacggtatttcgcgcatcggctacatgcggggcggccggagcgctttgtggtgcgacgagtatatcgctgacagcatcgcctgccatgcggtgcgctttatcggcgactgcgccgcctccggcgaaccttttttcctctactttgcgaccaacgacattcacgttccccgcgtgccgcatccccgcttcgccgggaagagcggactggggccgcgcggcgacgcgattctgtcgttcgactggagcgtcgggcgcgttctcacggcgctggacagtctggggttggcggagaatacgctggtgatcctttcgagcgacaacggtcccgtcgtggacgacggctatcgggacggcgcccgcgaactgctgggcgcgcataagcccggcggagacttccggggcggcaaatacagcatctacgaagccggaacgcgtgtgccttgcattgtgcgttggcccggagcggtacccgcgggcgtggtgacggacgcactggccgggcaggtggactggttcgcctcgctggccgcgatgctgggcgcgacgctgcccgaaggggctgcgcccgacagcgaagagcatctcgccacatggttcaggggcgggaagggccgtgccgtgctggcctaccagagcaacaacgagaatgtgacggtcaccgacggccgctggaagtatgtgcctcccttcaccggaccgcgctatgcgtggggtacgggcatcgagctgggcaacagtcccggcgaccagctgtacgacatgcaggccgatcccgaagagcggcgcaacctcgccgccgaacaccccgccgtggtcgaacgcctgcgcggagagctgcgaaaattaggtttccgatttaaaaaataactgccatgaccctttcttacgacaaaatcctgctgcgtgcggcgctttgcatgctgacgctgcttctgacgggtgcctgctcccggcgcggccccgtgctcacgttccgcgaggcggacgaccctacggccgatacgctcgccgactggtcgggcgtcgcttcgggcctgcatgccgcttggggcacgaccgacaagcgttacgcccgctccgtcgtgccctgcgccgcggcgtccgaatgccgcctgacggcatggcgcggcgaacgggtttcggcccagctggtgctgtggagcgccgacagcgtcggcggcgtggagtgccgcatcgggaaattccgctcggacggcgcttgtcttcccgccggaatcgcgcaggcccgcttcgtgcgttacgtgctcaccgacacgttcggtccgggctgcggccaccgcagggacggcgatttccctgtttcgctcgcggccgacatgctcgacacgctcggccgcttcgacatggatgcgcgcaccgcgcgtccggtgtggctgaccgtctccgtgccggatgacgctccggcaggcgtctaccgctcctgcgtcgaagtgacgggctgcggcgtgaaaagcctcgaacttcccctcgaactccgcgtgcaggagcggcgtttgccccgccctgcggagtggagttaccacctcgacctctggcagcaccctgcggccgtggcgcgggtaatggggctcgccctgtggagcgacgcgcacttcgacgccctgcgtccgctggtgcggatgctcgccgacgccggacagaaggtcgtcacggcgacgctcaacaaggacccgtggaaccaccagtgtttcgacgcctatgaagacatgatccgctggaccaagggcgccgacggcacgtgggagtatgactattcgctcttcgaccgctgggtcggactttgcgccggggaggggatcgaccggcagatcaactgttactcgatgcttccgtggaacaacgaactgcactattacgacgcggcggcggaccgcatcgtcgaggtccgggccaaccccggaacgcccgaattcgaagcgatgtggcgccccttcctccgggatttcgaagcgcatctcgacgcgaaaggatggctcggcaagtgctgtgtcgccatggacgagcgctcgcccgaaaccatggatgcggcgatcggcctgctgcgcagcgcggctcccggactgggaatcgccatggccgacaaccacgccagctataagcgctataccgatctggacgatgtttgcgtgcagatcgactgccgcgtggccgacgaggacctcgcccggcgccgccgcgacggactgctgacgacctattacgtctgctgttcttcggcattccccaatacgttcaccttctccgagccgtgggaagcggtctatatggcgtggttcgccgcggcgtgcggctatgacggcatgctgcgctggtcgtataactcgtggcccgccgaccccgtgcgcgactcgcgtttcacggcatggcctgcgggcgacacctacctcgtctatcccgacgcccgttcgtcgatccgcttcgagcggctgcgggaggggattcaggattacgagaagatccgcatcctgcgcggcgagctggcctcggacaacacccccgaaggcgccgcgaaacgcgccgaactcgaagccgcggtacgtcccttcgaaatgcacgacgtctcgcagccgtggcccgaactgctgcgcaaaggcaaagagacgatcgcccggctgagcgaatagccgcggtatgcagacgaatcgggagaggacccttcggagtcctctcccgattttttaccgccttgcggtccgcactatgcggcggaggcgcccctctccgtcgttactgccgatatccggccggacgagggccgtcgtttcaaattcaaaaaacgccttacggttatccgtaaggcgttttttgaatttacattgtcatgcgggcgtgctggagtcgtgaattcgacttctcctctccctcgcggcgggggtatgaaagaatccgaatccggcatgctagtttttcggtgcgtcatgatccgtgaacggcatcttttcgggatttgctccccagctgcggttggggcgcggacccatttgcaggaagagcgttccgccctgctgcagctcttcgtgtgtgaaccacgggcggtcgatcggcctgccgttgagcgtggcggactggatgtatttgttttgtgcggatacatccggcgcttccaccgtaaaggttttaccgccgccgaggtcgattgtcgatttttcgaagagcgggcatccgatgtcgtagaccgggcgtccgggcgctaccgtgtagaagcccatggcgctgagtacgtaccaagaggccatctctccgtagtcttcgtcgccgcaataccccagcggaccgtctccgtaccatacgtccataatctgacggacccggcgctgggtcatccatggctgtcccgcgtagttgtagaggtagggaatgtgccatgtaatctcgttgccgtgggagtacatgccgatccatcccgtcatgtcggggtattgtttcagaaaatcgtatttctggtagagggggacgttggtttcgaacattgtctggagcttgtccgtgaatttctcccggccgcccatcagtccgatcagtccttccacgtcatgggggacgtaccacgtgtagttccagccgttgttttcggtgtagaactcccgtccgccctgtcctcccgaccagatcggatcgaaaggttcgatccagcggccgtcagccgtcttggggcgcatgaatcccgtcgcggtatcgaagacgttctgataattgagcgcccgtttcaggtagtattggtaatcctcttccttgtccagctctttggccaagatgctcatgcaccagtcgtcgtaacagttttcgagggtgatggccaccgattgccgcccgaatcctacctctttgacccattccggctggtcggagggcttggctgggaagaatcccttctcccagtacaccttgtcgagttcggttccccgccagtcgttcgtgctggggcgcgagagcatggtcgcttctttggagttgcgtttcatcgcctcgtaggcggtttcgatgtcgaaatcgcggtatcccttcatgtaggcgtcggtgatcgtcgccgtttcgtggcggccgatcatattgcggaaccctccgctgttgaccaaccagtcgccctgctgctgcatccggacgtaggagcgcatcaggtcgttctggatttccggctcaatcaacaggcataacgggaagagcgagtggtgcgatccccagttggagccgaccttgtagaagttatggccgccggtttcgtgcacctgtttgtcgaaccggctgtaatagcgtcctccctgttcggtcaggtcgatggattggctgcccagcatcacgcggtagagcgccgtatagaaaatggttttctgccgctgcgtgcctccttcgactctgattctgcccaaagcgtcgttccagattttccgggcgtcgtttttcgttttttcgaagtcccaatccggaatttccgccgtcaggtttttcttcgcctgctccatgctgatgaatgacactccgattttgaccatgatctcctcgtcgcgggatgtcctgaatgaaacgcaggcgccgatgcactcgccctcctgaaagtccttttcgcttttcgacgaatcgttccaagtaatggccgagctgaacggtttgctgaactctgcgtagtaataggccgtctgggtgctgtccaccgtctcggtggattcgatgcggttctctccggcgattcggatcgtccggttgttgttgatcaggatattggcctgctccgactgcgggaagcggaacttgtagaatgaagcgtgttgcgagacggtcatcgccgcgtcgatgtcgtaatcttcgagcagcaaccgggtgtaatagggggttacggtctcgaagtcgtgatcgaaaccggatgcgtattcttccgcttcgactgcgggtgcgcccgtcgtggccatgatctctgcgagcggtttggtggcgtaacggggcagcgcgcggatcgagaagccggagatccggtcggccagatatctgtcagccagcggcggatagggattctgcccgacctgtaccatgccgtggggcagctgggtcatcgagttggtggcaacgagcaggtggccgatcgttcccgtgttgggattgacgtaatcgacaggctcttttcgggccgattccgcgcacgagaccagaccggcgagaagaattgcaagacaatatgaaaagagtggtttcataaatagggttttagttgagttcaggtcttgggcttagggccttttttcccggatccggtcccggatgaactggccgtagggctgtttgacgttggtgaaccggcatgctgcgcagctgcccggaacgagattgtccgccgtgccttcgccgtccgagaagttccatgtcgcccagctgactctctgcttgcccggattgtcgccgtccatgatttgtatccatcgctgcgaggagtccagatcgtatttccccgaaccgttgtactcgcaggtgccccattcggtcacgaatacgggcagacggtcgaggtagttttgcaggttgtcgtagttgtagtgcgaagcggcgtaaaagtggtaggtgtagaggatgtttttgtacgtgagcgggtcttttaccacgtcggtgaagtctgcgctccacttgggcgtgccgcagatcaccacggcattcggagagttggcccggatgatcggaataacccgttccgcgtagcgtttgaccacggcccacgtcacctcgtcgccgttgggttcgttgcagatttcatacagcacatggggtttgccggcgaattttttggacgcccatgcgaagaaatcgtccgcagtgtcgtatttggggtcgttcggatcgcccggatggagtacgtgccagtcgatgatgcagtacatgccgtatttttcgcagtaaccgaccagcgtctcgattttgctgcggaacttgagcggatcggtgttgtagccgttctcctcggcgtagagcgcgagccggacgacgtcgcactgccactcttcggccagcgaccggtaggcctcctcggtctggcatttgccgaaccattgaagtccgtgcgtgctcatgccccggagttggaccgctttgccgttttgggcgcataactggatgccggagactttcagggcgccgtatttttcgaccggggtctttcccgcctgcccgtcttcgttgttcggggagcaggaaaatgcggctatcagcgctatcagtgacagcagtttgtagtttttcatgggaatctattcgatgtttaggttaatattgagtaaatccttctccaaggacgatccgccgaccatgattttgtagtctcccgcttcgacgacccaatccatgtcgtcgttatagaaggccagtttcgaggccggcaatgtaaaatcgaccgttttcgtctcgcccttggccagtttgacccggcggaaatccttcagctccatgaccggccgcgtcacgctgctgtacaggtcgcggatgtagagttgtacgatctcctccccgtcccggtctccgcagtttttcacgtctacgctcaccgtgaccttgccgtcgccgggaatcctgtcctgagacagcctgaggttggagtaggcgtagcgggtgtagctcaacccgtagccgaacgggaaaagcggcgtgctttcgccgatggcataggggtggaagtacatcgacggtttgtggttgtataccatctgcagctgtcctacgtggcgggggacggttacggggagcttgccgctggggttcgctttgccgtaaatgatctccgctaccgcccggccgccgaagctgcccggctcccaagcctcgatcagcgccgcggcgtgtcgggcgatccactccacgcccagttggcggccgttgatcaacaccacgatggtgggagttcccgtttcgataatacgctgggcgagttgctggctgagtccggccagcgcgatgtccgaccggtcgcaatcctcgccgcaggtcttgtcgccccagttgttgcgcagcgaatgttcgccgattacgacgatggccagatccgatttccgtgcggccgagacggcttcgtccactttggaccggctcatcctgcggatgttccacccttggtcgataaaggtgaatttcgaggccggcgactgctcttcgagtccttccagaatggtcgtcacgttctcttcgggctggggcagggcccagtcgcccaagatggtctggttgtcggcgttggttccggttaccaaaacccgcatggctttggacgcgtcgagcgggagaatcccgtcgttggtcagcagtacgacggatttgacggccgcctcgtaggcggtggcccggtgtttctcggtaaagacgctttttgagatctgcgccgtgtcggtgtagggattctcgaacagccccagtttgaacttcgcggtcaggattttcaggcaggcgcggttgacggcgctctcggatactgcgccctctttgaccagttcgatcaccttttcgtagaactggggaccgtgcatgtgcatatccatgcccgcatttaccgactgccggaaagcgtccttgttgtcggtcgccgtgcggtgcaggtcgtgaatatgctcgacgtccatccagtcgctgacgatgaaaccttcgaatccccactctccgcgcaccacgtcctccatcagccagcggttcgagtggcacggaatgccgttcaactcattgtgtgcggtcatcatcgagtaggctccggcgtcgatgcccgctttgaacggggggaagaatatttcccgtatcgtgcgctccgagaggtccgtgggcgaaccgttggttccgttgacgggctggctgcctcccacgaagtgtttcacgcaggagagcacgcgccccggttcggaaaagtcccggccctgatagccccggaccgatgccgcgcccattacggataccagataggggtcttcgccgaaagtttcgcccacgcggccccagcgcgggtctctggcgacctctacgttggggttgaaggtccattgcgacccggtggcgcgcatctcggcggccgtctcctcgcaaatccgctctacgagttcggggtcgaacgtcgatgcttgtccgatactggtcgggtagacggtgcatccggcgacctgcgcgttgccgtgaatggcgtcgattccgatgagcagcgggatttgcagcgggctttggcttgcgagtcgctggagataattggcctcctcggccgtcagcacatgcaggaaggagccgatcttgccgtcgcgggtcatctgctcgacgtcggccgtggtgatgcccggatagaatcctcgcgccgtgttgttgtgcagctcctcttccgtcagctctttttccgccgatttcatatgctccagacctacccactggcacatctgggccaccttctgttcgagggtcatacggctcatcaggtcttcggcccgcttctccgccggctgggcggggtccttgtaaagcggggcgtctccgcccgaacagcctgccagcgcaagcagcgggatgatataaatgatcgggtttttcatagatcggttgttttttcaggtattcgattgatgggatagtatttgctccggacttcggtcccggagatagtgatcactcttatgccggacggggtgtggcagagcggtttgcccgccgcggccgtcgtcgtcatttctatgccgttgtaattgccctgcgcttctccgtgcaggtgtcccgcgtagacggctttcaggccgccccgttcgaacagctcgaaatagctgtgtctttgactcctgccgattacgggatagccgtccttttcgtctatttcgtgcaggaaaaaggggtggtgggtgaaaaggatcttgacctttgcgtccgattttccgagctgctcttcgagccatgctttctgggcgggttcctgctccggatcgcagtgcttgatgtacgaggagttgatgcccagcagcagattccctttcagcgcgagcgcaaagcggtcggcgccgtaatgctctttgaaaacggtgcagtcgaccttgtcgccggagatcttctggtcgtggttgccgggaagacagacgaccttgatctgtttgtccagcccggagatgaccgagtcgaacgccctccactgctccgcatcgtcataccggttgaccagatcgccggtcactacgaccagatcgggtttcagccggttgattcgccgtacggcttcgccgcatgcttcgatttcgcgggtcatctccctgttgtcgctccagtaaccgaactgggggtcggataactgtacgatcaccgtcttcccgccttcgggcttcacccccgattcgaacgggttggggacgctgctcatggtgagaactatgtgcgctccgtctgcgatttcgccgtgacggagccacgctctgccgagggagcggccgttgagcgtgacggagccgatataacggttctccctgctcaaccctttggcctcgatgacgatgcgggcgccgcgttccgtggtcagtacggagcgttcgaattgcggactgacgaggtaataaagatcctgccccgcattgggaaagagacccaccgaggtgaagacgtaccacgcccccatcgcgccgctgtcctcgttgccgggatagccgcgctccagcgagaactgggtgtccctgatctgcgcaacgtactttgaagtcagatcggcccgcgagcagtgggtgaagatatacggagcgaggaatccgggctcgttgttcaggtcgatcagtttgcggctgaacccgtgttccagtctttcgaccgtccggcgcggccctccgcaaagctcggcgagccggtcgaactgatggggcgcgaaaagcgagtagacccatgaattcccctcgtagaaatattccacccacgagccgtatgtttttttcgggtctatggaaatccattggccgtcttccttccgtggggcgacaaaccctttgaagccgtcgctttccagcgaggtgtcgaacagcttttcccagctgcaggccctttgcgaaagcatccgggccgtctcatggtcgcccatgccttccgccatgagcgaggcgcaatagtcgttgtaggcgtattcgagcgcggcactgcaactcatcggcgatccggtttcgggctgccatcccagtttgaggtattcgtgtgaccgggtgttgagcgcgtggaatcggacgatgcggtatgcccgcgtccagtccactccctcgacacctttgagccatgcgtccacgatgacgttgtccacgtcgtcgccgccctgtttggcttcccattccagcgaactcgtgtaggtcggctgacatgccccggtgcgttcgaagcgttcgatgaaggagttgatgctccgcgccacgtaactctcgttgaggagcgtcatcagcggatattttgtccgccacgtgtcccatatgcagtagtggtcgtccatgtgcggcgtgtcggagtcggtatgggggttgtcgccggtgcggtcgcgggccatcagaaaactgtggtacagcgccgtgtagaagattttcttcgcggtttccgattccgtgtcgatctgaatcgagcttaggcgtctgttccacgtctcgcgcgccgcggcctttgctttctcgaagtcgtggcccggaatctgctcggcgaggaatttgcgggcgttggactcgctgcgcagcgatactgcgatcttcagcagtaccgtgcccggcgcatcgaacggaggaagtgcgattctggcatacagtttcccgtcgccgtcgtctgtgacggccaccgagcgcggcgcccggtccagcgcggcggcgaaatagactttgtagggcgctccgcttccgaatcctccgcggtagcttccccacccgccgatgattccggtttcggggtcgtatgagatcgctccgccgagaaatctgccgccgatttcgggtttgatatgctggggaatgttgtgggcgatgtcgagcaggatgttggcgtcttccgcagcgggaaagctgaaccggtagatcgcggcgttgtgggtcggggccagttccgtgcggatgccgtatctgtccagagtgaccgcgtaatagtacggcaaggcggactctcccgatttgggagagtcgtggccttgttcgtccgctgaaaatccgacctgcggcgagagcagtatctgtccgtaacgcccccatcccgttccgcttacatggagctgcccgaaaccgcggatcggctgcgacggatcgtatccgtcgtttccgcctccgggcgtttgcggagagggattgaccgacccgtggggcagctggggacctatcacgcaattgctctctccgcggtttcccataaacatgtccacgtaatctactggctgtacctgcgccgaagccgtatgcacggcaagagccatgcatacggggatcagcgattggatgcggattttcattttcatggggtcttatcagtccgtctcggcggttacctcgatgttggcgctgcggctcgtcttgtgatacgcggtgctgacttcgagacggagtttgtagctgcccggttcgttgaacgtgcgggagaactgcgttccctccccgactttgacgtcgtccagataccatacgcccgtcgtgtattgcgagggtgcgaactggagggttatggtcaggtcttcccctgccgtgacattgtatacggcgggattgcccgaaggccactgtccaaggatcgtggggaacgtttcctcggagatggtcgggtcggagtgctctttttcgcaggaaattattatcagcggcagagccagcagcatcaataacgctatttttttcatcgttctctttttattattttaataagtactgtttttgtcccaccataccggcttggtccagtcgtccctgcctccgagacgttcgatggcttcctgataattgaccgcgttgtaaaggctttcggagatcggatagctcagccggcgcggcatcttcccgtccttcgcgtcgcgggtgtaggcgttggacggcggggtgagtttggggaatccggagcgccgccagttggcgaaagcttcgaacggattggtcaggtgaaggatccacagctgcatgttgatctgctccacttccgttccggccgtcagcggattggcggccagatagctgtcgatctccgactggggaatggccagcgccttttcgtcgtatattttcaggaatctgatggcttcgtttacgcctgtattgtaaagatcctccggagtttcggcgattgcggcgatgttccagcgcaccttggcttcggccagcaggaagcaggtctcggcgtaggtcatggcgatgccgggggtgttggttttcaggaatgcgttgttgagctggggatggcagcttcctccctgcacggctaccgattcattgtaggcctccttgatcgtgctgctggacgccatcagccaaggccagctgtcgtaccatgcgcgccctttgggaacgggtacgaagtagcgagtcgttcccgaacccgaaacctgcttgttgtacaattcgtcggtcaggtcgatgcgtttgaacggctgtttctgggcgtgggggtcgtcatggtagtagagccggctgattacgaaggtgcgcgggtcctttttgctcgatttggcgtattccggcttccagttgctgccgagtttcttgccgtcctcgaagttgatgttgtcgttggattcggcgcggccgtaccacatgtagttgaaaagggtctcgcacaggaacggcgagggcgagttgtctaccgactgccatatctgggccaatgcgttgcggcggtactctccgtgtccggtgtcgtaaatgtccgaaaaggagttgaacatggcgatgtcgccgctggtcatcacgccgccgacgctgtttatggccgcttccgcctgcgtgcgggccgtattggcgtcggcctgaaccaagcgcaaggccaaacgcagacgcagggagttgccgaaccggcgccatttctgatagtcgcccttgaagatcaggtcgccgctcgcactgccgccgtcggcgctgagggctttgacggccttgtcgagttcgttgaagaagtcgttgtagatatcctgctgcttgtcgtatttcgggtagtagtctttgctgaaataggcggtgccggcagcgaagtagggtatgtcgccgtatacgtcggtgagaatcgagaagaggtataccttgaagatacgggcgatggcgttgaggttggcgtagccggcatcaccgtccgtccggctcaccagatcgacgatgttcttgatctggttctggtacatgaagttccaaagactcttgatctgattgtcgtcgttgcggtattggccgccgtagttggtggcgtcccagttgccctgcatctgttgcgtcagcgggctcatgtatcggttgcaaatcgagccgatgtccatactgccccattgcctgagttcgatgccggtgagctggaagttcggattcaggttggcggatttggtaggatcgttgttcagatccttgtccacgcacgaacccagtagcaggagcgataagatgagcagtatattgattggtttcatgttgattagaatttgaggttaatgttgaatccgaaactgcggcgcgagggcagcgagccgtactcgattccttttccgttgccgttgttgtagttggagtcggggtcgatgttcggaacgttcttgaagatgatcagcgggtttcgggctacgaaagacagggtcagtccgtccagcgcctttccgatcatcctccgcgggaagctgtagctgagcgtcatttcgcggatcttgacgtaggagttgtccagcacgaagaactggggaatgttgttggagatgaagttccagtagctttccgggttgcagtagcgggtattgggcgcccagctgatcgtgccgtcgtcgtttttgacctgaactacgccatccaccaaatagcctcccgtaggattccatgctgccgtttcgagtccggcggcaaggcgtccttcttcggactggtaccagccgtcgcgtcctttgagcgtctttttggagcgtccggagctgtaggtgccccgcatggtcgaggtgtagaggtccgcgccgactttgatgtcgaagatggcgctcaggttccagtttttgaaccggacgttggtgtacatgccgccggtgaatttccagtgggcgttgcccagcgcggtgtagttgtcgctgaccgaggggatgccggtggtcggatcgacgatgatgtcgccgttttcgttgcgtttgtaatccttgcccatgatcgtgcccagctcttcgcccaccacggccatgacgcggacgcccgctgcgcctacccattcggcgttctccacctcgtacatctgcgattcgcccagcgagtgcaccttgttggagttgcgcgcgaagttgaagcccagatcccactgccagttcttggtctttacgggaatggtgttgagcttgatctcgatacctttgttggtgagcacgcccgaattgagcagagcggtcgaatagccggtgctgatggaggtgttgacgtggcggatctggtcgcggctggtctggctgtagtatgtgaagtcgagcacgatgcgcttgttcaggaagtaaagctcggtgccgacctcccacgaacgggtccgggtcggtttgaggtcgcggttgggtacggtcgagttggagatctgacccgacgatacgccgccgaccggatgcggatagagtccgtagttgagcgacatctgataggggctggtgtcgttgccgacttcggcccacgaggcgcgcaccttgccgaacgacaggattctggatacgctcgacggtaacagctcggagaagatgaagctgcccgataccgacggatacacgtacgtgttgttgatcagcgtggaggtgttgtcggccctgacggtgacgtccagataggcgaaattcttataccccagattgaccatggcgtaagccgaattgatctgtttctgatagggcgattcgacgatcgtcttgtcggagaaactgttgatcttcttgatgtcgggttcggccatgtccttgcccgtgatcgtggtctggaagttgtccacacggtagaggttcaatccggctgttccgaccagactcatgtttttgcccaagttggtgctgtaggtgagcaccgcgtccgcgttgatcgtgcggttgctgttggtctgggtcttcagatagcccgattcgtggctcggcgtggagatcggcgcgaagtcctcgaaactgaactcggtgatgtcggcgcctccggagagcttgaatttcagcttgtcggtgatcttgtatgagatgctggccgaggagatcagacggttctttttggaggtgttgctcatctcgttgatggtccagtagggattgacccggttcacgtcgccgttccagttgtagtattttccctcctcgtccttatagttgtcccgcagcaggtagaggtcgtaagtcgaaggcagcgaggagaggttcttgcccacgttgttgcggtcccctgccagagcgggacggttgttcactttctcgtagacgtagtttacttttacgtctacgtcgatcttccgcccgattttggtgttggtgcggaccgtgaacgtgctgcggttcatgcctgagttcggcacgatatcccggttgcgcagatcggaataggagagtctgatgccggcatccttgtaaatcttgttgagcgtgatgctgttgttggcggttacgccgagccggaagaaatcctcgatgccgtggttggagatggtgtagggacgcagtacgttgtcgaaataccatattttcagattcttgtcgatttttgggccccagcttttcgaggagttcgagcggtcgtcgatcgttccgtagatgcggccgttggatccttgtccatatatatattgtacgtcgtcgaagcgtgtcagctgctgctctacggtcgtggtggagttgatctccacgccgagggactgtcctttgcgggacgaggccttcttcgtggtgatcatgatgacgccgttgcctgcctgcgagccgtacagggccgatgcggcggggcctttcagtacggagatgttctcgatgtcgtcggggttgatgctcgaaatgccgtctcccaagtcatatccgccgtccttgttcgcactgccgaaattggtgttgtcgatgggcattccgtccactacgtacagcggctggttgtttcccgtgagcatcgagctgcctcggatctccacacgggaggagccgctggggcctccggcggtctggctgatgatcaggcccggttcgcgtcccgccagcgagttgatgacgttcagctcccgcaccttttcgaacgcttcgcctttgatgtctcctaccgagtatcccagcgatttgcgttcgcgggtcatgcccagcgcggtgaccacgacgtcttggatcgtctcgctggtcgtttcgagcttgatggtgaggttggtctgggttcccaccttaacctcggctgttttgtagccgaggaactttacttcgaggaccgatgccggggttgcctgaatcgtgaatttacccgcggtggttgtcgttccggtcgtcgttccctgaacgatgacggtggcgccgctgaccggattgtcgttttcgtcggtaaccataccggacacggttctcttttgggcgttaccccccccctgcccataggcgggactcccgaaaatcattgcgcaaaataacggaagcgcagtgtaaatcaataatagtcgaattttgttcatcgggttaataatttaagttggtttttataaaatgggtttttcgctcggattttttttgccgttagctaaataagactttttttgatttaaatagtgactgaatattgtatttgtatgaaacaaaattgcgatttgcttaattttgtaaaatatttataggtttgtataattatgtggcatatggagaggcggaattcggcttatctttaaaatattaaaaataaagaaatacagagacgactttgtcggtggaaaagatgggcggacggattcatatttggatggtttgtgtcgtgacggcgttctttgcggtcgcaagggcgaatgccggagcatatacgtttaaaagttatcaggtcgaaaacggcctttcgcagaacagcgtgctttccattctgcaggaccgggagggattcatgtggttcggcaccaaggacggactcaactgtttcgacggttattcgttcaaggtttatcgccgtcagagcggcgtggagacctcgctgggcaataatttcgtgttttcgctccgcgaggattcccacggccggttctgggtgggaacgggccggggcgtctggctgttcgacaaggagcgtgagacgttccgcaagtttcgcgtcgaggtttcgggccgggatatcctgaccgcgcagatcagtgcgatcatggaggacgatgcgggcgacatatggctggcgacccacgggcaggggctgttccggatcgacaggaatctggcgtgtacgcatcatttccagactccgcagattccgtccaatttcatcgggtccgtcgttcaggacaagatgggctgcatctgggtggggacggtcggcaagggaatcgtgatgctcgatcccgcgacttcgcgggtcgattcgctgcccgaatatgtttcggagggaatccgggacaaagtgatttcgagcctttattgcgacgacagcaacaatgtctgggtcggcacgtcgaaagaggggctgcattgtatcaacaaccgtgcgctgcaggtgcagcactacctcgacaaatcgattctgaacatccggtcgattacgcagtatctcgatgacgtaatcgttatgggttcggacaacgggctggtcatgctcgacacctccaccggcgaatatcgcctgaccaacaagtcgctcaacagcaatctgtccgacaattcgatcttctcgattatccgggaccgggagaattcgctctggataggcacctattttggcggcgtgaactattattccccgttgatcaatcgtttcgagcactattactcctgcaacgggcaccgtaatttcaacgggaacatcgtcagtcagatccggcaggacaagaacgggaagatctggataggaaccgacgacaaggggctgagcctgttcgatccgcagaccggacagttcgagccgagtgcgttgtgcggcaaggtcacctaccacaacgtgcaggcgattctttgcaatgacgactatttgtgggtgggcctttacaacaagggaatcaaccggatcgacttgaaaacgggccgcgtgaagaactacgtcagccgccccggcgacagcacgggcatcgacgacagcaacatattcgccatcacacggctctccacgggagagctgctcttcgccacgccgatcggggtgaacgtctataacgccgcagaggataactttacgcggattccgcagctggtcaatgtctttgtgaaatccatgctggaggactatctgggcaatctctggttcgccaccaacaacgagggagtctggtgccggaccaagggcggacagtggtgccgctacgtcaacaatcccgcggatgccggttccttgagctataatgcggtgaactatatttacgaagaccggaagaaccggctctggttctgtacggacggcggcggggtgtgcctgtggaatcaccgggacaagacgttccggacgatcgacgaaaaccgggggctgcccaacaatgtggtctacgcgatcgtcgacgatttgaacgggcatctctgggtcagcaccaacaagggactcgcggcgatcagcgaggaggactggaccgtcaggacctacaactcttcgcagcggatacagaacgtactctataattacaatgccgtgctccgggaccgggacaattatctctatttcggcggcgtgaacggcttcgtccgtttcgatccgcgggaaattacgcccaacgattttactccggcggtcaagatcacggcggtgagcgtcctgaaccgggatattcccgtatcggaggacggggataaacggtttgtgctcaaacgcaatcagtccaccttccggttcgacttcgtgctgttgagctacgtttcgccgccggataatctctatgcctataaactggagggctttgaccgggactggactacggtgcagggctatccgcacgcccattacatgaatatcccttcgggaaaatacaggttccgggtccgggccgccaatagcgacggggtctggaacgaccggagcgccgaagtggaaatcgttgtcaggcgtccgttcttttcttccgtggcgatgctcgttctctatacggcgttgctgctggccggaatctggttctgggtccgaaggttcaggtcccgcgtcaaggcgcggagcgagaagaagtttctggaagacaagatcaacttcttcaccaacatcgcccatgagatacgcactccgctgtcgcttattacggcgccgctcgaaaatatcatcaaatccggtgacggcaccgtgcagacgagagacaatctgcacgtgatcgaacgcaattccaaccgcctgctcgaacttgtcaatcaactgctcgattttagaaagatcgaggaggagatgtttatcctcaaccgggagaggacggatatcaacggtattgtccgcaaggtgtacgcgcagtatgagtacgaggcgcgggccaagaacatagacctgcggatcgaacttcccggagaggaggtcgggtgtcttgtcgatgcggaggcgattttcaaggtgatcagcaacctgatgtcgaacgccatgaagtttacccgcgacacgatctggctggagctgtgccgggacgagggtacggcggtggtccgggtgcgcgacaacggggccggactcgatgaccgggacgccggcaggatattcgatcccttcgtgcagggcagcaacaatacgctgagtgccggttccggaatcggactcgcgcttgcgcaggcgctggcaaggaaaaacaagggcgaaatcgagcttgaccgcagctgcggtgaaggcgccgtgttcgtactgacgcttccgctggccgaagccgctgcggacgaatctttggccaagcatgcgactcattcgttcggaggcgccgccgaggacaatcgccagcggattctggtcgttgaggataacgatgagctgcgggaattcatatgccgcagcctgagcgaccagtatacgatcgccagcgccgtcgacggagtgcaggcgctcaaggttttggataacgagggggtggtggacctcgttatctcggatgtcatgatgccccggatcgatggattggaattgtgcaaaaggatcaagaacgatccggcctattcgcacattccggtaattcttctctccgcaaaggtggaccagtcggttaagatcaaggggttcgaacagggtgccgacgtgtacatcgagaagccgttctcgatggaccagctcaaggctcagataggcagtgcgatcgagaaccggatgcggctgagggacaattttgtccgttcgccgctgcaatacctccgggagaaccacggcggctgcgacatccagttcctcaacaagctgaacgatacgattctctccaacctgaccaataccgaattctcgataaacgggctggctgaacttttttgcatgagcaggtccagcctgcataagaagatcaaggcgctgacgggactgactcccaacgactacatcaagctgatccggttgaacaaggcggcggagctgctttcttcggggagctacaaggtgaacgaggtgtgctatctggtcgggttcaacactccgtcttattttgcgaagtgtttttataaacagttcaacaagctgcccagttcgcaattggactgattgtgcgggcggtttgaccgccgttctttgtattgtgcaataacgttgtatatgtggcgcagatattggtaggcgcggatcgccgtgccggttatatttgcacggccgtctgtatgatggcgagtgtactaacctaaatgatctgtagatttatgaaaagaattgcattagcggcgtttttgtttgtgacgcttgttctttctgccgcagagccggcccctacgctcaggcgcaatacggtggacgaggtgatcgccgccatgacgccagaggagaaggtgctcatggtgatcggcaacaaaaacaacgaccggcgcaggtatatcggcgaaggctccacttggtattgcgcaaggctcggtctgatgccgaccgtcatgtgcgacggtcctgccggagtgcgcatgaaacccttccgggacggcgactctaccaaagcctattacagcaccgctttccccacagccaccgcgctggccgctacgtggaataccgagttggcggagaccgtcggcggcgcaatgggcagcgagacgctcgaatacggtgccgacgtgcttctggcccctgcgatgaatattcagcgcgatcccctgtgcggacggaatttcgagtactattccgaagatccgcttctgtcggggaaaatgggcgccgcgatggtgcgcgggattcagtcgcagggcgtcgggacttcggtcaagcatttcgcggcgaacaatcaggagagcaaccgcaagggtgtcaatgccgtcatcagtcagcgggcgcttcgggagatttacctgcgcggcttcgagatcacgatcagggaggctgcgccgtggaccgtcatgtcgtcctataatcggcttaacggggtgtacgcctcccagaaccgcgacctgctgaccacggtgctgcgggacgaatggggcttcgacggaatggtgatgaccgactggttcgccggcgacgacggggtggctcagatgaaggcgggcaacgatatcatcatgggcggtttccctcacggtcattacaaataccatcagcccgaaattctcagcgcgctttccgacaagacgctcgatgaagaggtccttgaccggaatatccgccggatactcggcttcgtcaagaaaacgccctcttatagggaatacgcctgctccctgaatcccgatcttgcacggcatgcgcaggtggctcagcgtgctgcggacgaggcgatggtgctgctgaaaaacgaccgaaatacgcttccggtcagaaaaccgaatcgggttgcgcttttcggcaagacgtcctatgatttcattgccggaggcacgggcagcggcgaggtgcattacggtcatgcggtatccctcaaagaggggttgtcgaacgtcgggttccggatctcgtccgccgcggaccgtttctacacccggttcgtcgattcggtgtttgctgccggcgggcacaagaaatatgcggtaacccgctctcaggaacctcggatcgacaaggctctcgtcgaagcggaggcgaaggttacggacatgggagtcgtgactctcggacggttgtccggagagggcgtggaccgtgaggaagagggctacttcaccctgaccgccaatgaaaaggagctgatcggggccgtgtgttcggcctatcatgcactcggaaaaaaagtggttgtcgtgctcaatatcggcggggtgatcgaaacggcttcgtggaaagagctgcccgacgcgatcctgctctcgtggcagacgggccagcagggcggcgctgccgtcgccgagctgcttcggggaaccgtcaatccttccggaaagctgcccgtgagttatcccgtttcatatgccgacgttccgtcgtcgaaatcgtttccggggatccccgccgacctgccggtcaactcctactataacgagggtgtgtatgtcggctaccgctattacacgacgtatgatgtccctgtgtcctatccgttcggttacgggctttcttacactcggttcgaatattccgatctgacgctgagcagcgattcgtttccgggacggatcgatgtttcggtaaagatttccaacacgggcaaagtcgccggaaaagaggttgttcagctctatctgacggcgccggcggtcttgcaggacaagccggagcgggaattgaaaggttttgccaaaacccggcttcttgcgcccggtgagagccagatactcacctttacgctcgatccccgctcgctctgctccttccgcagcggcatcagcagctgggtggccgaggccggaagctatgaggtgaagatcggcgcttcgtcgcaggacatccgtcagcgagcctccttttcgctcggaaaggagctggtcgtcgagaaactgcacgatgtcctcgcccccaatgtgccgattaaggatatggggacgacttcggcaaaagtccttggaacggatcagcctttcgaccactaccatgaactggattataaattcaactggcactggtaactctccttttccgttcgttcggggacggctaccggtttgcacgcttttttaagcgccttttcgtgtaatgtttcagacctccgaaaacctcctgtagctacctgcaaggggtttcggaggtctgtcgtgatattttatttccgagggggctttgcgtcctaatcggcgatctccccaagcccggcaggagtgatccgccgtattggtgccggccagctaaaatggtgcgcttcccgcttctttttttcgaaaaagaaaaaccgcatcagaattatttctgatgcggttttcagtgcccaggacaagactcgaacttgcacgaactaaacgttcactaccccctcaaagtagcgtgtctaccaatttcaccacctgggccttacctccgaatttcggatttcgggtgtgcaaatatagggtataaattttaatccgccaaattttcaggacggttaatggcaatttttgtgcttcttcggttctcttattcggaaacggggccgtttctccgccctgcggcggcaaggcgggcgggccggccgacctgcggtacgacgtgcatcgaatcctccggcggcgccccggaactactccccgtgctgcggggagaggacgagcatgcctgcgggtctccgtgcgtcttccggcagcgagacacccgttatcggcgcgatgcctgcggcgctccgggccggagcgggcgtgtaggtgcggcccgtaatcaggctcagggccttggcgagcatcggctcctcaggcccgaaatccaccagtctgttgttccagtcggggaccgcataatcgaccgcgagtccggccggattcaccgtctcctttttggcgttgtagccttcgaacgtgatcggggccagctcgtacgaatagtcgccgtcgtcgaacttgtcgatctccatgcccacgttcttgccgttggtcttctcgccgatcagcgtcacgccgatgtcgattcccctcaacccgttgatgaccgcttcgctcgacgacgccgtgctgcctgtcgtcagcacatagatgttctgcaggccgagggcgtactgcttgaggtccgccccgtagtagtcgccgtagctgaaattctcgtaaaagagcgctttctcccgatcgtacgtattgcccgtctgcttctgggttttcgccggatcggccatgcggctgtcgttgtagcggtaatactggaaaacctcgccgtcgcatttttcgcctgcgatgcacgtcgccagcatctttgccgaaatcacgtgtccgccgccgttgtagcgcaggtcgagtaccagatcggtgattcccgcgtcgcggaacttccggagggaatccagcaggtcgtcgtcatatgccgcgtcgaacccgttgtagaccatgtagccgatcttgtgctcaccctcctcgatgacctccgcgcggagcaccgggttcgggtagagccgttccgccgtgagggtggtctcttcacccgtttcccggactttgaagaggaccgacgcggctcccgaagggcttgtcagccgcttgtatacgggggtgtattcgctctccgaatcggcgatctcggcgccgtctatctccgagaagatcgtaccccgtctgaatcccgccctgtctgccggggagccgggatataccgccatcacgtaaaacccggccttccccgtgttggagaaccggaccacccccagccgggcgaatccgaacccgtattccgtctccttgcggacgccgtgattgacgccgcgcgttttcggccccgtggccgcgcggctccgggctttgcgggtgatgtaggagtagaggttgtaataattctgtcccgcgccgctcgtatacctctttttgtcgagggtgttggaggtcatccccagcagggtcctcgtcaggaagttgtcattgtcggcggcgtattcgatcgtcaggtcgcgggtcatctgcccatactcgccgttccatagatagcgttcagccagatagctgtctatcttgtcgttgtacgactccgtggttcccgtgccgccgtttccggtcgtatctttggcgcaggaactcgccgccagcgccgaaaggagcgctgcggcccatgcgcagtgaattattctcatctgtcgaatcttttgtccgctaaaggtagcgatatttttctatttcctcttgccgaagtccatttcgccgaacaaatagcccgcgccgccgatgcggtcgatcacgaacagcacgtaacggatatccacggctatgttgcggcagatcgtctcgtcgaaggccacgtcgctcatcgtcgaacgccatgtgcggtcgaagttcacgccgaccagctcgccccgtgcgttgaggatcggcgatccggagttgccgcccgtggtgtggttcgtagcgaggaagcagacgggcaccgtcgtgcggccgtcgatccgcgtggcccagcgtccgtactccttcgaggcgtggatgtcgcgcagcgcctgcggaatgtcgtagtcgtagatgtcggggttgtccttggcgatgatgccgtcgatcgtggtccggggcttgtgatactcgccgtcggcgtattcgtaccccgccacgtgtccgtaagccacgcgcagggtcaggttggcgtcggggaagaacgcccgcccggcatcccactcgcgcagtcccttgatgtaggcggtgtagagttcgttgagccgtgcgctgttgaggttgcgcagcgagcgggtgcccagcagccattcgatatggtcctgcatccgcttggcgcctctggccagcgtattgaccgccgtggtgtcggagccttcccatacgtcgctgaaaatccgttcggcgaaggcttcgggcgatcctgcggccgctgcgcccgcgaggaactccggcgcctgatactggaccggacagcggcgcgcgtactcgccgaagaggtatctgtaaagggcgcgctcggtcgcttcgcgctgtgcgaagaccgcttcggcccgctccgcggcggtgtagcgcttgggcagggcgtcgagggtctcgcgggtgatctcgcgtgcgaagtaggcgtccgcgatgcgggcgtattcggccttcaggtcggccacgacgctgcggtattcgggtttgtcctgcgcccacgccgcgaagtcctgctcgtaggcgcgcttcgaagccaccgttcccagccggttgatgcccagcacttcgccctgccatttcttccatgcgttggcgatcgaggcgtgtttggcggcgtagtggatgcgcagcgccggatcgctctgctgcgccgccgagatgatgtcgagacggcccgtgcggacggcgatttttgccgggtccgaacgctcggcgatgtaggccacggcgtcggagagaatgtactcctgcgtgttgccggggaagccgtaaatcatcgtgaagtcgccctctccgacccccgcggtcgagattttgaaatgccgcttgggtttgtagggcacgttgtcgggcgaataggccgcgggtttgttgtccctgccggcatagatgcggaacagcgagaagtcgcccgtgtggcggggccatatccagttgtcggtgtcgccgccgaacttgccgatcgacgagggcggggcggccaccagacgcacgtcgtcgaactgttcgtagacgaacaggaactgctggttgccgtaatacatctgctccacggcggccttgtagcccttgccttcggcctctgccttgcggacgatctcctcctgcgtctggcctgcggccagccggtcggtcacctcctccatgcggacgaggaatttcacgttgagcttctcgttgggcagctcttgggcgcgcgacatggcccagaatccgtgggtcaggtagtcgtgctcgacgctcgaatgcgactgtatggcgtcgtaaccgcagtggtggttggtcagcagcagtccttcggccgagatcagctcgcccgtgcagccgccgtcgaacagcaccacggcgtctttcatcgaagccttgttgatcgaatagatgtcttcggccgtgagccggaaacctttggcgcgcatgtcgtcgatgcgctgcgaaatcaggcttggaagccacatgccctcgtcggccgaggccgcgagtgcgaaaagcgaacagatgagggtaagcagtgtgcgtttcattattgcagaaatttttccaattcgacgtaaactttctggatcggcagtcccatgacgttgtagaacgaaccgttgatcttctcgatggcggcatagccgatccactcctgaatgccgtaggaccccgccttgtcgtagggggcgaaggtgtcgaggtagtagccgatctcctcctccgagaggggccggaaccagacgccgctttcggccgagaaggtgtgcatgcggccggcggtgcgcagcgtcacgcccgaaacgaccgtgtgtcggcgtcccgaaaggcggcggagcatctgcgcggcctgcccgcggtcgcagggcttgcccagcacctcgccgtcggagatcaccaccgtgtcggccgtcagcagaatgtcgttcgctccgagcggtgcggggtaggcctcgcttttgagccgcgagaggaacagcggcacctcttcggcgggcagggtgtcggggtaaatctcctcgcactcgtatttcggggccggttcgtagggcaggccgcagcccgtcatcagctccctccgccgcggcgactgcgacgccagcagcaggcggtagggttcgagtttatctttcagcagcatggtcttgtttttagggtcttaattatttaatgttatatgcggtttttgccgtatcgcctcccggccgccgcctttggcggcgtttgcaaatccggtccgccccggaagggcttcctgccgccgtgcggcgaaaccggcgatgcggagcgtcggagcgaagggcgcataatcgtctttttatcggtgcggagtctgtctccgcgccgtcagcgtatgtcgaaattcagcagttcgcgcccttcgagcacggcccgcaggttgtcgccggggctgaccggtcccacgccggccggcgtgccggtgtagatcaaatcgcccatgcgcagggtcatgtaccgcgatacggcggcgatgatgcggtccaccgtaaagagcatctgccgcgtgtcgcccgtctggcgggtctggccgttcacttccagcgtgaagcgcagcttctgcacgtcgccgcccagctcctgcaaagatacgaattccggcgaaatcgccgccgagcggtcgaacgccttgctgcgctcccacggcagaccttcggcggcggcctgccgctgcaggtcgcgggccgtgaagtcgatgccaagccccacctccttgtaataacggtgtgcgaaacgctcggcgatgctctttcccacgcggtcgatgcgcaccaccagctcgcactcgtaatgcacctcttgcgaaaatgcggggatgtagaacgggtcgttgttgcgcagcagcgccgtgtcgggtttcaggaaccagatcggctccggggaacactccccgcagcccggccggttccgttccggcagagtctccgctccgtccccggcttgcggcgacggttctgccgtgcatcccgtattgcccccgttcagccaagactgttctgccgtgcatcccgtggcgttcctgtttagctggggcagttctgccgtgcactccgtggcatagccgatctgtctcagtcctgacggatactccgctccgcccccggcttgccgagactgttcggccgggtattccgccccgccccttatcaggtggttcagctcctcggcgtgtgcggcgtaattgcgtcctatgcagatgattttcatggttttccgttactgtttgttgtgatcgtaccgctgcgcccggaccagcatccagacgacgtagaccggaaggtaaattacatagacgaccggcagggcatcctgctggccggtcaggttcaggactactgcaagtaaaacccataacgccccgataatcaccagatgccgccgcatgaacgacgacagtcctgcgacatcgacgtttttcttcttctccgcaggcatggtgttgtagcccgcaatcagcatcggaaaccgcttgaccagcagtccgacgacgatcaggaatacgccggtgaggatgtgtatgaaaatttcatccataacttcaggttattgtgcttcggtcgcatgcagctctgcgaccatccgggcggcgaatcggtcgctggcgccgggccctccgataactttgcgtaattcgtcgaagtcggagagcatcttttcgcgcttggagccgccttcgacgacggcccgcagttcgcgctcggcgcgcgtgatgtcaagccccgactggatgatctccgcaaccgcctcgcggccgaggttgaggttcacgagcgacacccaaggcacgttcaatacgtaaggctgcagtttaacctgaaaccataacgttctgtaaaccaccacttcgggaatgccgagcagcgccgtttcgagcgtcgccgtaccggaggtcaccacggcggcttcggccgcggcgagcgtttcgtaggtctggtcgcagacgtagcggatgtcgctgccggccatgtactgttcgtaaagcgccctgtccagccacgacacgcccgcgacgacgaactggtggccggggaacttcttcgaaaggtcggccatcagcggcaggttgtcgcggatctcgccccggcggctgccggccaagagggcgacgatcggccgcccgtccaatccgttgcggcggcggaattcgtcgggcgaggggagcgcggcgcgtttcgcctcgatggcgtccacgagcgggttgccctcgaaaatcggttcgatgccgtgccgggggaagtagctgcgttcgaaggggaagatgatgaagagccggtccacgtatttgcggatcgccttcaccctccattcgcgccacgcccagaccttgggggcgatgtaatagaaggtgcggatgccgtgctccttggcccagcgggccatcttcatgttgaagccggggtagtccaccagaatcagcacgtcgggggcgaacgccgccacgtcggcctgacattcgagcatctgccgcttgatcgtccgcaggtttttgaggacctgcacgatgccgaaaaacgaggtttcgcggtagtgcttcgccagattcgccgcgccgcccgcggcggccatgcggtcgccgccccagaagcggaactgcgcttcgggatcggccttgcgaagcccttcgatcaggtttgcgccgtgcaggtcgcccgaaggctcgccggcgatgaggtagtatttcatgcctttgcggtttgttgcggttactcttcgttcagcaggtcggggcggagctgccgggtgcgctggtaggactgttcctcctgccagcgggcgatctgagcgaagttgcccgaaagcaggacgtcggggacccgccagccgcggaattcggcggggcgggtgtagaccggaggcgccagcaggttgtcctgaaagctgtccgtgagggccgaggcttcgtcgccgatggcgcccggaatgatgcgcacgaccgagtcggcgatgatgcaggccgccagctcgccgcccgtcagcacgtagtcgccgatcgagatttcgcgcgtgacgaggtgttcgcggatgcggtggtcgatgcccttgtagtggccgcagaggatgatgatgttgtcgagcgtcgaaagccggttggcttcgtgctggtcgtagcggacgccgtcgggcgaggtgtagatgatctcgtcgtaatgccgctcggactggagtttctcgatcagttcgaagaccggttcgcacttgaggaccatgcccgcttcgccgccgaaggggtagtcgtcggtggtcttgcggcggtcgtgggcgtagtcgtggaggttatggacgacgatctggaccagccccttctcctgcgcgcggtgcaggatggattcgttgagcggggaggtcagcagttcggggacgactgtcaggatgtcgatgcgcatgtttctgaattgaaaaattgaaattactgcgggcggaagatgatgtccttgacgcttgcggcggtcagggggatttcccgtccgtgttcgagggtgaaggccttgtagcccagcgctgtgaagagttcgacgatgcgggggcggttgccgccgcccgtctcgacgagcaccgtggggcggaagcgttcgagcagcgggtggagttcggtcagcaccacgacttcgtagccttcgatgtcgcacttgacgaagtcgaggcgttcgagtccggcgaagagttcgctgccccggcgcatctgggccgagaactccgcggcggccgccgcgccgctgtcgttgacgaagttctgtcccgtgccgaagtagcccgtttcgcgcgccgagtcgttggccatcgtgatcggtttgttctcggtgcccagcgcgtaggggagtatctcgacgttgcggcagcggcgcaggttgcggcgcaggacggcgaggatcgggggaaccggctccacggcgtagaccctgcccgccgggccggccagccgggagagcgtgcgggcgtagtagccgaggttggcgccgatgtcgacggccgtgtcgcccgcgcggacgagccgcggcaggtggtagacgtattcggtggcggaggcgtaacgcccgatgccgagccgctgccagaggaagaacaggcggctcacggcgcgcaggtagccttcgagcggcagggttcggtagaggattttatggatcagtgtcttcacgtttccggaggtttgcggagcggattttcccggacggcgtccgctgcggtgtcgaggcggggcctcagttcttgtagttcacttcttggttgaggacctcgacgacgaaggggttgtagagcatttcgtggccgatggtcgattcggggccgtggccggggtagacgcggacctcttcgcccagcgggatcagggagtcgaggatcgagcgcatgatccacgaatagtcgccgcccggcaggtcggtgcggccgatcgactcgcggaagagcgtgtcgcccgtgaagagcgatttggattcggggtcgaacagcgccacatggccgggggtgtggccgggggtgtggatcacgcgcaggacggtatggccgaagcggatttcgggcgtcgtgtcgaggtcgatgtccgccgggggcatctcgccgaccgcaacgccgaagatgctgccgctggtcgaggcgttgtccagcaggaaccggtccttggacgagagcgcgaaggggatgccgtagcgtttcttgaggtgcgcgacgcccagcgtatggtcgaaatggccgtgggtgttgaccgccagaacgggtttgagtccgtgctgggcgatgaagttgtcgagcgcggcgtcttcgcgcgggttgctgttgccggcgtcgatgacgacggcttcggaggtgtcgtcccagacgacgtaggtgttctcctgtatcgggttgaattgcaggcaggctattttcataattcggtcgtttttcggaatcgtaatgtgtttgtgcaaagactgtgcagaccggacgggccgggccgcatcgtctccgggcggatgtttatcatgggcaaatatagcgttttttaccggattttacctatctttatgacccgaataaacttactcgacatgaaacgactcgtcgctttgattttcgtgctggccgtgtgcggcacgggagccgtagcccagcagggcgcttacaagaccgtgaagaacatcgcctaccgcgacgccggaggcgaccggaacatcgacacgatgtgccggctggacgtctattacccggtcgatagggagggtttttcgaccgtcatatggtatcacggcggcggcctgacgggcgggcggcgcgatatccccgaagcgttgaaggagaagggattcgccgtggtgggcgtggagtaccggctctcgccgcacgtgaaggtggccgactgcgtggacgatgcggccgcgtcggcggcgtgggtggtgaagcatatcgccgagtacggcggcgatccgcggcggattttcgtggcgggccactcggcgggcggttatctgacctcgatgatcgggctggacaagcgctggctcgaaccctacggcatcgaccccgacacgaccttcgcggcgctgattccctacagcgggcaggtggtgacccacttcgcgcgccgccgcgagatggggattcccgacacgcaggtggtggtggacgacatggcgccgctcaattacgtgcggcccgactgccgcccgatcctgattctttcgggtgacagggagcgggagatgctgggccgctacgaggagaacgcctacttctggcgcatgatgcgcgtggcggggcatcccgacgtgcggatttacgagttcgacggcttcgaccacggcaacatgccgcaggccgggcacttcgcggcggtgcgctatatccgggagatggagcggaaaatggagcggtagttgtgtagaatcggagctatgaaaataaacggatatgcgcttttgcaggccgcggcagccttgtgcgccgcgcttgcgctgacggggtgttcgctgctgaaggtcgccgtggccacgggcgatcccttgtcaaaagaggagatgaacgtgcggacgatgacccgcggattctattacgacatggccgcagaggtggcgcgcacggccgattcgatcgcccaagcggcgccggatatggctacgcgggtcgccgcggtgcggtggaagatacgcgccacgcgtgcgggcgtctcggccgccatgcaggggattcccgacgtggcgctggccgacatgtggatactctgccggcggatgaacgaacggtttgcggcggcgcccgattcgctgctgttcggggcgcagagcggcatggcgcgcgatgcggcggcgcggctcgaccgccgggccgcgcggctggcgcggcaggtgctggcggaggagcgttacgggctgatggagcgttttgtcgcgcagtatgtgcgggacaatccctccgacgaggggatggaggctgcgaacaccacccttgcgtggatcgagttcttgcgcgagaacggcgtagagcacgcctatgcgacgggttcgatcgccgaagtgctggccgacgtgaacgaccgcgtgagcagccagacgcagcagctggccagcagtgtcggctggtcgaaggacattctcgaaatgcagctgcagcaggacagcctgcgcatggaggtcggggcgcgcctcgactcgctcgaacgcagtttcacgcgcatcgtcgtcgtggccgagcatctgcccgaaatatcggaccgggtgctggacgagctgaacaaacaggtgacgcagctgatatatacgatgaattacagcgtcgataacgccttcgccgatttcgaccgccagcgcgacgagctgcagcggtatgtgaccggagagcggcaggcgttggtcgagcagctgcggcagacggccggcgaggtggtgcggacgacgctcgacgcggtgccggggctggtgggcaaggtgctgctgtacgtggtgtcggcgctcgcggtgctgatcgggggaccctttgcgctggggttctggctgggcggcgtgagggcgagggccggagcgaagagaaaggagtaggcggcggcccggaccgggctgcgggtgtctgaaacggaacgggtgcggcggcctgatcgccgtgtcggcggaggtgaagggcgagggcggcggctcggcaaaatgcaagcgaacttgcttttgccctcagcttgcactatctttgccgcaaattggaagacgatggctcgcaaaaaggcaaattatcccctcatcgaggggcttgaaataacgacgctcgccgccgaaggcaaggcgatgggacgctggaacgacgtggtggtgttcgtgccgctgaccgttccgggcgacgtggtggatgtgcagatacgctccaagcgccgcaggttcatggagggattcgtggtccgctacgtcagaaaatcgccgctgcgcgcggaggccttctgcgcccatttcggggtttgcgggggctgcaagtggcagaacctgccctacgaggagcagctgcgcttcaagaccgagcaggtgcgcgaccagctgacgcgcatcggcaagatcgcactgccgcagatcgcgccctgtctggggtcggagcagacccggttttaccgcaacaagctcgaattcaccttcgccgaccgccgctggctgacgcgcgaagaggtggagagcgggacggacttcgatgccgcgcccgcgctcggattccatattcccaacatgttcgacaaggtgctggacatcgacaagtgctggctccagcccgatccgtcgaacgacatccgcaccgagaccagacgcttctgcatcgaaaacggctacacgttccacaacgcccgcgaacacagggggctgatgcgcaacatgatcgtccgcacggcttcgacgggcgaggtgatggtgatcgtggtgttcggcgaggacgaccgggagcggatcgccgcgctgctggaccatctggcggcgaatttcccgcagatcacgtcgctgttctacatcgtcaacaccaaattcaacgattcggtcggggacctcgatccggtttgctacaagggcaaggaccatatcgtcgaagagatggaggggctgcggttcaaggtggggccgaagtcgttctaccagaccaattcggcgcaggcgtacgagctttacaaggtggcgcgggagttcgcggacctcaaaccggaggacgtgctttacgacctctacaccgggacggggaccatcgccaatttctgcgccgcgcggtgcagccgggtggtgggcgtggagtatgtgcccgaagcgatcgccgatgcgaaggtcaattcgcagatcaacggcatcgggaatacggttttctatgcgggcgacatgaagcaggtgctgagcgacgggttcgtcgccgccaacggccgtcccgacgtgatcatcctcgatccgccgcgtgcgggcgtggacgagccggtgatcggggtgatcctgcgcgccgcgccccggcggatcgtctacgtgagctgcaatcccgccacgcaggcccgcgacttggcgctgctcgacgccgattaccgcgtcgaggcggtacagcccgtggacatgttcccccacacgcaccatgtggaaaacgtcgtgaaactcgtacggcgatgagactggacggtttcgggatattcgtcgagcggatgccggccatggtccgcttctaccgcgacgtgctgggattcgcgatccgcgaggatgaaaacgcctcgaacgtctatctggaaaaggacggaacgctgttcctgctctaccgcagggcggatttcgagaagatgaccggccgcaggttcggctatgccggcccggtgaacgggcattacgagatcgccctgagcgtcgaaaaccatgcggcggtcgatgcggccttccgcgaggtcgtcgccaaaggcgcccggcccgtcatggaacccacaaccgaaccgtggggccagcgcacctgctacgtggccgaccccgaagacaacctgatcgaaatagggtcgttcaaggcatgattccggagtggggatgcagtatttcggatttttggcgttttatttgcaagacagttacctaaaaaacggaaaatatgaaaaaactgattttaatggcggcggtggcgctgatggctcttcccgcggcggcacagatgcaggaggctttccccagctatattcaggtgaacggacgcgccgagaaggagatcacgcccgacgagttctacctctcgatcgtcatcaacgaacgcgactcgaagggcaagatttcggtcgagagccagcagcgcgacatgatcgcggccctcaagcggctgggcgtgaacgtcgagaagcagctgaaggtggccaacctttcgagcgagttcttcaagaagaacacttcggtggcgacggccaagtaccagcttcagctgggatcgtcggccgaggtggccaaggtgtggcaggcgctcgacggactcggaatctcgaacgtttcgatcctgaaggtgtcgcactcgaagatcgacgagtataaggagcaggtgcgcgtcgaagcgatgcagaacgccaagcagagcgcccagacgctggccggggcgatcgggcagaatgtcggcaagtgcttctacatttacgactcgaacaacaacgtgatgccggtgctgtatgacaacatggccgtgatgcgcagtgcgaaggccgggtatgccgaagaggccgcggcggacgaaccgctcgacttcaagaccatcaagctgcagtacaacgtgcaggcgaaattcgtgctggagtagctctccggcggcatatgcgaagaggatgtcccgcgaagggcgtcctcttcgtcgtctcagggtgttgcggacggaggttgtcgcgcttcgggtcccggattcgcgggcggagtgcggaggaaggccgggcgtggtcgcggacgaagcccgtcgggtgcgaaaaacggcgccggatggtgcggattccgaaaaattgtactatctttgtttactttgccccttaaaaaaggaggagttatggaaaaacagttttgtttcaactacgagcattatgcggctcttgccgagctgtccgatgcggaccgtgagctggttcgggaggccgaacgggccacggccaacgccaatgcgccctattcgaagttccgggtgggggcggctgcgcggctgcgcagcgggaaaatcctctacggaagcaatttcgagagcgaggtctatcccgcggggctttgcgccgagcggacgctgatgttctatgcgcaggccaattatgccgacgatccgatcgagacgctggcgatcgcttccgatccctcggagcgcgaatgctatccctgcggccagtgccgtcaggtgatggtggacgtcgaacgccgtcagggcgcgcccatgcgggtggtcatgagcggcggcggcacggcgacggccgtcgattcggcggcgctgctgctgccctttacgttcgtgctctgacccgcagcgagcatgtccgagataccggcttcggcggcgcggcccgccgacggcggggaaacgttgcgttgaagtacaggccgcttttagaaatacccgaaaaatgttcactcccgaagatatcctctacgaagacaatcatctgctgatcgtcaataaacgctgcggcgatctggtgcagcccgatccgtcgggcgaaagcgcgctcgaagaccagataaaggcctttgtcaaacgccgcgacgccaagcccggcgacgtgttcctcggcgtggtccaccgcatcgaccgtccggtgagcggcgcggtgctgttcgccaagacctcgaaggccctgacgcggctcaacgagatgatacgcgagggccgcatccgcaaggtctactgggccttgaccgaacggacgcccgaccccgaaagcggcgaactgcgccactacatcctgcgcgacgcccgcaccaaccgctcgcgggcctgcgacgggccgaagcccggcgccaaggaggcgcgcctgcgttacgaaacgctgggggcggggaccaactatacgctcgtcgaggtggagctgctgacggggcgtcaccaccagatccgtgcccagttgtcgaagatcgggtgtccgatccgcggcgacctgaaatacggcgcgcggcgttcgctgcccggcggcggcatctcgctccattcgcggcgggtcgagttcgaacaccccgtgcgccgtgaacctgtgagcgtcacggctcccgcgcctgcggacgacaacctgtgggcttatttcgaaacccgttgatttaccggaaaatatgcgattgttgattcagcgtgtgaagaacgcttccgtcagcgtcggcggcgtcgagttgtcccggatcgggcagggcctgctggtgctggtcggcgtgggcgtggaggacacggacgaagatatggaatatctggcgggcaagctggtccgtctgcggattttcgacgacgagcagggggtgatgaacctcgacgtgcggcaggtaggcggcgaggtgctggtggtgagccagttcacgctgcaggcttcgacccgcaagggcaaccgcccgtcgtacgtcagggcggcgcccgaagccgtctcgcgcccgatgtacgagcgtttcacggcccgcgtggccgagctgctgggccgggaggtgccgacgggggagttcggcgccgacatgcaggtggcgctggtgaacgacggtccggtgaccatctggatagattccaaaatgagggattgttaaccgaaaaatagaagatgaaaagattattgacagttttgctggcaggtatttccgcggctttcgcctcctgcggagacgacggcgcggagaagggggacacgtggttcctgaaacccgaagcggtggtttcgggaacgacggcggagatctcttgccgcacgaaattcgccgacggcgtgctgaccgagagcggcgcggggttcgtatacacgcggatcggagccgcggacggctatttcgacgccgagccggtggaggtgagcgggaatgcgctttcgtgccgtctgagcgacctcgaacccgaaaccgactacttggtgtacgcttatctggagctgggcggcgcagggcgcatgcagagcgaatcggtctccttccggaccgggacgggaagcgatccggggaatgcgccggtattcgggcagcctgcctactcggaggtgacctcctcttcggcggtggtgagctgtacgttcgcctatcagggcgcggagcctgtttccgaggtctatttcctctacgggacgggcggcgtttctaaacgcgaagccgtgagtgcgcagcccggcgcgaagagcgtccggctttcggggctgagcgcttcgacggactatacgttccgtttgtgcgtcgctgcgggcggaaagacctatgagagcggagaggcggcctttacgaccgatgcgggcgacgggcccggacccggtccgaatccggggctgacgaagttttcgggctggcccgaactgcccgtcgaggtgaagaacggcgattaccattacgcctaccatacgatcagcgacttcaaggtcggaaactacaacgcccgcaactacacggtatgttacagcgccgagaatcacggtcccgtatgggtggccgcgccgctgcacaactgttatgtgaccaagagcgggaaccgcagctacagtcaggatccggatgttccggcgggcatacagccggcgtcgaagtccctcgccagtccctacaacaagggccacatgctgggcaaccgcgaacgttcgagaacggccgtcatgcgcaggcaggtttgctactacaccaatatcgcgccccagcacggcgggacgttcaatacgggaggcggcgcgtggaacaacctcgaagacctgatagacacctattgggattcgaccgagagtgccaatgtgggcgatacgctctatgtggtcgtcggggcttactacaagacgtggaccgactcgtacggcaatacggcttcgcccaagaaggccgccttcggcggtcagcaggcgggtgttccgaccatgttctactacgccatgctgcggacgaagaacgccaagtccggcaaatcggtgctgcgctgttcgcgcgaggagctgcagtgcgcggccttcgtgatgagccatgccatgcagaaggggcacaaaccctcgcgcagcgatatgcgcagtgtcgcggaggtcgagcggctgagcgggttccagttctttaccaacgtgcccaatgcgcccaaggatacctataacccttcggactggggattgtagcgatgtatgcgtggggcgataacaggcggttcaactcctattcggggtattttcgccgcatgttcggctgccgcgtgcagaaactgtcggtggacgccgggttcacgtgtcccaaccgggacggaacgataagcgggggaggatgtacgttctgcaacaacggggcgttcactccctcgtactgcatgccggccaagggggtgcggcggcagatcgaggaggggatcgagttccaccgcaggcgttaccgcacggcgtcgaagtatctggtctacttccagtcgttttcgaacacctatgcgccgctggagcggctgaaggaggtgtacggcgaggcgctggcgcatcccgacgtggcgggtatcgtcgtcggcacgcggcccgactgcgtggacgccgaaaagctggactatttcgcggagctggcgcgcgggaggtacgtggccgtcgagtacggcatcgaatcgacccgcgacgagacgctgcgggcggtgaaccgcgggcatgacttcgcctgcgcgcgccgcgccgtggagatgaccgccgcgcggggactgcacgtcggggcgcactttatcctcggactgccgggcgagacggacgcgatgctgctggagcaggtcgcggcgatcaattcgctgccgctcacgacgctgaaattccatcagctgcagctcttccgcggcacggcgatggccgccgaatacgacgccgatcccggtcgcttccgcttctgggagatcggcgagtacatcgaccttttcgtcgaggtgctgcgccgcctgcggcccgatctggtcgtcgagcggttcgcgagcgaggcgccgccccgctaccattacggccgcaactgggggctggtgcgcaacgaacagctgctggcgatgctcgaaaaaagattggaggaacgaaatgcgtatcaaggcgaaatttttgtatctttacagtcgctgtgataggttcggacaggcggcaccgcggcaaccggcaaatttatttgccattgcgctctgcctgcactatgtcttagataggcggcgcttcggcaaaatgcaagtgaacttgcttttgccctcagtttgcactatctttgccttcgcaattgctaatatttccgtaccgaaatgaaacccatcattaaggagctgatgctgaagcccgtcaaggagtatttcctgatgacggtcggcatgatcatgtactctttcgcgtggatcggctgcatcctgcccgccaaaggcgtcggcggaggggccgcgggtctgtcgctcgtgttgtgccatgccgtcgaggagtggctcggcgtctcgattcagatcggtacgatggtattcatcatcaacggaatactgctgctgatcgcgggattcatcatcggctggaacttcggcgtgaagaccgtctactgcgtcgtggtgatctcgctggggatgaacttctggcagtcggtgctgccggagggcgacttcctccacctcgaacgtatcctgtcggtgatcctcggcggcatactggccggcatgggcgtggcgatgtgcttcgcgcagggcggctcgacgggcggcacggacatcgccgcgatgatcatcaacaagtaccgtacgatcagctacggcaagatcgtcatctactcggatttcgtcatcatcggatcgtcgatgctcgtgggattccatatcgacacggtgatctacggctatgtgatgacggcggtcttcggctatacggtcgatatgatcatggccgggaaccagcagtcgagtcaggtcttcatcgtgacgcacgactatgagaagatggcggaggccatcgtcgagaatatccaccgcggcgtgacgctcatcgactcgcaggggtggtacaccaagaagcagtcgaaaatcgtcatggtggtatgccgcaagcgcgagaccgcgatgatcctgaaattcgtcaagacgatcgatcccgacgcctttatgaccgtggggtcggtgatgggcgtttacggcaagggatttcaggcgctcaacaaactctgatgcccctctatgccgacatagtactgccgctggcgcagcccgcctatacgttcgccgtgcccgaagggatgcacgtggcggaggggacggcggtagccgtgcagttcggaccccgcaaattctatacgggcgtcgtttggcgggtgcatgaccgccgtccgccgttcaggacaatcaaatccatacagcgcgtgctgtacgacgcgcccctgctctcggcgcagcaaaaggcgctctgggagtggatcgccgcgtactacatgtgttcggcgggcgaggtgatgcgcgtggcgctgccgtcgctgatgaagccttcgggcgataccgaggaggagttcgccgaagacgagttccgcccccgcacggagtgttacgtggcgctggcgcgggagctgcacgacgaagggcgcctgcacgaggtcttcgagaagctcggacggcgcgcgcccaagcagtacgaagccctgctggagatcgcgtcggcgggggacgagacccggatttcgacgggcgaggtggcccgccgcctgctgcgggccgactatgccgtgctgcatgcgctggagcgcaaggggcatatcgtctgcacggagcgcgaacgcaccgtcgagcggggcggctcggcgttccggctgcccgaactgaccgcgccgcagcgcgaagcgctcggttcgctgcgggagcagttcgccgaaaagcctgcggcgctgctgcacggcgtgacggggtcggggaagaccgaaatttacatacacctgatcgccgaaacgctggcgcggggcggcgacgtgctgctgctcgtgcccgaaatcgccctgacggcgcagctgatcgggcgcatggagcgcatcttcggcagccgcgtgaccccctatcattcgaaacttacgaaccgccgccgcacggagacctacctgcggctgaaccgctcccaagggggcgagttcgtcgtcggcgtgcggtcgtcgatatttctgccgctcaggcatctgcagctgataatcgtggacgaggagcacgacgccagctacaagcaggccgatcccgcgccccgctacaacgcccgcgactgcgccgtggtgatggcccgcctgtggggcggccgcacgctgctgggaagcgccacgccgtcgctcgaaacgtggctcaacgccgagggcgggaagtacggccgcgccgtgctggcggagcgttacggcgacgcccggccgcccgaaatattcgtttcggatacgatccgcgccgccaagcgcggcgagcggcatgcgcatttcaacaaactgctgctggacaagatggaggagacgctcggacggggcgggcaggtgatgctgtttcagaaccgccgcggattctcgccctacgtagagtgttctcagtgcgggtggacggcccgctgtccccactgcaacgtgacgctgacctaccacaagggaggcgccagactcgtctgccactactgcggctacacggccccggtgccggcgaagtgcccttcgtgcgaggtgacggaggtgctgccgcggggattcggcacggagaaggtcgaggaggagatcgcccggctcttccccgaagcccgcgtcgcccggctggaccgtgacagcgtgacctcagagcgggcgttcaacgccataatctccgatttcgaagcccgcaagaccgatattctggtcgggacgcagatgattacgaagggattcgacttcggcggcgtgtcgctggtggggattctcaatgccgacaacctgctgaacaaccccgatttcagggctgcggagcgggcgtttcagctcatgctgcaggtcgccggccgcgccggccgccgctcggacggcggcgaggtggtgattcagacctccgagccggggcatcccgtgatccggcaggtcgtggcgggcgatttcgccgggatggcccgcatgcagctctccgaacgcgaagcgttcttctatccgccctatgcgcggctgacatcgctgacgctgcgccaccgcgacgtcgcgttgctgcgccgcggcgtcacggagctggcggcgcgcctgcgcgtcaggttcggccgccgcgtgctggggccgatgacgcccccggtggaccgcatccgcggcgagtatctcgcggggctgctgctcaagatcgaaagcggcgcttcgtcggccaaggcccgctcactgctggccgccgagctgaaggcgttcgccgaaaatcccgaattcaaaacgataaccgtcgtctgcaatgtcgatcctcagtgacctgttgcgcgacgtcgcggcgctcttctttccgccgcgctgccccgtctgcggcgccccgctcgcgcagggcgaacgcacggtgtgcacgctgtgccgcacgacggcgcccctgacggggttctggcttgaggcggacaatcccctgctggcgaagtgccgggacatgctgcccgtcgagcgggcttcggggtttctctactacatccacggaagcgggtggcgggagctgatccgcggattcaaataccgcggagcgtggcgcacggcccgcgcgatgggcgagtggtacggccgctgtctgaaggagagcgggctgtacgacggggtggaggtggtcgtgcctctgccgctgcaccctgtcaagcggtgcaggagggggtacaaccagtcggagtacatcgccgaggggatcgcctcgcagctgggcgcggaggtggaccgccggagcgtccgccgcaaacgcaatacggagagtcaggccctcaagccgcggcgcgaacgcgcccgcaacgtcgacgaggctttcgcggtgcgccgtcccgaacggctcgaagggcggcacgtcctgctggtggacgatgtcttcacgacgggcagcacgatgctttcgtgcgccggggagatgctgcgcgccgcacccggatgccggatcagcatcgcggcgctcgccgtctcgcggcgggagctgggggtgagggagtgatcggaaattaaaaattctttttcaacagggcgttatcccctgctgcggggactgtctgcgggagaatcgtgtcatcaacacgattttcgacaacaactttgccgcggccgttttgttttctccgcccgaatcgctatttttgggctttgaacgaaagcataaatcatggctaaagattataacccctcccaacgcaacagggaggcattcgaggcgctgaccgacaccgccggcaacgtgcccccgcaggcggtcgaactggaggaagccgtgctcggcgcgctgatgctggaaaaggacagcatcatcgccgtgcaggagtacgtcacgcccgacgctttttacaccgaggagcaccgcacgatctaccgcgcgatcgaggagctttcgatggagctgaaaccgatcgacctctataccgtcaccgagcggctcaaggccaagaaggagctgaagaaggtgggcggcgcgtcgtatctggcgcagctgacgcagaaggtcggttcggccgccaacgtcgaattccacgccaagatcatcgcccagaagtacgtgcagcgcgagctgatccgctcggcgaccgagattcagaagcggtcgtacgacgaatcgaccgacgtgacggagctgatcggatatgccgagggcgagatattcaaggtggccgaaggacacgtcaagcggtcggtgcaggcgtcgaaggatattctggcccgcgcgctgatgcagatcgaggaggcgtcgaagaatacgagcgccttcaacggcgtgccgtcgggcttcatggccatcgaccgcgtgacgctgggctggcagctctcggacctgatcatcatcgcagcacgcccttcgatgggcaagacggcgttcgtgctctcgatggcccgcaacatggcggtcgatcacgagcagggcgtggcgttcttctcgctcgaaatgtccgccgtacagctgatgatgcgtctgattatcgctgagacgggactgagcggaaacgacgtcaagtcgggccgtctgacgcccgaacagtggcggcatctggagtcggcgaccaagccgctgggcagcgcgccgctctatatcgacgacacgccggcgctttcggtcttcgaattccgctcgaaggcccgccgtctgaagatacaccacgacatcaagatcatcatcatcgactacctccagctgatgaccggcaatcaggattcgaaaggaaaccgcgagcaggaggtggcctttatttcgcgtacgctcaaggcgatcgccaaggagctgaacgtgccgatgatcgcgctgtcgcagctgagccgcgccaccgaaatgcgcggcggctcgaagcgtccccagctctcggacctccgcgagtcgggcgccatcgagcaggacgccgacatcgtggccttcatccaccgtccggagtattacggcatcaatcaggacgagaacggcatgccgacggcgggtatggccgagatcatcctcgccaagcaccgtaacggcgccgtgtgcgacgtcaacctgcgcttcctcaaggaacaggcgcgtttcgccgacgtggacgacacgatgctgccgccgtcgcaggcggctgacagccagcaggcctacgacgactatgccagcggttcgaacgccgtgccgggagccggaatcggcggcggactgggcgcgggaatcggcggcggggagttcgaccccaatccgcccgcgctgaacgacgaggcgccgttttagaaggtgcgccgttttagagcgagtgccgttttggagggatgctgcggccggagcggaaggtgcggccgatgtggccggcgaagtcggtgcggctgaggcggtcggtgcaggcgatgcaggcagtgcggccgaccgtggaagaggcaggtaacagaatggttaactgataatatttttccgataaatgtttgtccggacctatgcaggggcgatcgtggggatcgacgccgcggcggtgaccgtcgaggtcaatatcgccggcggcggactgggagtgtacctcgtggggctgccggacagcgccgtgaaggagagcgagcagcgcatacgtgcggcgttcgagaactccggggagcggatgtcgggccgcaaggtggtcgtgagtctggctccggccgacctgcgcaaggagggtgcgtcgttcgacctgccgatcgccgtcgggattctcgcggcgatgtcgcgagtggatgccgaaacgcttgccgggacgatgttcgccggggagctgtcgctggacgggacgctgaaacccgtgcggggcgtgctgccgatggcggtgcgcgcgcgggaagagggattgcggcggctggtgctgccggcggcgaatgccgcggaggcggccgtggtcgaaggcgtcgaggtgatcggggccggaagcctgaaggaggtgatcggactgctgaacggcgaacgggagatgacgccggcggtgcctgcggacggggagccgttcggggcggagtcgggccgttatgaagaggattttgccgatgtgaagggccagacgcatgtgaagcgtgcgctggagatagccgccgcgggcggtcacaacgtgctgatgatcggggcgccgggttcgggcaagacgatgctggcccgcaggatgccgaccatcctgccgccgctgtcgcgcgaagaggcgctggagaccaccaagatacactccgtggccgggaatacggcggcgggcggtctgctggcgcggcggcctttcagggcgccgcaccatacgatttcgcaggcggcgctgatcggcgggggacagtcgccgcggcccggcgaggtgtcgctggcccacaacggggtgctgtttctcgacgagctgcccgaattcgggcgcagcgtgctggaggtgctgcggcagccgctggaggagaagagggtgaccgtctcgcgggcgaaatacagtgtggaatatcccgccaactttacgctggtggcggcgatgaacccctgtccgtgcggctattacaaccatccggcgaaggagtgcgtatgttcgccggggtcggtgcaccgctatatgagccggatttcgggcccgctgatggaccggatcgacctgcatgtggaggtgacgcccgtgccggcggccgaactttcggcggcggcgcccggcgagccgagcgccgcggtccgcgagcgggtcgtgcgggcgcgggaggtgcaggcggcgcgtttcgcggggacggagggcgtgcataccaacgccatgatgaacgcggcgatgctgcgcgaatactgtcggccggacgccgcttcggcggcgctgctggagcgggccatggagcggctgtcgctctcggcgcgggcttacgaccgcattctgaaagtggcccgcacgatcgccgatctggcggggcgcgaaaccatagcggcggccgatgtggccgaagcgatcaactaccgctcgctggaccggggaaactgggggcggtaaaaggtggacgaaagggcggcgaacgggaagaattcgtaattttgcaggcggcttgccttggaatgttgtccggggcggaggccggcaccccggttttcggatcgccgggtcttaggatcgccgggtcttaggaccgccggggacggccgccgggggcggtgccgctgtcggacctttgagttatcggggccttcgggctgtcgggctttcgggttggcgggccgtcgggtcttcgggttgtcggaggcggggttgaaagatattgattgtaagtaaaaaagataaaatagcatgacaaggaaaatcatcctttcgggcggcggaacgggcggacatatctatccggccgtggctgttgcggaagcgttgaaacggcggttcggcgacggggtcgagattctcttcgtgggcgccgagggcaagatggagatggagaaggtgcccgcgctgggctaccgcatcgtgggactgcccatagcaggcctgcagcggcgtatggactggcacaacctcgcggtgccgttcaaggtgctgaagagcgtctcgatggccaagaagaccattcgtgaattcggggccgatgcggtcgtgggattcggcggctatgccagcgccccggtgctgtgggccgcgcagcggctgggcgtgccgacggtgattcaggagcagaactcctatgccgggctgaccaacaagattctggccaagcgtgcgaagcgcatctgcgtcgcctatgaggggatggagcgtttctttccggccggcaggatcacgatgacgggcaatcccctgcggggccgtttctcgaaagagggggccgaccggggcgaagcgttggaatattacggctttacgcccgatcttccggtggtgctggtcgtgggcggatcgctcggaacgcggtcgctgaacgagatgatgaaggcgtggatactcgcgctcgaaggcgcggacgctcccgtgcaggtgatctggcagacgggcaaatattatgagcgcgagatgcaggcgttcttggcggcgcatccggctgcgaatatctggcagggggccttcatcgaccgcatggactatgcctatgcggcggccgatctggtcctctcgcgcagcggggcggggactgtctcggagttgtgtctggtggcgaagcccgtgttgttcgtgccctcgcccaatgtggccgaggatcatcagaccaagaatgccaaggcgctggaagccaagggcgcggcggtcgtggtgcctgatgccgaggcccggacggcggcgatgaggcgggcgatggagctgctctcggacaaggaggctttgcggacgatgagcgaaaacctcgaaaagctggcgcgccccgatgcggcggagcggatcgtggatgaaatcgaaaaggtaatgaaatagcgccgcttccggcgtttcccctgcgccgcgcggcgggtgtttttgccgtgcgggcgatgaatgcggcgggggccgtgcggagggaggagcggtgcggagaacgataaaacttaatcggatggagtttcaaaatatctattttctgggaatcggcggcatcggcatgagcgccttggcgcgttatttcctgcatgaaggcaagcgggtggccggttacgaccgcaccccctcgcatctgacggacgaactggcggccgaaggcgctgcgattcatttcgaggacgacgtgcggcggattcccgcggagtttctcgacccggcggcgacgatggtggtgtataccccggccgtgccgcaggagcacggggagtatcaatatttcgtgagtcacgggttctgcgtcgagaagcgttcgcagatgctgggacatctcgccgagggcaagtatgtgatggccgtggcggggacgcacggcaagaccacgacctcgacgctcgtggcgtggctcaaccgcggcgtgacgggcggaggaagcgcttttctgggcggaatatcgaagaacttcggcggcaatctggtgctgggcgcgggggcgcggctggcggtcgaggccgacgagttcgaccgttcgttcctgcggttgtatcccgacgtggcggtgattacctcggcggatgccgatcacctcgatatttacggcacgcacgaggcggtgaaggaggctttttcgcagttcgtgcggcagatcaggccgggcgggttcctcattatcaaagagggggtggatatcgtgctggacaatccgcagatcaccgtttaccgctattcgtacgacgtgccgtgcgacttctacgcccgcaacgtgcagctgctcgaaggcgggcattaccgctatgacatcgtgacgcccggcggcgtggtcgaggggtgcacgctcggcattccgggatgggtcaatatcgagaattcggtggcggccgcggcgtcggtatggtgcgcggcgcaggccgaaggcacgacgctcgatgcggaacggctgagagaggcgctggcgtcgtttgcgggcgtgaagcggcgtttcgaattctatgtcaatacgccgaagcaggtttacatggacgactacgcccaccatccgcgcgagctggcggcgacgttgacttcggtgcgcagcatgtttccgggacggcgcattacggcgctgttccagccgcacctctacacgcggacgcgcgacctttacagggagttcgccgaggcgttgtcgcatgccgacgacgtggtgctgctgccgatctaccctgcgcgcgaggagccgatcgaaggcgtgacgtcggagatcatcgcccaaggcgtgacggtgccgtgccgcatcgtggagcgggcggcgctggccgatacggtggcggcgatggacacggacgtggtggtgagcttcggcgcgggcaacatcgacgcctgctgcggggcgatcgccgaaaagctgaaagcgaagagttagccgggggaccgtcggccggggcgcatgtccgtcgggccggatgtaaaaaccgcagaagacgaaacgacggataattagagaataaagacgattttgagaaaatacctccgatacgcactgctcacgcttttgtggggcgccgtggccgcatatgtcgtttatgcggggacggcggcggggagactgcgtgccgggaagaaggtcggcagggtcgagatcgaggtggtggacagctcgtcgatgggctatctggtgtcgggccgcatggtgcgcgagtggatcgcgcacagcggaatcaagacgaacggcacggcagttgatgcggtagagctggcggccatcgaggccctgatcgccaaaaacggattcgtggagcgcgtggacgcctatgtgacttacggcggcgtgctgcatatcgacatcagccagcgcaggcccctgctgcggctgctgaccgacggcgtggattcgtacgtcacgcccgaaggctatgtcttcgccgcgccgcgcgcctcgtcgctctacgtgccggtggtgacgggggcttaccgtccgccgtttcccgcgtcgttcgtcggctccgtgcgcgggcatatcgacctcgaacgggcgaagatcgacaagcggatcgcggagctggagcgtgagaagtaccccttcttccggcgcgaactgcagaacgaccgcaacatatcggcgctgcgccgcatgcgcatcaagaagcagtggtggcggatggaaagctccgcggcgttcgacgcgcgcgtcgaagagctgcgcgcccgcaaggcggagctgcggcgcaaataccgctacgaagcgcgtctggtgcaggagggaatagaccgcatcgcgcagcggcaggaggccgaaaggctgaaacaaaaaaagttggagaaaagctacgaagatttcatgaaactgcttacctttgtagagttcatcgaagatgatgatttctggaggtcggaggtggtgcagattgcggcgcatacgacccccagcggagctttagaggtggagctggtgccccggagcggccgccataccatcgtcttcggacgtatcgagcaggtggagcgcaaattcgacaaattgctgtgtttctaccgcagcggtcttatgaacatcggttggggagagtaccggacaatagatatcagatacaacgatcaggtggtttgcaagaaataaaaggattataccgtggaaagaaagaattataccgttgccgtcgatctgggttcgtcgaacgtcgtggtggctgtcggcgagaagaacgccgaagagcggctcgatgtggtgtgcgtcgtgtcgaaacccgtcgagggggtcaatgcgggcaagattgagaatatcgaactggtgagccgcgccatccgcgaagccgtgtcggaggcagaggagcagttgggaatccgcatcaccgaggcctatgccggtatttcgggcgacttcgtgcgctgtgcgcggcatatggaccacgtcttcgtctacgatccgcagaacggtgtcaatcagaaggacgtcgatgcgctgttcgaccgcatgcgcaacgtgcaggcgcccgacgacgagaccatcatggaccgcgtaccccagaactatgtggtggacgacaatcaggaggtgaagaatcccgtggggtcgttcggcaagaagctctcttccacgttcaacttcatcctctgtctcaagaccccgatgcagcggctcgacatggccctcaagcgggtgggaatcaagatgctgagcgttacgtcgaacgccatagccacggccgaggcggtgctgctgcccgacgagaaggaggagggcgtggccgtggtggatatcggcggcggcgtgaccgacgtggcggtgtattaccgcaacgtggtgcgttatatcgccacgattccgatgggggcgacggcgatcaaccgcgacatccgcacgatgagcgtgcccgaaaagcatgtggaaagtctcaaacagaaatacggttcggcggtggccgagctggctcccgaagacaaactgatccgtgtgaacggccgcacggcccgcgaggcgaaggatattctgctgcgcaatctggcgacggtgatcgaagcccgcgccacggatatcgcggagttcgtactgcaggagatcaaggattcgggatacatcggcaagctggcttacgggatcgtcctgacgggcggttcggccaagctgaaggacctcgacgaactgttccgccgggtgacgggcatggatgtgcgcgtcgcgtcggccgagaccgggattgccgaggagtcgaaagagaagacagccgatccggcttatgccacggcggtcggcattctgcttaagggtgccgagcagggcgcctgcgcgttcgtcgagcggcccgcggcccggcctgcggaacagcagggtttccggcccccgcagccgcagcccgctcctgagttccgtcacacgccgcgcttccagcagcccgtgcaggcgccgcctgcagctccggcggcggaagaggcggaggaggatgccgccgcttcgggaggtgaggagactccggtgatcgaatcgaagcgcaagcgcaactggagttcgattttccagaagaccttcgacaaaatcaacagcagcttcacggcggccgaggacgaagagatttaagggataatttgccgcgccccggtttccggccgcacgcagcggtcttacagcggtgtttgcggcatgaatttcgtgcttgcgggggcggtccggcgatgcggccgcggtttacaccggtttcggccggggagcggtttctgcagatgtggcggacagccgggggaaattcggacggcggatgccgcggatgccgggagctgcggacgggaagccgggtggcggtttttgtgaatgctgcggattgcggacggagagccggctgcgggaatgatttatagttaagaatgtggagaaaggagttagagatatgacagacgaattgatgtcggagatcaaagccccgaagacggacggttcgatcattatggtggtgggcgtcggcggagccggcggcaatgccgtgaaccatatgtggaacctcggtatccggggtgtgacgtttctggtttgcaacaccgaccagcaggcgctggacaagagtcccgtggagttgaagatacgcctcggcgcagagggactgggggccggaaacgacccggaaaacggccgccgcgcggccgtggagtcgctgcctgagattcgtcagcacctcgaagagtcggggacgcgcatgctcttcataacggcgggcatgggcggcggaacgggtacgggcgcgtcgcccgtcatcgccaagctggccaaggagatgggactgctgaccgtggcgatcgtcacttcgccgctggccgtcgaaggcaagatccgctacgagcaggctttcaggggcatcgaggagctgcggcagaacgtggattcgctgctgatcatcaataacgagaatattctcgaaatatacgggcgcctgtcgctcaagcaggcgttcggcaaggccgacgacattctgtgttcggcggccaagggcatcgccgagatcatcacggtggagagcgacttggtgaacgtcgatttcgccgacgtgtcgaaggtcatgcgtgacagcggccgcgcccatatggccgtggcgacggccgagggcgacaaccgtgccgaagcggcggccgaagcgtcgctgcgttcgccgctcttggaccacaacctgatttcgggggcgaagaacatcctgctcaacatctcggtcgcggatgccgacggcctgatgtacgaggaggtggtgcggattctggagtacattcaggcgcacgccagcgtgcaggacgacaacggcgtgattcacaacgccaatatcatatggggtacgagcgagaagccccagctgggcaacgccatcgagctggtggtcgtggccacgggattcgcgggcgacgtatcggcggcggggacgatgaagcagatcattcctccggtgcggagcgtcgagccggcgaaggacccggtggctcccgtgctggagccgatcaagccggtcgtgccgcccaaggccgccgtgcagcggccgcccgaacaggtgatgctgggggcgaaatcgacgcgttacagcaacatcgaactgttgctgagcaagcccgcctatcagtcgcgcaactcgaaattcgtcgtgcagatgcccggcggacgcaaggaggtgctgaaggaggagaacgatgccggccagcaggcgcagcaggatgcgcagggcggatcgctttttgattaactaatagaccgccggtttggaggagactacaacttcgtggattacgtttaacgggttttcggcccatatcgccgtgctgtgtgcggtgacgctgggcctgctgtgcgtttcggcgctcgtgtcgggcgctgagacttcgtttttttctctgtcgcacaacgatatacgccgcctgcgcaaacgcacgacggcgtcggccgaggcggtgctccgcctgctgacgaacgtggacctgctgctggcgacgattctcgtggtgaacaatctggtgaatatctgcatcgtcattctcacgtcgagcatcatagattcggttttcaccttcctgcggttcgaattcctcttcaagaccgtactggtgaccttcctgctgctgctcttcggcgagatactgcccaaggtgctggcgcagaccattcccgtgcgcttcgcgcagttcgccgcgcggcccctcacggtgctgcggtggattttctatccgatctcctatgcgctcgtgcggacgagcagccgcatcagcgagaaggcttcgcacaagagcgagatttcgctcgacgagctggccgacgcggtggacatgacccagagttcgagtcctgaggagcatgtgatgctgtcgggaatcgtcaatttcgtcaataccgaggtgcaggagatcatgaagccccgcgtggacatcacggtgctcaacataaccgacgattacgagacggtcaagaagaccattatcgagtcgggattttcgcgcatcccggtctacgaggacgacatagacaacatcaagggaacgctttatgtcaaggacctgctgccctacatcaaccacggcagcgagttcggctggcagcagctggtgcgcaagccctatttcgtgccggaacacaagaagatcaacgacctgctggccgacttccagtccaacaagatccatatggcgatcgtcgtggacgagtacggctcgacgctgggactggtgtcgctggaggatatcatcgaagagatcgtgggcgagatttcggacgaaagcgacgccgacgaaagtttcttcacgcggctcgacgagaaatgtttcatcttcgacggcaagagccatctgggcgacttcgaacgggtgctggggctggacgaggagattttcaacgacgtgaagggcgaggccgagacgctggccgggctgatgctcgaactcaagcgcgacttcccccgcaagggtgatgtctttacgtcgcacgacatccgttttacggtgcaggagatggacgggcaccgtatcgacaaaatccgtgtagatctgctggcatgacgaagaggctcttcatcgagccgccgatgaccgaggcggaagccgccgcgcgggtgacgcccggcgagcgggccgccgcgcaggagtttctgcgcgaacgccgtcgcagggaattcctgacatggcgcgccgtcgtgcgccgcgagctgggggacgacgtgccgatcgcctatgatgagacgggagcgcccgtcgttccggggcgcgaggtgcatatcggggtttcgcattgtccgggccgggtggcggtctgcatatcggaagcgccgtgcgccgtcgatgtcgaacccgaatcgcgggatttcagccgtgccgcgccgcgttacatgtcgcctgccgagcgggcgctttctgacgatccgctgctgtcggccgcagtctggtgcgcgaaggagaccctatacaaatatgccgggcggccggggctggatatgctctacgacctgcatgtcgaggcggtcgatttcgaagccggagtcgtcgtggggcgtatcgcggacggggagccgctgcggctttcgcttaagcgcgccgacgggtttatcgttgtatatattttgtagtttcggggcgtgtacccgataataatcctctaaaatctccgccttggcggggatttttgttgtattatgccggatttttgttgtatgccggatttttcgggggcctttgccggattggggctggttgtcaggcgggtttttcggcggctttttttgcttgccgattgtttttgtcggtttcggagggcttaggccgggagccgtgcggctggaactggacgtcgaggagggatgcgggggaaggcggggatggaatcggagctaagattgccgtcggccttagaatgcttccgaagcggtgaagaggaatgccgaggagcgtttgcggtcccacgggaggttgtggttgccgtggacgccccaaccatagtcgaggcggatgttcatgcggttcttgaattcgaagcggtagccgcagccgaaactgtagagcgtattgtcccaccggaatttgtcggtgccccagacctgaccgccgccgatccagcccacgatgccgtgacggcggtagattttctgccgcagttcgatctgcgtctcgacgagccgtttgtcgcggtaacgcccctcgtagtagccgcgcatgcgttccatgccgcccagcttggcgtacatgtgccacgacggggtgcccgccgtgcagtcggcatagagatcgtaggcgaagatggcgcctttccagagtttctgatagaagtcgaacgtcagtgtgaaacgcccgaagttacggcgcgtattgcccagccactggggataccatttggcttcggccttgatgaagatgcctttcgaggcgttgaaggtcacgtcgcgcgtgtcgtactgcgcgaaaatgccgaggttggtgttgaaggcgttcggtttgtcgcccgtggcggcgatgaagttcgagaaggggtcctgcttctccgggtcgtaacgtttgttgtccttatataaatcgtagagttcgccgatttgaccgccgggtttttccttttcgtggttgtcgattgcggtgaagtactctcccatgccgctcgacttgtatttggcgccggtgtagtcgatgccgccgctgacgccgatgtagaaccgtccgacgagcgacgtgcagtaggagatgcggaagatgcccatcgtcgtggtcaggtcctgcgcataaccctctttgccggccttgtggcccacgccgtagaatgcgcccggaaaatagacgaaggctcccgaatagctcagacgccgtttgttgtactggaagatgttgtcgcccgaaaagcggagcagcaggaatttttgggtcgtgatgttgccgtagatcgagatgttggagggagcggtcaccgagtccgtgcggtcgagacggtacagaccggcgacgaggaagcccagaccgaagccgacgtcggacgagtagttgggaccgggggcgatgctccagtcgatctttttctcgaacgtgcggtccacgttcgagcggctgtagtagtcgatgatccggcggatgaagcccttgcgctgggcgggtgtcgtgagcgccgccgtgtcggcgggctggcggcccggccgcgcttcggctgcgccgatccgggacagagcctccagagtcgaaggaaaattgtctttcgaggtgtcggcggtttgggccgttgtcgtgaatatcgtcagcaacaggctgaccgttaggatgatcctgtatcccttttccattgaaagtgaggttgaaggcggcttaaagatagcaatttttcgccaatgttcaaaatggacacccgcgcggagctttcggactgtcccgatacggcgataaatttctatctttgcaggggcggccggagcaggtgccggctgtccgactgcgggaaccctctgactgtccggttcgatgattgccggacatgcccggttgtcggacacgctgattgcccgatacgcccgattcccggatcggaaacctgccgcacccgatgattgtcggaacagattgttgaactgtatggaaattacacgacctctaccttcgccgaatccggttgaacagaccgacgccgctctgctgcagaccgcagaggaggtgtccgatgcggttttccgcagcgtgcccgtgcccccgctgatgcgcgagcatttctgggtgcagtcgtcggtgtttgcgggctgcattttcccggcgcccgtgttgcagggttctcattttacggatgttacgttccggaattgcgacctgtcgaacgccgatttgtcgggatgcagtttccagcgggtagagttcgtggagtgcaagctggtcggcgccaacctttcggaggggacgtggcagcatgtcgttttcgaacgctgcaagatggagttcgccaattttacgctgggaaaattccggggcgtccgttttgccggcggaacgatgcgcagcgtcggattcgacgaatgccggtttgaacgtgtggagttctcgctctgcgaccttacgatggcggaattcagtcggacacggttgaaagggctttcgttcgtcgattcggatattcgcggaatccgggtaggcgataccggatcgttcgagttgaaaggtttgaaagtcagtgcgctgcaggcttcggagctggcgcgtcttctgggactggaaatcgagggctaattgttattcaaaaaatttacataattcttaaaaaatattaataaaaatgtttggaagtttgttttccgggcattacctttgtcgcatcttagatgataaaatattttaagaattatttaaaattatttagtatgaaggcgaagatcaatgcgtggttccgtaccgctatggttctgttgggagagagcatcaaactgagagcgatgtaaggctccccttttttgagacaacaattaaaacttcgatatacgaaagagtcccggccgcaaagccgggactctttttattttgggtttccgcggagtgtgtttccgggagtgttccgcccggttgggcggcgtccgctatttgagacccagccgcttggcggtctccttgggcagtgcgttcttgttgaccatgatcgaagtggtcttgtactcgacgaacggccgcgagaagtaccagaacccgtcgtagggcgggcgtacatcccacgaattctggaccttgaagtagcggttgccggcctgatcggtcgccgtgcccatgatgaccatgccgtggtcgtcggtggtctcgtagttgtcgaacgcctgctggcgcatctcctgcgtgattctaagctccttgccgggcttgtcgaacttatagagcgcatcatccttctccttctgggtcagtttgccccagcgctcggcttcggtgccgtccatgttcgcaaggtcggcttcggggatgatgccgatggctttggtacggctgaaacctttctcgctcacgtcggtgccccacgatacggggtagccgttggccagcgcgttgtcgatgacggtcatcatctcgtcgagcggcaggttgtagaccgtgccccacatccagttgtcgggaatctcgatgatgaactgcgtgtagaacggatgatgcgtgaaggaggtgatgtcgatgtagtcgtccatgtcgatcggcagcgatgcggcgaacgaccggggcgtatactccttgccctcgtaggtgaatgtttcgggcatccggccgaaatactcgtcgaggatagcgtcgaagccgcgcttccatgccgtcgaaagcgctttgtccgaggatttgccgctggctgtgatcacggcgtcgaggtaggccttcagcacgagagacagttcgtggaaatcggctttctcggtgccgtagttgaagcccggataggcctcctgaggtacgatgccgtggttcttgattccttcggtcacgtcgtgcgaagcaccgccctcggcgaagttgatctcgccgtgcatgcggacgtatttcacggccttgtccatgaacgtgtggcgcacgatccacatctcggagaggtggaccggacggccgccggcgcgcaggatctcgccttcgaggaacgagagggtcgagtagcaccagcaggtgccgctgcggtgctggtccttgaccggggtcatggggatcagcttgacgtcggtgaatcggtatccctccggctcggttgcggcgggagtttgcgctgcggccgcgaaggcggtgcagaacgcaagggctgtcagcaggaattttttcatcgcttgtgctgtttgggtattggtgttcggttacttcttcgaggaagagacgatcttccggcactcttcgagcgtcagcgtctcaggcttggcgcctttcggcaggcggtagttcttgcctttgtaggcgatatagggtccgtaacggccgttcttgaccagcatgtcgggatcttcggggaagctgcgcagcggggtgttggccgcggctgcggcagcctgctgggcgcgcacgacctctacggcgcgctcgtaggtgagcgtgtaggggtcgtcgcccttctgaagcgaggcgaacgacttgccgtggcgcacgtagggtccgtatttgccgatgccgaccgagagctgctcgccctccagctcgccgaggtcgcggggcagggcgaaaagctccagcgcctcttcgagcgtgatcgactcgatcagctggcccttcttgagcgacgcgaagcgtcccttttcgccttcgttgccttcgatctcgaccatcgggccgtagcggccgatgcgggccttgacgacatgtccggttttggggtcgttgcccagaatgcgggcctgactcttcttgtcggtctgcgtgccgatggccgtatcgaccatctggtggaagggtccgtagaagtcgtggatcatggtgtcccaagtgatgtcgccgtcggccacgcggtcgaactccttctcgacgttggccgtgaaattgtagtccatgatgggcttgaactgcgtttcgagatagtcgttcacgaccatgccgatgtccgtgggcgaaaggcggttcttctccttgccgaagttctccgtgaggttcttcgaggtgagtttgtcgcccgtgagcgtgagctggacgtagccgcgtttctgaccctccttgttctgtttgaccacataaccgcggttgatgatcgtggtgatggtcggggcgtaggtcgaaggacggccgatgcccagctcttcgagccgcttgaccagcgacgcctcgttatagcgggccggggcctgcgtgaagcgctccgtcgcggtgatctgggtcgaaacgacccggtcgcccgcggtcatcttgggcagcaggccctcgccgctctcggcggcctgatcgtcgtcggtggactcggagtagagacgcaggaaaccgtcgaaacggaccacttcgcccgtggcgacgaactgctgcgacgagccggacatgtcgatcacgaccgtcgtgcggtccaactcggcgcagaccatctgcgaagcgaccgtacgcttccagatcaggtcgtagagtttcttctcggcgggcgtgccctcgatggtgtggttctcgatgtacgacgggcggatggcctcgtgggcctcctgagcgcctttggtcttggtcttgtagttgtgccacgacgagtatttctcgccgtagagcttggtgatctcctccttgcactgggcgagcgcctgtttggagaggttcaccgagtcggtacgcatgtaggtgatcagaccctgctcgtagaggtgttgggcgacggacattgtctgcgagacggacatgcccagcttgcggccggcctcctgctggagcgtcgaggtggtgaacggcggcgccgggaagcgctgcgcgggcttctcctcggccttggccacggtgaaggtggctccgatgcaggtgttgaggaactcctcggcctgctcgcgggtctcgaagcgcgatgagagctcggccttgaagatcgttttgtcgggatcgccggcggcatggaactgggcgacgacgcggaagtagggcgtagaacggaaggcgatgatctcgcgttcgcgctcgacgatgagccgcacggcgacgctctgcacgcggcctgcggagagcgacggacgcaccttcttccagaggacgggcgagagctcgaagccgaccagacggtcgaggatgcggcgcgcctgctgggcgttgaccagatccatgttgaccgtgcggggctgctcgatggcttcgaggatggcccgcttggtgatttcgtggaagacgatacgtttggtcttgtcgacggggagacccaacacttcggtcaggtgccatgcgatggcttctccttcgcggtcttcatcggacgccagccagaccgttttgtccttggccagcttggtcagctcgtccaccacctttttcttgtcggccgggatttcgtagacgggtttgaatccttcgccgatgtttattcccaagtcctttttcgagaggtcgcggatgtgtccgaaactcgatttgacgacatagtccttgccgaggaatttctcgatggtttttgccttggccggggactcgacgattactaaattttcctgcatgcgtgtatgttacttttcagaaatgcgaaaacctaagtatgtcacacttaggtttcgcttttcaggctgtttgtctcttatttgatcaggttgtacgtgacgtcgatcttgatcggaacgtcctcctcggtcacgccgtcgggcgtcatgccctgaaggacgctgtacgtcgtcgtatagacgctgtaggcttcgggacccagatagatcgtgcggttcttgatcttctccttcagctcgtcccacggagcgtccgctccgagttccgccttggcggactggtagctgttccacagactctgggcgtaacccgtgatgtccatcacatagcagccgcggctgcggttgatgtagccgccgtaagcgagcgtcgtgctgtagttctgctcgtaggcataggcgtagtcgggaatggccgagagtgtcttgtagttggtgtaaaggcccagacgggtctgcgacttgtccatctcctcgatcatatgcgccatgtcggtcagcttcgtccagtcgtaattgctgcccttgaagtagatcgacatgcggacctgagtcatggcgagcgtcttgaagttctgggcgccctcgttgcctgcgacgatctcggcttccagcgcgtcgaagaagggcttgtcgaacgtgatggcggttaccacgccgcccatgccctcgacgtagatctggtcgtaggtcggatggctcgtgatcggctcggaggtctccttggcgtcggcgatgtcgaacttggcatccgcgctggtcgccatgccgtagtcgcggcggatcgtattgaccgaaacgttgccgtactccgtggagatgctcgtattgtagaatatgtagcccatgccgatcgtatccttgatcagcgtcgggtcgctctcgacgcggttgcgcgcatagaccatgaaacccgaactttcgagttccgtggcgtagatgttgcccttgcccttctcctgctggtcttcggccggaacgatgtagagacccttgaactcctccacccactgcttgagactgtcggtgctgtagatcgagtagtcgtcttcgtaggcggtgcccgaacctttctggagcatcaggcggtcgatgaaattctgggttgccggggtcgtgttcatggtgaccgccgtggtggcgggacccgtcgtctcgccgtcggggaaggtgaaggtgaagaccggctcgtcgtccgcgccgataacgccctccttgacggggtcgaagttgaggtagaagaccgtgtcgcgctcggttttacccgcggcgaccggcttctcggtcaggtatttgttgctcttgatttcgtagacgttgtacttctgcggcgtgagcgtgtcgtttccgtagctggtgatcgtgatcaggatctgcgccgagtcgaagatcgggcggtagccgaaatagccctccttgacctcgtagacgttgaggtactgggtcaggaatcccgccgtgcggagtccgaacgtgtcgctgagcatcgagcccatgtagccgtaggagatgttggacgccttgagcgagtcgctctggaacagacgcgtctcgacgtatttggccgcatcgagtttccccgcgagcgtccgggcgccgagcgtcgtgtagcccaccttcatctgctggttgtccggcacgaggttcgaacccagcgtgtcgtcgaccttggtacagcccgcgaacgtcatgagcgcggccgcagccagaacggcggcggtgcggaacatgcggcggaaattattgcaatgcttcataaaatcggttgtaattatcgaaaaagtccgctgcctcaggcgactggtattcgagcatcggcttgccgcctgcgcgggcgatctccaataccttcgggtcgacatccggggatgccgcgaccacaccgtcggcatactccataacgaaacggcagagattttcgtatgacggggtgtcgagaattgcgagatttttatctttgaccccttcgccggcgatcttcttgccgaaggccttgtccagttcgccggggaagccgtcgccgtagagcgaaacgacgatcttcacgttgcggaagatggggtcgtcggcgaaaatccgcttcaggtagaccggaatcacgctcgaaaaccagccgtggcagtggacgacggtcggtgtccagcgcagtttcttgaccgtctccagcacgccgcgggcgaagaagatggcccgctcgtcgttgtccgggaaggccttgccctcctcgtcggtcagcacgaatttgcgcgagaagtagtcgtcgttgtcgatgaaatagatctgtacgcgggctgcggggatggacgcgaccttgatgatgagctggtggtcgttgtcgtcgataatgaggttcatacccgacaggcggatcacttcgtggagctggtgccggcgttcgttgatgcagccgtaacgcggcatgaacgtgcgtatttcattcccacgctcctgcatcgcctgcgtgagagcgcggcaaagtccggagctttccgtctctggaagatacggggtaatctcctgacagacgtacagaatcttatttgccatggttcgagtgttttgtctttggacttccgttttcgccgcccggcatctccggacggggccggatcggtccgtgcttggcggaaacggtcgctatctgttttgcaaagatagtgaaaaaatcttaaagaatgagcattgcgtcgccgtaagtgccgaatcggtatccttcctccttggccaccttgtaggcgttcatgaccgtttcgtagccgccgaaagccgcaaccatcatcagctgcgtggagtagggcaggtggaagttggtcaccatggcgtcggccaccgtgaattcgtagggcgcgaagatgaacttgttggtccagccctccatcggcttgatcatgccgttggtcgagaccgccgtttcgacggtccgcatgacggtggtgccgatggcgacgatcttgtgtccgtcgcgtttggccgaattgaccgcttcggcggcttcgtccgtcacgaagaactgctcggaatccatcttgtgtttcgagaggtcctcgacgtccaccgtgcggaagttgcccagaccgacgtgcagcgtgatgaaggacttgtcgatgcccttgatctccatgcgcttcatcaggtgcttggagaagtgcatgccggccgtcggggcggccacggcgccttcgtgccgggcgaagatcgtctggtagcgctcggcgtcctccggctcgaccttgtcgcgcacccacttgggcagcggggtctcgcccagactgaaaagcgcctgcttgaactcctcgtaggagccgtcgaacaggaaacgcagcgtgcggccgcgcgaagtggtgttgtcgatcacctcggcaaccagcaggtcgtcgtcgccgaagtagagcttgttgccgatgcggatcttgcgtgcaggatcgaccagcacgtcccacaggcgcagttcgcggttcagctcgcgcagcaggaagatctcgatctcggcgccggtcttctccttgttgccgtacagacgggccgggaagaccttggtgtcgttgaagacgaagagatccttttcgtcgaaatactcgatgatatccttgaagatgcggtgttcgacggtgcctttggcgcggttgatgaccatcaggcgcgagtcgtcccggttttccgtcggatgtttcgccagcatttcgggggcgaattcgtacccgtattgtgataatttcatggtgaaaaaatactctttttacgtcttaaaaaacaaaacagattattttctatacgcaaaaaagtctattttgtttcaagttcctccaactttttgagaaattcttcgaattcaaaggctttttcgagcgtaaagccgccgctgcgggtgcggcgcagcgacgtcaggtgggcgccgctttcgagcgcctgtccgatttcgtgggccagcgagcggatgtaggtgcctttgctgcaccgcacgcggatgcggatgcgaggaaggtcgtactccagcagttcaagttcgtagatgttgaccgtcgccttgcgcatcgtgacctcctcgccggcgcgggccagctcgtaggcgcgcgtgccgtcgatcttcttggccgagtagacgggaggctcctgaagccgctcgcccgtgagcgaagagagggctgcgaggaccttttcgcgcgtgatatgttcggtggggaaggtgcggtcgacggggtgttcgaggtcgtagctgggggtcgtggcgcccagcatcacgtcggcgacgtactccttctcctcggcctgcagcgcatcgaccatcttggtggcgcggccgatgcagaccagcaggatgccggtggcgagcggatcgagcgtgccggcgtggccgaccttgattttccggtagccgaggcggcgcagcgtgaatttgattttgcggaccacatcggtcgaggtccagcgcaggggcttgtccagtacggcgatataaccctcttcgaagttgagaccccgcaggtcgatcggttctttcattaacagatatagcttaggatggatacgaggcccgcggcggcgcagtagagcgcgaaccagatgagtttgccccgcttgacgatctcgatcatgaatttgcaggccagacagcccgtgacgaacgaagcgaggaagcctgcggcgagaggaccggcggccacgccggccgtgaggtcgccgctgacggcttcgagcagcgtctcgcccagaatcggagccagcaccatcaggaacgagaattgcgccacggcggcttttttgttgcccagcaagaggcccgtggcgatggtcgtgcccgaacgcgaaaggcccggcatggcggcgcaggcctgcgcaaggccgatgatgaaggcgtcgcggtaggagatggtctccttctggcggggtttggcgtaataggcgaaagccagcagtgcggccgtcagcagcagcatggcgcccacgatcacgaggatgtagggggcgtcgagcagggcgttgatccgctccttgaacaggaagccgacgaagccgatgggaatcatcgagagcacgagtttgagcacgtaggcctgctcggcgttgaaacggcgcgagaagagacccttcagaagacgccacacctcgctccagagtacgacgatggtgctcaggacggtggcggcgtggagcgccacgtcgaaggtgagattctcttcgagctcgacgcccagcagctctttggcgatctggaggtggccgctgctcgaaacgggcagaaattcggtgatgccctgcacgatgccgagcaggatggcttgtagagtgtccatttacggataagcggggttatgagtcgtcgcggcgatgccggaccttgggttgcgtgaattatttgtatcttttcaggatggcgtagatttcgatcacgaatccgccgatcaccagaatcggggccagcgtgatgcggcgccatgagaacatcgcgtagttgaactggtcgggcgaatcgctgccgccgccggccatcagcacgaagcccagcaggatcacggcgaagccgatcgccagcaggacgtagttgcggcgggtaagcggcattttggggttttcctgctccgcaggggtgttcttattcgcttttttcatttaataaaggtatatcttgttcgacttcatgttgacgaatttgttgagggccgcgacggtgaagagtcccgatatgacgacgccgcccgcaatcatcgcgccgaggataatggcgattttgccgctctcggcgatggtcgtcagttcggggaccgcttcgttgagtccgaagaccgaaagcccgaacagcagcgaggcccccagtccggccagtatgccctgcgtgatgctgctgccgaggaagggcttcatgatgaaccacttggtagctccgacgagcttcatcgtattgatcaggtagcgtttcgagaagatcgccagccggatggtgttgctcagcaggatcagcgagatgatcagcagcgcgccgccgaaaagcagcaggacgagccggattttgcccaccgtggcgtgcagccgctcggccatcagcgcgggatagctgacccgctcgacgcccgcgattccggagacggaggcgatgaagccgtcgagaagctccttgtcggccgattcggccgtgagggtcagctcgaacgagtcgagcagcggattttcgcccagaatctcctcgaattcgctttcgaacattttgcggaattcgacgtcgtcggccttatcctccttcgagacataggcgacggtcgcgaccagctcctcggcggtgagccgtttgttgatcgtttcgcgctgttggtccgagatgccgttttgcagttcgacggtgacggcgatgctctcctgcagggtctgggcgaccttcatcgcggcgaccatcaggtagcctaccgaccccagcaggaacagtacgagcatgatgctgacggtcgatacgatgtaggagttgcggacttttcgtttaagtctcttgtcgtctttcatagtcttatgcctttttcttgcggaaacagtatatcagtgccgcggcggcgccgagcaggatcaggagcgacgagacgagcgtcacggcctcggccgcggcccagcccggagcgcggaaccgccactcgacggtgtgccggccggcgggcagtttcatggcgcgcaggatgtagtcggcccggaagccgggcatcgcctcgccgtcgacgtaggccgtccagccgtggtcgtagaatatctccgagaatacgacgaccgactcttcgggggccgtgtattcgtatttctggtagttgggacggtactccgtgagcgcgatgccgcgcacgagcgtcgtatccgcctgtccgcccgcctgccactcctcggcgaacgccttgtcggcgggggcggcgacggccgtcgttttcagatcgacgctgcccaagaggtcgatctcctgctgcggggtgtcggctgcgacgatcccctcgacgaaccacgccggaccgttggccgtcgcgcggcgcacggcctgcggctggccgtcgtcgccggggacgatcaggtagcgggtgttgagcatgtcgagcaccgcgtcgttgcggtagctcaggtagcggtcgatcaggtcctgatagcgggccagcttggccccgtggtagccgccgaccgaacggtggaaataggaggtcgtggcgtcctgaaacgggctgaccgtgaggttgaggacgcggaaacccggatccttgtcggccaagatcgccttgtcggcggccgtggccgtgatctgccggcggcgcgccgaaatgaagtcgtcgtgcgagaggaaccgcaggtccacgggaacgaggtcgagcagcatcactgcgccgagcagcgccgtgagtgcgtatttgttgattctgcgcagggcgaacagcgccacgccgcccgcggcgagcaggatcatcagcagcgaacgccatgcgtcggcctgcatcatcgaagcgcgttcggcggccatggcgtcggccgtggcgatgcccatttcggcgtccatgccccggtcgaggtactcctgcatgttgttggctttgagtatctggtggaactgttcggtcatcatcgccgcgctctcttcgcgtccgaagtcgaagagcgagccgcccgcgacggccagcagcaggcagaggcctcccgtgacgcccgcggcccagccgagggccttgaagagccgccggcgcggaatttcgtcgcgccagagccgcatcagcgccagtgcgccgagcaggggaaccgtccactgcacgacgacgagggccatcgagacggtgcggaatttattgtagccggggagccagtcgaaggccagctcggtgaaccacatcaggttgcggccccatgccagcaggagcgtcagcgccgagaccgctacgatccaccacttgttgcggccccggaccagcgcgacgcccagtgcggcgaggaagatcgccgcggcgccgaggtaggtcggaccgccggtatagggctgcgttccccagtaggcgggcagctgctgcgcggcgccccgcagtccgtagtcgttgagcacggcggccacttcgccgtcgggggcgaagaccgtgcccgattcgcggcccatgaagtcgggaaccagcaggttgagactctccgtgcggccgtagctccacgccgtggcgtagtcgagggccagtccgtttttggacgtctcggcggtcgaagccagctcggagccgccgcgcatggtctccttggagtgtttggccgtgtaccagaggggcgagaagttcgagccgacggccagcaggcccgcggcggcgagcacggcggtgcggagcgcgaaattccggaaatgcttctcccggaaggccgtgacgccttcgctgatccagaaggcggccatcgccagcaggaaatagtaggtgatctgcgggtggttggcgccgatttcgagcgacgccgtgagcgccgtgagcgcgcctccggcccacatgttgccccgcagggtcatccacgcgccgcccatcatcagcggggcgtagaccagcgcccacatcttggtgatgtggcctgcgccgatgatgagcaggaaataggtcgaaagtccgtaggccagcgacgcgacgacgcccacccacggattgacgccgaagatcagcagcatgagccacatggccgtcatggcgaaaaagaggaaggcggcgggggtgtcgatgatcttgacgacccggccgagggtgttcttgacgagctgcgccgggtaggccacgttgatcaggtaggcgggcatgccgccgaacatgcggcccgtccactggggatcttcgcccgtggattcgcgcatgtcgttgatatccttggccatgccgtcgtactgcatgacgtcgtgctggggcagcacctcgccgcggaactgcggggcgaagtagactgcgctcaccacgaagaagagcgcgagggccgccgcggccggcagcagccggcgtatgatcgttttcgaagattccatatttcaagtcgttatccggtggccggagaccgtgcaggctcagggcggaagccgggcgcggtccgcattccgccggggcgcacgctgtctgagtgaacgtattaagcttcgcaaaggtacgaaaaaacatttacttgacgagcggcgattgcgaaaaatcactatctttgccaaagatatgcggcgacccggtgtgcggaggatttcccgaatcggacttcgctccgggccgtgttgcgtccgttgccgcgaacagaataggctttatgattacactcgatacgatccgcaaacccgtgactgcggaactggaggcgttcgacgaattcgtcgaacgtcagtttacggccgagggggaactgctctccgacatgctgcgctacgccctgtcgtcgcgcggcaaaggcatccggccgctgctggtgctgttgtcggccgcgatgaattcgccggtggcggaagcggccaaggggcgccgggtccatctggccgccatgctcgtggagatgattcacgtggcgtcgctgattcacgacgacgtgatcgacgaagccgacatgcgtcgcggcaagccgtcggccaatgcgcgctggcagtcgcacaaggcggtgattctgggcgactacattctggcccgcaacctgagcatcggtcttgggagcggccagttcgatctggtgacgcacgtctgcgggtcgatggcggcgctctgcgagggcgaggtgctgcaaagcgagtgcgccgagaagcacaccatgacgcggcaggcgtacctcgacatcatctataagaagacggcgtgcctgatcggcgtcagcgcttcggccggggcgatggccgtgggcgcttcgccgcagaaggtggccctgatgcgccgcttcggcgaggccgtgggcatggcattccagatacaggacgacattctcgactacacgcgcacggcgcagacggggaagcccgcgaacaacgacctgcgcgagggcaagatcaccctgccgctgctggccgtgctggacaaggtgccggccgaacgccgcacggagctgctggggcggctggcgtgctgccacgacgacgaggagtcggtggaatacctgcagcgtacggtcgagaacgaaggcggactgaccttcgccgccgaggtgatgcgcagctatatcgcgcgggccgtggagatgctctcggaatacgaggcgtcggattaccgtacggcgctggcgaacctctgcgcctacatcgccgaacgggaccggtaaacgggaaaactcattaacctaaatttcataaaactcaatggagacgaaaaaacaaaattacactttgccgatcattgtgatgatcttcctcttcggtatgatctcattcgtgacgaatctggcatcacctatgggtgacattctgaagtaccagttcaatgtgcccaactggatgggaacgctgggcgtgttcgcgaacttcatcgcttatgcgatcatggggtatcctgccggcaacatgctgcagaagtacggctacaagaaaaccgcactggtcgctatcgccgtcggctttaccggcgtcggcatccagacgctctccggctcggtcgagagcttcggcgtctatctgctcggcgccttcatcgcaggtttctccatgtgtttgctcaacaccgtcgtgaacccgatgctcaacaagctcggcggaggcggaaacaaaggcaatcagctcattcaggcgggcggctcgttcaactcgctctgcggcacggcggtcatcatcctgaccggcctgctgattccggagggtatcaagaatgcgcagatcagcaacgtattcccgctgatgtacggcgcattggccattttcgcattcgcattcatcgtgatcgcgctgacgaatattccggagacccagaagacggagggcaagaaagtcgccgagacgtcgaaatacagcccgctctcgttccgtcacttcattctcggttccgtggcgattttcgtctatgtgggtgtcgaagtcggcgttcccaacgtgctgcagaagtggctgcagaatcctgagctgaatgtgctgggcagcggcgtgaacgtcgaggctatcgcaggttcggtcgccgccacgtattggctgctgatgctggtcggccggcttctgggtgcaatgatcggcagcaaggtgtcggcgaaaagcatgctgatggtcgtatcttcggccggcctgctgctgacgctgggcgccatgttcgcgccgaacgtgccggtcaacctgccggttttcaacggcgcggagggcttcggactggtcaacgtgccggtgagtgccgcgctgctggtgctcgtcggtctctgtacttcggtcatgtggggaggcatcttcaacttggcggtcgagggattgggtaaatatacggaaaaggcttccggtattttcatggcgctggtctgcggcggcggtatccttcccctgctgcaaaacggcatcgtcgatttgacgggcggcgtaggctacctgacgagctattgggtgatcgtagccggtctggcctatatgctctactatgcgcttatcggttcgaagaacgtcaacaaggatattccggtggactgatgctccggtcggaaaacgaaaaatcccggcgccgagtttgcggcgccgggattttttttgctgtagccggggaggggcggcggctgtttgccggggacgggggcttgcagaggaagggaatgcttaatccggccggcggaatggcgcgccgggatgggccggagccggggccgggagcggagaaggggcaggacaggagcaggaatgcggatgcggagagccgccgcaggcggcgagatgctggcggcggggaggtcgggcaggaaactgaatggcgggccggaataagaagcggaggacggggcgggctgaaagggacgggcggcggcttcggatggaagagacggcggataagagaaaaggcagcccgaactgaaagacggcggctatgaatatgaataagaaacaagtgatgcgctggtgggcgtcggactgtgagcctgagagggacggactgcgggacggaatggaaagaacagccggttgaagagaagggacgaagcgaaggggcggaatgaaaacggaacggggtgcagggtgcaataaaaaacagggaagccggagcttccctgtttttcttgctgaccgtccggattatttcttgtccgcgctggtcatgcgcttctccttgatgcgggccttcttgccggtcagatcgcgcaggtagtagatacgtgcgcggcgtactacgccgaccttgttgacctcgatcttgtcgatgtggggcgagtagagggggaagatacgctccacgcccacgccgcccgaaatcttgcggatggtgaacatcttggtcttgcccgaacccttgatctggataactacgccgcggaaactctgcacgcgctccttgctaccctcgacgattttgtaggatacggtgatcgtgtcaccggccttgaacgacggaacatcggcatccgtctttgcccacatctgctcgtttacgagcttgatgattgcgtctttgttcattgttgcaacaattattgtgtttcgcacccaacattcccgctgtgcccgacttaccatacggataccctgatccgtaatcccgcgtccgcggcttcggaccgcctgagccgtccccgccgtcttccgcaaccgcgcggcacccaatgaaagaggttgatatacgccctgaaagggagtgcaaatatacgaagtttttttcattcggcgcaaacggggtgtaaaaatatcgtttcggggcgcgatttatcgttgtctttacggaaaacgggggcggttcgggcggaacggggggggcggagcgggagacggctttggtaaagcggaaggcggcttggatacaacggggccggcttggacataaccgagtcggcttgggcaaaaggagagccggttttggtaaacaaggggcggcatgcacaacgggaggggcgctacggacgcaacgggatggcatggacacaacgggacggcatggacaacaaggtgcgccatggacaaaacaaggtgcgccacggacaaaatcggaaacaaattttcgttttgtcgcccgcctttcactatctttgcggggagacagacgccggaccggcaggtcgaatgccgggaaaattttgtgcggatacgcatttgagaacggtttgtgctgtctttgcgataaatttgagactatgaaggaagagagactgatacttgtcaccaacgacgacggatacgattcgaaaggacttgcggcggccgtggaggtcgcgcgcggcttcggtcgcgtggtcgtggtggcgcccgaaacgacgcagagcggcatgagccaagccatcacgatgtacaacccgctgtacctgcgctgcgtgcggaaggaagaggggctggaggtgtacgccttttccggcacgccggtggactgcgtgaagatggcgttcgattacctgctgcgcgaagagcgcgtcgatctggtgatttcgggcattaaccacggctccaactccgccgtgaacgtgctttattcggggacgatgggcgcggcgatcgaaggcagcttctacggctgtcccgccgtcgggctgtcgctcgacgatcacggcgaggacgccgatttcgaggcggcggtggcgtacggcaggcggatcgtgggcagcgtgctcgaaaacaggatcgagctgccgctctgcctgaacgtgaacgttccggtcggcaggcccgacgagctgcgcggcatccgtctttgccgccagaaccgtggcttctggcgcgaggagttctaccgccacgaggatccccgcggcagggagtatttctggcttacgggagccttcgtcaacgaggagccggaggcgcaggacaccgacgaatgggccttgtcgcacggttacgtctcggtggtgcccgtgcaggtggacctgacggattaccgtcagctcggagcgcttgccgaagtgctgaaataatcgtatatttgcagtaaagtaaatagtcaggcctatgctgatcaaaatcctgctcgtcatttcgatcatcgtccagaccctcgccacggcttacgccctgcggctggtacgcgccaccaagtacaactcggtgtggattctcttcatcgtgggcttctcgctgctctccgtcgagcggttcgtgcagctgctgatggccggcgggcactacgtgccgcgctggtggttcggctatctggggatcgtggtctcggtatgtctgtcgatcggcgtcatgtacgcccacaagctgttcaaatacatcgaccgcctgaaccggcaacggcagctgctcaacaaacgcatccttacggccgtgctccgcaccgaggagaaggcccggtcgcgcttctcgaaggagctgcacgacggactcggcccgctgctgtcgtcggcccggatgtcgctctcggcgctttcgcgcgaggagcgctctgcggaccagcgcgagatcatcgacaatacgacctatgtgatcgacgaggcgatccgttcgctgcgcgagatatcgaacaacctctcgccgcatgtactcaacgatttcggactggcgcgcggcgtgcagaacttcatcgacaagagcgcggcgatgcacgacgcgaagatacgcttcacgacgaacctccgcacggagcgttacgatacggatatagaggtgatcctctaccgcgtgatctgcgagctgataaacaactcgctcaagcacgccgcctgcacgtcgatcaacctgtcgctgtcgcagaacggctcggagctggctctcgactatacggacgacgggcgcgggttcaatccgcaggcgatgatggactgcggcatggggctttcgaacatctcgtcgcgcatcaattcgctgggcgggaccttcgacatttcgagcgccaagggcaaaggcatgcgcgccgcgatccgggtcaatacgcagcaggagccggcgaccccgaagcgcaaacgccgtaaccggtagaatcatggaacgcaaaatagtactcgtagacgatcattcgctcttccgcaacggactgcgggggctgctcgaacgctgcgccgggtgccgcgtcgtgggcgaagccgccagcggcgaggagtttctcgcgatgctgcccggactggagaccgacgtggtcttcatggatttcgccatgccgggactcgacggggcgcagaccaccgaacgggcgctggcccggcggcccgacctgcggatcatcaccctctcgatgttcggcgaggagagctattattcgcgcatggtgcaggccggggcgcggggatttctgctgaaggattccgatatcggcgacgtgatcgaggccatcgacgcggtgatgtcgggcgggagctatttcagtccccagctgctttcgtcgcttacggggcggatgcgtacgcgcgacgacgtgcccgacgagcagctttcggtccgcgaacgcgagattctggtggccgtgtgccgcggactgtcgaatcaggagatcgccgacgaactgtttatttcgaagcgcacggtggacaagcaccgggccaacattctcgaaaagaccggctgcaagaacaccgccagtctggtcgtttacgccatccgcaacggaatcgtcgaaatctgacctcctgaaatcctgatgtcggcaaaaatcgtccggccgcatgcgtctgtattcgcgtgcggcgtattggtatgcgctgttggctgcagcgcgtttacagcagcggcgagaagacccgcatgagcgattcggcgacgcggcggctccgggggcggcggaaccattcggccggggtgagcggatggctgcgcgactggtcctcttcgaagacggaggccatgcgcgccgtgaactccccgtcgtagacgaaggcgttgacctcgaagttgtgttcgaaactgcggaagtccatgttcgcggagccgatgaccgagagcatgtcgtcgatgatgagcagtttggagtgcaggaatcccggcatgtagaagagtatctttacgccggccttcatcatgtcgtcgaggtaggagtgcgtcgccagatccacgaccttcgaatcggagcgtgcggggagcatcagccgcacgtcgatgcccgccagcgcggcctcctgcagcgccgagttgaggacgtcggacggaaggtagtagggggtttggatccaaacccgccgccgggcgcgggcgatggcgtagctgtcggcctgcagcagcgtccgccatttgccgaaggggccgctggagacgatctgcatgatattgtcggtgaaacgcgccgcggggggatagtattccgccgcggcgatctgctgtttggtggtcgccgaccagtcgctcaggaacgacgcctgaaggcccgcggcgccgctgccctcgatccggaaatgggtgtcgcgccatgtgccccaccgggtgccgcggacgtagcggtcggcgatgttcatgccgccgaggaagcccacgcagccgtcgatgacggcgatcttgcggtggttgcggtagttgaccttgctggtgaagagcgggaatttgacgtgcaggaaggcgtagacctcgatgccttcgctgcgcatgctgcggaaaaaggattttttggccccgctgctgcccacgtcgtcgtagaggatgcgcacctcgaccccttcgcgggcctttgcgatcagcgcgtcgcgcaggcggcggcccgtttcgtcgtcgttgaggatgtagtactggatgtggatgtggtgctttgcgcaggcgatttcggtcagcagggcctccatcttcgaccgcccgtcggtgtaggtggtgatccggctgccgtagagcggaatcgagtggctcgtgttggtcagcagggcggccagcgggcggtactcttcgggcaggccgggaccgtcggtgtgctcggcctcttcgagctgcatggtgatgcgcttgcgcgtccggcgcgagatgatgcgctgtttggagaggttctggccgaagaaaaaatagaagatcagccccacgacgggggccagcaccagcacgatgatccacggcagcgtcttcagcggattgcggttgtcggtaatgacgaccagaatgatgccgaggatggtgaccgaatagataatcagaaaaatgtatgtcagaatttgctgcatacgggtttcttcatcggtgcggaggaccgccgggcggggttactgccggggctgctccggaaatttcagcaggtagagcaggtgctccacgccgcgcacgtagttgcgcttgtggtttttgggcgagtagacgtagcagtcgatggtgaagacgcggccggtggccgtatcgacggtcgtgtagctgacgaacgggccgcccatgaagtcgccgtggacatcccagaaaccgcgcagctcgcaccacaggcgcccttccaagcggaacatccggtagtcgggttcgaacgcttcggaggtggtcatgtacgaaccgtcggcggggccgggaatgcgggcggcgaatttgttgcgggccgcgagcagggcgcccggcgagagcgactccttgccctgataggggtaggagtagatgaagaaaccctgactggccgtggggtattcgtagcgcgcccagaggaaatccttctcgtcggcggccagcacgtagcctttcgggacggtcatgtcgaccccgaacgtgctctttatcgctttggcgacgcgctgttcggagaaggcttcggcgaatttgaccgcccggtcgcgctcggccttttcgagcacctgcaccagactttcgcggtgctcggagaggtagtcggtgagcgccttgtcgtcgggaccctgcagggtcagcacgatctgcggttcggccgtcacgtcgtattggacggcgatgttggtcgcggcgagcgaggggtcttcgacgatcttgaggatgttgcggtggtcggcgaccatgcctgaaaatccccgttcggtgacgcggagcacgtcgaacagcggctcggtctggttgaggtagggaaccggagccgtgagtatcgagcgcagcgtgtcgcccagctcgcccgtccactcctgctgggggcagacgacgatcagctcgtagggggagccttgagcggttttgagccgcgatttggtcagcgaatggaatgcgtcgcaggccgtcatcgctgcgaaaagggccgcggccgcggcaatgcggaaaaacgttttcatagccggtcgtaagttgattctacacacaaatatagctaatttttcggaaaagcgcggattttcactatttttgcaggatgataaattccccgcccggaccggcacggacgaaacggttcgccgctgtcgcggtctgcgcgggcttggtccggaataggaaaccatgcgtttaaaaccaccgaaaataatccgccggctgatgccggacctgatctgggagatcgacgacccggagggcgtgttcctcacgttcgacgacggaccgactcccggcattaccgagtggattctcgccacactggacaagtacgatgccaaagcgacgtttttcgtgttgggaaaaaacgtcgagatgtatcccgacctgttcaggcgcatcgtcgatgcgggacacaaggtgggcaaccacacctattcgcaccagaaggggtggggcatgagtctcgaacgctatacggaggatgtggattttgccaacgacctgattcatagcgaactgttccggccgccctatgcgcggatcacgccggcgcaggcgcggtttctggggcagcgttacaagctggtgatgtgggatatcatttcgcgcgactacaaccgcaacctctcgccccggacctgcctgaggaacgtgacgaagtatctggcgccgggggctatcgtggtgtttcatgacagcgagaaagccttccgcaacatgcgctacgccctgccccgcacgctggagaaaatcagacagatggggctgaaatgcaaagccatcgaattctgacatgaagatcgtcgtcgccataaccgccgccagcggcggtatttacgcccggctgacactcgaacggctgctgcgctcgtccgaagtgtcgcagatcgcgctcgtatgcagcgcctgtgcccgcgaagtgctggcgcacgaggatgtcgtgctgccggaggacgggcgtatccggctcttcggcaacgacgatctgttcgcgccgccggcgagcggctcggcccgctacgacgcgatggtcgtcgtgccctcgacggtcggcaccgtggggcgcgtggcggccggtgcggcgcagagcctgatcgagcgggccgccgacgtgatgctcaaggagcggcggaagctggtgttcgtggtgcgcgagacgcccctgtcgctgatccacctgcgcaacatgacggcgctgaccgaagccggggccgtgatcctgcccgcatgcccttcgttttacgccggggcgcaggacgtcgagaccctctgcggcacggtcgccgaccgcgccgtggcgctgctcggcgtcgatgcggagcactatgaatggggcgaataggaatttacggatttttttcgtaactttgcgacctcgaaaaacatctaaacagaatacctttatggcaactacagctgacatcaagatcggtatgtgcatcgaactggatggcaagaccttccagatcgtggatttccagcacgtgaagccggggaaaggccctgctttcgtgcgcaccaaactcaagaacctcgaatcgggccgcgtactcgacaacaccttctccgcaggatcgaagatcgaacccgtacgcgtcgagcgccgtccctatcagttcacctacgaggatgatctgggcgcccacttcatgcacacggagaccttcgaggagatcaatatcgacaagaacctgatcaccaactacgacctgatggccgacggccagatcgtcgaggtgatgttccacaccgagaaggagaccgtgctttcggccgagcttcccccgatcgtggacatggaggtgacctacaccgagccgggcatcaagggcgataccgcatcgaccaactcgctcaaacccgccacggtcaataccggcgcaacggtccgcgtgccgctgttcatcaacacgggcgacaagatccgcgtagacacccgcacgcgcgagtattacgagcgtatcaagtaaatcgccgggcgactgccggttccgggccgaacgtccggatcgaaaataaacgggggctgctttcaaaagcagcccccgtttatcggtttgtgcggcggtcagtcgccgaccttatacatgacgtagaagagttccgtcgaactgcgccacatgttgtcgtagaacgagtcgcgtcccggttctccggcggcgctgggcagcaggaagcggaaaagccggttgttgccttccgtgccgaagatcatggtcgaggagacgttgttctgcgtgatcttcatctggttggtggtcaggtcgagggtccactgcgattcgcccggcggaagcaggtgacgcagacgcgggttcatgtccagcggggcttcgacgctgtaaggcgcgtagacaccccagaaattgccgtacgccccgtcatcgccggccgaatggacgagcgttcctgtgagttcgttgtcggagatctcgccgagcgtgatcgtcacccggtcgtcgtattcgggaagtccgtaggtgccgaattcgccgctgctgagctgcgtcgtccaagctccgtcgccgacgccgctgacccgctggttgcacgccagcttgacatcgacgatgcgccatgtgccgaggaagaacggatcgtaggtttcgaggtagatccaccagtcgagcctgtgtcccgaccgggaggtcacggtgatgcgcgcccggcgttcggggttgctgaaattgagcacgtcgccgttcccgacgctggcgctggcgccctccgagacgacgattcccttgacgggaacccggtcgtaggcgaagccgggagtttcgaggatatagaccgttgcggtggcccggctgccgtcgcggtcgatgatggcggttcccatctgtccttcgacgcgcagttcgagcagcgaacgttcgttgccggaaaggtcctcgtcgatggtcttcgtacacgatgacagggccgtgacaagcagaagggcggtcggtatgaggtattttttcatcttcgtagtgtctatttaacgttcggattcaaatcgagttcgcgctgcgggatcgggtagaaggccgcctgctcttcggagagtttcgtggcttcgggaaccgtagcggtgaccgacgccgtgcggcgcaggtcgtagaggcggttgccttcgaacgccagttcgagggcgcgctcctgaatgacggctttgcggaattcggcgagactcatgccctccggcagctccgggattccggcgcgccggcggatttcgttgaccagcgccagtccttcgtcgggaccggccgcttcggcgaagacgagcgcgatgtccgaatagcggatcaggaagggacgggcgctggtgcgttcgccgatgaagtcgggatcgacgtatttggccgagaagtagccgcgaacgggagagggggtgacgagtttgccggtctggtcgtagatgtccttgtggatcagctccgtgcgccgcttgtcggtggcgaggaaagtcttctccacgaagttgtcctcgatcaggaagacgccccagccgttgccgttgcccttctggaggctgccgtcgctgtagcggatgtagatcggcgcggagccgttgttgggcaggaactggagcgggattttcgaatacatgccttcgtgcgtgccgctgcggtcgatgcccatgatgaagatgtgttccggtccgtcgggtttcgtaacgtcgtagatgctgcgcaggtcgctgtcgaagttgtacgtctccttatagtcgaaaaccaccttgcgcgaccagtaggcggcctgcgtatacatttcgtcggcgttgcgcggcgccgaggcgtagccgggagccttgcaggcgatgctcgacgcgagcgtcaggtagactttcgagagcagggcctgcgcgccgaccttgtcgatgcggccgaagaccttgtttaccgtgagcatcttttcggccgcgagcaggtcctccagaatccggtcgtagatcttgtcgatcgactcggccatctggggcgtcgtctcttcgagcgacgagatcggctcggtgtagagcggaacccggccgtaggcccggacgaggttgaaatagttccatgccctcagaaacagggcctcgccgacgacgcggtttttcaccgtctcgttcagattgcctcccgaaacgcgttcgatgaccgtgttggcgcggttgatgccgatgtagcagtatttgaagtagtacatcgtcagctcggtttccgaattgacagtccattgctgcagcatgtggatgtcgcccggctcgtccgatttgggatacatcgtttcggtcgggatgtcgcccagataccagattccgcggaggtattcgaggtagttcaacgcattgtaggcgtacatcaggcccgattcggcatcctcctccgtcttgtagaagttgtcgctcgaatagaagccgtagggggtctcgtccagcgagcaggccgaaagcatgccgaccgcggcgagcgtgaatatgatctttttcatggcttgtcagaattagaagttaaggtcgataccgacggtgtatttgcggagtttgggatatccgccccagtagatgccgtcgagtcccacttcggggtcgtatccgtcgaatttggtgaaggtgtgtacgttgtctatgttggcgtagatgcgcatgcccttgaggaacctgcggttgaagtggaggttgtaaccgagggtgatgttctggatgcgcaggaacgagccgtcctgaaggaagtaatccgacagccagtattgccgggcgttgttcagccgcgggaaatcgttggtcggattgtccggagtccaccgcttggccttgacgcgcgggctgaacgtatagttgttgtacagcacgtcgttgccgtagacgccgtagaggaatacggagaggtcgaggttcttccagcgcagcgagaggttcaggctggccgtgaagtcgggattggggtcgccgatgatgcaccggtcctccggcgtgatggcgtagtcgcccgtcaggtctacgtatttcagttcgccgggacggtctttcagtccgtcggggtcgatgaatccggggtcctgcccctcctgaatgatgccgtcgacacggtagccgtagaatacgttcatcggatggcctaccgcatagatgctggcgttctggttgaacatggagatcggttcgccggtcacttcgtagtacatgcccgtcaggtaatcctgcgagagaccgctcgaaatggcgtcgcccaagcttacgaccttgttgcggttcatcgagtagatgaaggtggccgagaaactccagtccctcgtgtggacgatgtcgccttcgaggctcacctcgaagcccttgttcgtcacttcgccgtcgttgacccatattttgtcgtagctcgacgacaggggcaggtatttttcacgcagcaggtcggtggtctttttgtagtagacgtcggcggtcagccgcaggcgacggtcgaaggctgcgaaatcgacgccgaaatcgagctgcgaggtcgactcccacttcaggtccggattggcgatgccgccccataccatgtaccggttgttggcgccggtgcggcccacctcgtagccggggccgatcacggtcgcccactcgccgttgtgccagaatttctccatgccgtagcggtcgagggtctggtagctgctgatgccctgattgccggaagctccgtagctcaggcgcagcttcagttcgctcagccagcgcgattgcttgagccacggctcgttgtgcatcttccagctgacggcccccgaagggaagtagccccacttgttgtttttgccgaacttcgtcgagccgtcggcgcgcatggtggccgtcagcaggtatttgtccttgagcgagtagttgatgcgcccgtagaaggagagcagcttgctcaggtagtacccgtcgttgtatatctggcgcaggttggggttgccggcgttcatgttttcgttctggaggacgtcgttgacgaatccgcgggcggtcgtgtagagtccgcggcccgtgtcccagttgtaggagtggccggccatgacggtcagggcgtggttctcgttgaacgtgcggccgaatgtcaggtaggtctccgacatgaggttctggttgaacgaattgttgatctgggcgatgccgccgttgtcgttggcgtcctgcgaagtgttgctggcgcggtacacgtcgccgaccgaggtctggtagcggtagtccagctgcgagtggatcgtcagccccttgaccagctcccagtctacggccagcgaggtgacgaagtcgcggccggtggttttgttcagcacgttatccagaatgaccagcgggtggccgaaatcctgcgccccggccagatagtagttgccctccttgtcgtagacgggccaaagggggttgcggccgtattcgagtccgttgctgatgttgcggttggtgatcgagaagacgttgtaggaggtcagtttcaggttcttgtagaggttgtaggtgacgccgaggttggcgttgatgcgctcgtaggagtctttcttgtacaatccctgattgttgtggtagttgacgttgaggttgatcgaggcgcggtcgttggcgctgctgatggctgccgtcgtgctgttcaggacgggggttctcaggcagaggtcgcgccagttagtattggcccattcgccgttctgtatctcaagcagcgagggataatagatgccgccgatggtctggccgatgtagatggggttgagtccggcgtttacctgctcctcgttggtgacctgagccatgagcatcgggtcgtaccagatatcgagcgggtcggagagctggctgatgaccgtctggtgcttgaccgaaatgttggtctgcccctttgcggccgacttggtcgtgacgaggatcacgccgttggcgccccgcgatccgtagattgccgatgccgaggcgtccttgagaatctcgatcgactcgatgtccgagacgttgatctgcgagaggttgcccgcattgcccatcgggaagccgttgactacgacgagcggcgtgttggagccttcgagcgagctgttgccgcggatgcggacgatcgctcccgcacccggatcctgcgaagtgttcagcacctgaagacctgcggcacggccctgaagcagtccgtcgaccgaagtggaggagaggttgtcgagcgcccccattttgacggacgccaccgaaccggtgaggtcgcttttctttacggcgccgtagccgaccacgaccacctcgtccacgagtttcgaatcgtcttcgagcgtgatcgggtagaaggtcgccgtggtgacctccttttccgccgttttgtagccgagcatcgtgatctgcagggtcgcaccctttgcggcgccgagttcgaacgttccgtcggctttggcggaagtgccgttggtcgtccctttgacgatgacgctggcccccgcgacgggctgaccggccgggtccgtgattttaccccggatgttctggggctgggcccagaccgttccggcggcgaagagaagaacggctcccagcaggaaccggcccaagttggttcgtaagtttggtttcatagggttgttattttgttggttgtcagtagctcgtgtattccgagggcagcgggtcgggctgcatctccccggccagatagtcgtccagacagatgaaggtgccggcggtccagcccagcatcgcgggcatctcgtattcgttgctgacatcggtcgttcccgtttccacgttgtatttttcccagaggttgcccgtcgtcttgaacgactcggtgaccgctttcatccatttgacggcgatgcgttcggcctctttgccgtatccgtagcgggccagtcccatcaccgcatagaagcagaccggaggccacgtgttgggataggaccactggtaggggtagtcgtagggcttgtcctcgcaggcagcgatgccgtaggggaattcgagccgcacgagcgcctgcacgatgtctccggcgtattcacggggtacggcgccggtgtagaggagcgagaagaccgctcccgaaagcacgtcggagcgccggccgttgacatagtcgtagtcgtagaactgtttcgcttcggggtcgtagcagtattcgagtatccgtgcccggcgaagctccgctttggcgatccattcccggatctcgtccgtgcggcccagctcctgcgcgaagcgggcgaagttcacctcgtacatgaagaggttggcattgaggtccagcgggcagaaatccgtacaccggcggtcgtagcgcgggttgaagtcccagcccgattcggcttcggcgacgaagtcaagccccagcttgtggagccgttcgggggtgtagcccttgtcgaagaggtccgttccgaggcgtttgccgccggtgaccagaaattcgtcgaccagagcgtccgatgcggagcttccgtagcggttcagcccggtgggcgtcaggcgctcccgcatccagaatccgtactcctccttcagggtctcgtatgcgtcggcgagccactgcttgtcgccggtctgccggtagatgcggtcgaccatcatggagaggtagggcgtctgcgaccgcgcttcgtaataggtgcggctgccgttgtagaccttgccgaagcggcggaccatgtagagcaggttgtcggtgttgcctttggccagttcgggatggccgtcccggacgagtccctcgttggtgaagaaggtgtcccaatagtacatttcgcggaacatcgccccggccgtgggaaccgtgtaggggtaaggcaggccgatgagcgtggcggtgtcggcggtgcagtgctggacggtcgtgtgccagttgtcgcggatgaactcccgcacggccggcacgtcggggttctgcgggcggcagccggcgaatgcgagacctgcggcggcggacatgacgataagtatttttttcatgggtatctgtttttcggggttaataggtgtcggccagcgacattgatttcaggcgccgcgcaagctccttggcattcagttccgacgccacgcggacggtgcgcgtttcgcccggcatgaggtcgaagaagttgtcggagaagtgcgccgtttcgccttcgaccgacagatagacgccccgcgcgaagttgtccgaccggacggtgacgtcgtactccccgccggcccggtcgaccttgcagtgcagggtcgttttcgggtaattcatcgttttctgctgtacgaggaagtagttgttgcggtatgtcttccccgcagcggtgaatgtcgcctgaatgacgacctcttccggagcggctccgttcagcagcgtccgggtgtcgatggcggcgactttcgtgctggcgttggccgggacgtcgatctgctgttcgaactccccggtccggccgcccgtcagacgcaccgcccggacgcacaaggtgcctttctccggagtgagcaggtcggaaacggcgtagatgtcgagctgtccgccgtcgaggatcggggagatcagtatgtctgcgaatgcgtagcgggcgaagtagtgctgcgccttccagacgccgtaccagtcgcggctcgaccacgaagctaccggccagcagtcgttgtgctgccagtagagcgatccccagcagtagcccttgtcgcggcggtgcgcctcgatcgccgttttgatggcgtcgccctgcaagatctgggaggcgtagaggaacgactcgaaatcgcgcggttcgtggtattcgttcagcaggtagcttttgatcaggttgttggcgtgttcgccgccccgctggtgggacatcatgacttccgacgtgatgtcttggtcgccgggcagcggcgcgtagcgcttcaccgtttcgaaacacgggaacgactggaacccgtattcactgaagaaacggctgcgctggcggttgtattcggtgatgggctttttggcgtgccatacctcccagtagtgccggtcgccctcgtggtcgttgctcatcgcgccgtagtccgagaagggcgaggtgggctggtaacccatgtcgggggcgtattcggccaccacttgggccagcatgcggtaatactgctcctcgtactgtttccagatgatctcggagtatttcgggtcgactttgtcgacgtcgtatttccagccgctgagccacgaatcctgattctcgttgttgccgcaccagtagaccacgcaggcgtggttgcgcaggcgtttgacgttgtcgacagcctccagacgcatgttctccagcagcgccccttcggccgggtagaccgcgcaggcgtacatgaaatcctgccagatcaggatgccctcgcggtcgcaaagctcatagaagaagtcgtcttcgtagatgccgccgccccagacgcggagcatgttcatgttgacgtcgaccgcgtcccggatcgtgcgttcgtaggtctcgcgggtgacgcggggcaggaagcagtcgcaggggatgtagttggcgcccttgcagaaaacgggttcgccgttgagcaggaaccgcaggctgcgtccgtaggcgtcgggtttcttttcgacggtgacggagcggagtccgacctgtgcgctgtggccggccagcacgcggtcgtccagctccacggtggtgcggaaagtatagaggtgcggttcgcccatgccgcggcaccaccatagttccggatggtcgatcgtgaacgggacgctgacccggttcatgcccgcgtggagctgcacgctgcgcgaaccgagcacccgtttgccgtcggagacggtgacgacggcgttttcgacgggcgcagccgcttcgatctccacctgcgtctcgacacgggcggcttcggacgagacctccgtctggcggtggaatacgtcttccagacgcagctcgttccagccctgaagttttaccggacgccagatgcccgacgtaaccagccgcggaccccagtcccagccgtaatgatagcccgccttgcgggtgaaggggctgagttttttcccgtcgagtcccccgttgtccgcctgatcgttccaagcctcgtaacggtagggcagggattcgtactgcggcagggccttgttgatcggggagtggaaatagacgcgcagtacgttgccgcgctccttgagcaggggtttgacttcggcggcccagcggcggaacatgttgtccgccgtcaggatccgggtttcgttcaggaagacgtcggcataggtgtccagaccgaggaactccagccggacgtgttcgtagccgcgcgtcagcgttccggtgtcgaaggagacttcgtagatccagtcttccttgtcgatccactgcagggagcgttcgttgagccggtagtagggatcttcgatcagtccgttgtccagcaggtcggtgtgcaccacgcccggcaccgtcgccggatgccattcgtttcggttcgcctgtctgaacttccagccggagtgaagcggcatcgtgtcgttggcggccgatccgatcgtcgccgatcccgctaaaaataatgtcataattgccttcagagtttgtttgtgcatgactagttctctttggtgagggtgagggtcatcgtgttcaggttcagattgatggtgtaggttcccgacgtatatccgaagcgcgacggatagaactgcgggtcgcccttggcgtcgctcgtggcctgatcgtcgatgcggatcaccgtgccgaacggcgcgtcgggggtctgtccgtaccaaggccaccagccgtcggacgaagcgaagatcttgaatcccttgtaatcgccgtcgaaattcatggcgacacccgtggcttcccattcgttgtcgcccttcttgggcaggtaggtgcggctctcccaaccgcccggagtggcttctccggtcatcgaataggcggtcgagtagtcgatgcttttcgcggtgagcgtcatcttcatcgtgttgaggtttacctcgatgtcgtacacgcccttgccgtagccgagtttgccggggtatacctgcggcgcgtcggtgtcggtgacaagctgcagcgagatgttgtcggccgtggcgtcgtcggtcatggcgtagtagacgccccagttgtcgcgttcggtgaacatcttgaagcctacgtcgccgttgtcgccgaacgtcatgtcgatattccgggcgcggtagatgccctcttcggccttggcgagctgcgtgccgtcccatgtccagccccatgtgaagcagccgccgagcaggtagagctgttcgggcagcggcgcttcgggcaggtcgcccgtgcgggtgagggtgagcagcttcgtgtcgaggtttacctcgatgtcgtaaacgccgttctcgtagccgaacgatcccggctggaactgcgcttcaccgcttttatatacggcgatctttccgaacgtctccgccgaaaggtcctgtgcggcgaaacgggggtcgtccgtgtcgttgacgttgcgcgagaagtagaatttgaagccgttgttcaggctcatgggctgcacgcgcagctcgacgccggaggcctgatacaggtgggagccttcgcggctttcgggcagttcgaggcccgcgttcagatcccactgccacggggtggccgcacccaccatgatcagcgagggcgggaagttcggataggtcgtcttcggcgttattgcgcagtttttgatctccgacagctgggcgtcgaactcctcgtccgcgtttttcgcatatacggcgaaccgcaccgccgcttcggtgccggcttccagatcgaaagtgttgagaagcagctgattcagctcgccgtgagtgaagtcgtgcgtcagggccgcgcccttgtcgatgacgaccggaccggagaacatgtcgcggtcggtcaggttgacgtagagcgtgtaggcgacttcggtctgctcgtcgtcggtcgcggcggtccattcggcgtgcagggccggttggtcggagtgctccgggtcgatcagcacggcgtcggccgaaagggtcagcgcgggggctgtcagggttgcgggttccggaaccggtttttcggccgtgtcgtcggaactgcaggcggcgcccagcaggagggcggcggcgaggcctgcggtcagagagtagagttttcttcgcatataggttggtttttgattggattgatcgggtgtcgttgccgaaaacaaaattatcgttttgtacgagcctgcaatagaaaggttcgaaaagcaaaaaagtttgatcgaatcgtattaattctgcgctttttttgcgcatgaaaaagtcctgaaaagtgtgtttcacggattttaaatattattaaaaacaatggaacggaatatatacgggttgaatcgctggtattatgtgatcttttcattgtattattcgattgaattgtgtcatggctcttggaaaatactttccggcgatgtaattttacctaaaaccttgcagctgaatatataatatgctgtaaatcattgatataacctaaaaactataggcctatgaaaaaactcttcccatttttatgcctgctggtcctgctgccgggagccgctatgtgccgggataagacctatacgattcaatcacccgattgttcgttgaccgtcacgatcggatgcggtgatcgaatcgtatattccatccgatcggatacgagtcagattctgaagccttcgcccttggctgtgaggctcgtttccggcgaatgctggggccggcggagccgggtggccggagtgcggcgctaccggatcgacgaggagcacgacgcacctgtttataaaaagcggaaggtggaggatcgctgcaacgggatcgtgatcgatttccgggagggattttcgctggagttccgggcctatgacgacgcggtggcctaccgcttcgtcgcgcgtcagcccggcgaggtgctcgtcgcgggcgaagaggcgcggttccggttcgctccgggagccgtcgcattcgtgccctatgtgcgcgacaccccttgcaggcacgacggactggccttcggcgagcagttcatgcagtcgttcgagaacacctatacccgtacgccgctttgcgaaatggactccgcccgcttggcgttcctgccgctgctcgtgcagacggccgggggtgtgaacgtctgcatcacggacgccgacctcgaatcctatccgggcatgttcctgcaccgaagcggcgcggacgaactcgaaggcgttttcgcgccctctccgcggaaagtcgtgccgggcggttacgaccgcatgcagggcgtggtcgaggagtacgagccgttcatagcgtcccttgcgccgggagaccggctgccgtggcgggcgctcagtatcgtgcggcaggatacccggctcgcggacaacgatctggtctggaagctcgcttcgccctgccggctcgacgatatttcgtggatcgaacccggcaaggccgcgtgggagtggtggaacgactgggggctttccggcgtggacttcacggcggggatcaaccagcccacctatgaatattacatcgatttcgcatcccgcaacggtctgcgctacctcgttctggacgacggctggagccgcgatcaccattcgccgctggagacggcccccggactcgatctgccggcgctggtgaagtacggcgaagagcggggcgtggggctgatcctctggctcggctacctcccgttcgccgaacagatggaggagctttgcgagcactattccgaaatgggcatcaagggattcaaggtcgatttcatggacagggacgaccagcagatggtccggttcgtctacgatgccgcccgtacggccgcacggcacaagctgctgctcgacctgcacggcatattcaaacctgcgggaatccagcggacctatcccaacgtcatcaatttcgaaggcgtgcacgggctggagcaggtcaaatggtcgcccgtcgaggtcgatcaggttacctacgacgtgacggtgcccttcatccggatgatggctggaccgatggattatacacagggcgccatgcgcaatgcctcgaaagcgaatttccggccggtgaattccgagcctatgagtcagggaacccgctgccggcagctggccgagtatgtcgtgttcgatgctccgctcgcgatgctgtgcgactccccgtcggcctacggacgggaacccgaatgcctgcgcttcatctccggcgtgcctaccgtctgggatgagaccgaggtgctcgccggcgaggtcggcgaccatatcgtgacggcgcgccgtcacggcgacgtgtggtatgtcgggggacttgtcggctgggacggccgtacggtgcgggtcgatctctcgctgctgcccgaagggacgtatgcggtggagctgttccgcgacggcgagaacgcggcgcgcatcgcccaagactatgtccgggaggagttcctgctggctcccggtaaatcgttcgatgtgaagatgttccccggaggcggtttcgccgcccggataaccagacgatagcgtacggtcatgcgacttagggaaaagatcggttacggactcggcgacacggcctcttcgatgctgtggaagctcttcagcgtctacctgatgttcttctatacggacatctgcggcatcgacgcatgggtggtcggcgtcctgtttctggtgacgcggatctgggattcgctgctcgatcctgtcgtcgggcttctgtgcgaccgcacatccagccggtgggggaccttccggccgtggctgctgtggggcgccctgcccttcggggcgttgggcgtcctgaccttctacatgccggagtggggagcgggcggaaaggtggtctatgcgaccgtgacctattcgctgatgatgatcgtctattcgtcggtcaatgtgccctacgccgcactgctcggcgtcatgtcggccgatccgcacgaacgcacggtgctcgccgcgttcaggatgaccttcgccgccgcaggcagcatggcggtcgtgctggcggtcgaggcgctggtgaaggctttccggccgtgggccgggctgtcggggagttggaccgcggcggtcgccgtcgtggccggagttgccgtcgtgctcttcttcgtgacgttctcaacgacacgcgagcgggtccggcccgtgcggacggaacgccatccggtgctggtctcgctgcgcgacctgctgcacaacaggccgtggctgatccttgccggcgcggccgtatgtcttcaggtgttcaatgcgttccgggagagcgggacgatctatttcttcaagtattgcgtggccggcgagactgtcggcacggtgtcgttcgcaggggtcgccctgaccgggtcggccctgttcctcgccgtgggacagcttttcaacattgcgggcatcgtgctgatccccttcgccgcggaccggttcggacgccggcggacgctggtaggcgccttgctgctcacggccgttttcagcttcgccttctatttcgtgcggcagggcggttattccgtgctgcttctggcgcaggcgctcatcagcctgagcgtcggcggggtgcttccgctgctctgggccatgtccgccgatacggcggactatgccgaacggcgttcgggccgccgggatacggggctgatattctcctcctattcgatggcgcagaagatgggctgggcggtcggaagcgccgcgacggcgtggatactgtcgctggccggattcgaagcgaatgccgtccagtcgccggctgcgcttacggttatagggtgtctgcaaagcgtcttcccggctttggccgctttggggacatgtgccttcattctgttttatccgctggccgacgcccggcccaaataaagatccgttatgcccaatcctgacatattgaccgagataccccctatttcagggcaggactgcttcgtcgtgttcgaccgttacaaacgcgaattctgcttccccgtgcatatccacaaggagtacgagctgaaccttgtgtacggagcgcggggggcgacccgcatcgtgggtgattccgtgtgcgaaatatcagacagggatctggtcctgattacgggttcctacctcgaacacgcgtggctgaacggcaatttttcgaggaatgccgatgtccatgaggtctgcgtgcagttttcgcccgatctgttcgaatcggggttcatcgacaagaagcagttctatccgatcaagaagatgttcgagtatgcgcgccgcggcatcgcattctccgaagagacggtttcccgtgtcgagccgatcgtggagaatctgatacgcagcgaagacaggttcgattcggtgctcaacttcctgatgcttctcaactgtctggcgcgcgagagcgattaccatatcctcgcccagcgctccgtgtcgatcgaaaacaacgtcaactacgacatgccgcgcatccagaaggtgatgcagtacctgaacgataatttccaccgggacatatccgtcgcggaggtaaaggccctcgtgaacatgagcgaaccgacgttcaggcgtttcatcaaacgccactccggcaagagcttcgtgaatctgctcaacgatatccggctgggggcggcttcgcgcatgctgatcgaaaacccgaccaaaaacatttcggagatcgcctacaaatgcggattcaacaacctttcgaacttcaaccggatcttcaagaagggaaaggggttgactcccagtgtgttcaagacgttctacacccagaagaaaatatccgtataaattcaacctaaaactcaaaacgacatgaaaaagaaattgctgttctctgcgtgcgcctgcatggctgttgtcctcggtctcggatgttccgaggtgaacggtgtgccgagccgcgctccttcggggtatcccgaaggccccaagaccatggtcgatgccggcgccacggccattacccggacgctctatgaaaatctgttcgtgctggccgagcgggggacgatgttcggtcatcagataccgacgctgtacggtctggacaacaacagaaagtggtgggccggcgacgacaccgacctttcggacacgaagtacctgacgggcagccatccggcggtctgcggctgggagctttccaacatcgagctggacatggagaccaatatcgacggagagctgttcaccgaagtgcgcaagcacatcatcgcggcattcggacgcggagccgtcaatacgatttcgtggcattgcgccaatcccgtttcgggcggaaactcgtgggacgggacgcgcgccgtctattcgatcattccgggcggcgagaaccacgaaaagttcaaaggctggctcgacaaggtcgccgatttcatgctgagcctcaagtcgcccgaaggcgagcctattccgctgatcttccgcccgtggcatgagcataccggctccggcttctggtggggcaagggaaatgcgacggcgcaggagttcgtcgccttgtggcagttcacgatctcgtacctgcgcgacgtgaaggggctgcataatctgatctgggcctattcgcccgatatgatccatctcaattcgcgcgacgcttacctcgaatactggcccggcgacgaatgggtcgatattctgggactcgacgcctacgaccgcaacggtgcggactacgaccacaagggattgcagatgatccgcctgatgaagaatatcgcctatacgaagaacaaaccgttggcgctgaccgaaacgggtcttgagaacaacaatcctgaggagtcgaactactacaacaagaaatggtggacgtcgatgctctacaagattatcgagaacgagcctgtatcgttcgtgctgttgtggcgcaacggcgatttcccgacaaacggcgggcactatttcagcgctttccgcgggtgctattccgagaaggattttatggatttctcccggaaggatcagatccttttcgaggacgacctgccggatatgtataagcctcttaagtagcggtccggtgaataaaaaggatgcctttcgggcatcctttttattgtggcgggtctgtccggttattcgaattcggccatcacgcgttccattttccggcggatttcggcggtgcagaggttgccgatgctgccttcgtgggtgtggcgcacttcgcgcgtcgggcggtactggccgcgctgtacggccatgccgacctgcctgtaggcttcgcggaagggaacgccttcgagcacgagccggtttacgtcttcgaccgtgaagaggtagtcgtatttcgggtcgtcgaggatgccggcgttgactttcaggtgcgcgagcatgaagtcgcacatcgaaagggtgcgtttgatttcggtcgtcgccgggaagaggatgtccttcagcagctgcatgtcgcggtggtagccgatcggaaggttggccgtgagcagggcgatttcgttcggcaccgactgcaggcggttgcagcggccgcgcatgatctcgaagacatcggggtttttcttgtggggcatgatgctcgatcccgtggtgaggttgtcgggcagcgacacgaagccgaaattctggctcatgaagagacatacgtccattgcaaggcggcctacggtggcggctatggccgcgatggcgctggccgcggcgcgttcgctcttgccgcggctcatctgcgccgccacgacgttgtagtggagcgtttcgaagcccatcagacgggtggtcatcgtgcggtcgagcgggaacgacgagccgtatccggcggccgagccgagcgggttctggttggcgatatgccatgcggcggcaacgagccgcatgtcgtcgacgagcgtctcggcataggcgccgaaccagagtccgaacgacgagggcatggcgatctgcaggtgggtgtaccccggcatcagcatctccttgtattgttcgctcaggccttgcagccggtcgaacagcgtttttacggcgtcggccgtctggcgcagttcgtcgcgcaggaaaagtttgaggtccaccagcacctgatcgttgcgcgagcggcccgaatggatcttcttgcccgcgtcgccaagccgccgcgtgagcatcagctccacctgcgagtggacgtcctcggtgtcaggctcgatcgcgaagcgtccggcttcgatctcggcggcgatctctttcagtccggcggtcagctcctccagttcggcggaggtcaacagcccgatcttttcgagcatggcgatgtgggccagcgacccttcgacgtcgtatttcgccagccgcatgtccagttcgcggtcgtcgccgacggtatattcctcgatcatcttgtcgggctcgaagcccttgtcccaaagtttggttgccatagcgtgtgtgtattcgtttctcacttcgtaccggttccgtattgccggcagccggtggtttgcggcggtgcgccgcgtttgcaaatctgtcttccgcacggggcgggtgtctttcgcggcggggattcggccgcctgccgcgcggggcggcgtcagaggattccggcgagttgccggatgaattcttcgtaaatcccgattccctccccgatctccgagaggagcacgtattcgtcggccgtgtgggagcgcgacgactctcccggacccattttgagcgacggaaagggcatcagggccatgtccgacgtggtgggggagacgtagctccggcgtccggcggcctgcgcagcgcgtgcgagcgggtgtgcggcgtcgagcgccgaggcgcggatgcgtgtcgagcggggcacggcttgggagcgcagtgcgccgcgcaggatttcgaccgtctcctcgttggtgtaggcgtcggtcgtgcgcagatcgacgacgaagcggcacgagtcgggcacgacgttgtgctgggtgccggccgtgatctgcgtgacggcgatgccgatcggccccagcagttcggatacgcggtcgaagcggaagctgcggagccgcgcgatgtcgtcgagtgcgatatagagcgcatttatgccctcgttgcgcgccgcatggccgcttttgccgcgggcttcgcagtcgaggaccaccagtccccgctcgccgacggcggcctgcatgcccgtcggctcgccgacgagcgccatgtcgatcgctcccagctgcggaagcagggcgcgcatgccgtgttcgcccatgcactcctcctcggccgaaagggccagcaggaggttgaagggcagaggctgttcgcggaaggtcaggaacgtccgggcgagcgacacgaccgaagctccggcgtcgttgctgcccagaccgtacaaacggtcgccttcgacggtcggggtgaacgggtcgcgcgtataggaggccgccgggcgcaccgtgtcgtggtgcgagttcagcaggagggtggggcgcgccgggtcgaagtccgcggagcgggcgaagacgttgttgtgcagccgttcgggcgccgcgccgcgctcctcaagaaaggcgaacagcaggtcggccgtgcggctttcgtcgcgcgaggtcgaaggcgttgcgatgagcctcctgagcagttcgaccgcttccgtcgtttttgcatccatgctcttccgttttttcggctccggcggtccgggcggactgccggaaccgggggttatctgatgaccgttcccgtgtcgtttgacaggttgtcggaatgtttgatcgtgacgctccgaacgccgtttgcgacggccttgagggcgttctcgatcttggggatcatgcctttgctgacgacgccttcggctttgagcgcggcgtacgatccggcggtgatctcgcggatcagggtcgtctcgtcgtcggggtcgcgcagcacgccgctcttctcgaaacagaagaccagctccgcgggggctatctgcgctgcgccgagggctatggccgaagccacgctgtcggcgttgcagttgagcagcgtgccctgtccgtcgtgcatgatggcgcagaagaccggggtgacgcccgcttcgagcaggcgtccgagcagccgggaatcgaccttctcgatgtcgcccacgaagccgtagtcgatcggctggggggcgcggcggcgggccgtgacggcgttgccgtcggcacccgacatgccgagcgcgttgcacccttcggcctgcagtgaggccacgagttgtttgttgaccagacccgcgtagaccatcgtcaccacgtccaaggtgcccttgtcggtgatgcggcggccgtcgaccatctgcaccttcagttcgagccgttcggcgagccgcgtggcgaccttgccgccgccgtggaccagtattttcgggccgggcatcgcggcgaagtccgcgatgaagcgtttcaggacggcggggtcgtcgatgacgttgccgccgatttttactaccgtgattttctccattatccgagtccctccagcaatcttttgagtacgacctgcgccgagatttcgcggttggcggcttcggggatcaccagactgcgcggcgactcgatcacctcgtcggtgacgatcatgttgcgccgcacgggcaggcagtgcatgaagaatgcgttgtccgtaagcgccatcttttcggcgtcgacggtccatgcgcggtcgcggcagaggaccttgccgtagttgggatcggcgtaggccgcccagttcttggcatagacgaagtcggctccttcgagcgccttgcgctggtcgtattcgacgcgcgcgcggccgacgaactgcggcgcaagctcgtatccttcggggtgggtgatgacgaagtcgtaatccacggcgttcatccactcggcgaacgagttgggcacggcctgcggcagtgcgttggggtgcggggcccacgtcatgaccaccttgggacgctccttggtcttgtactcttcgatcgtgatcaggtcggcgaagctttgcagcgggtggcgcgtggcggcctccatcgagaagacggggcggcccgaatggcggatgaactgctccagcacccgctcctcgtagtcttcggccttgtcgttgaacttggcgaacgaccgcacgccgatcacgtcgcagtaggaccccatgacgggaatggcttcgagcaggtgttcggctttgtcgccgtccatcaccacgccgcgttcggtttcgagtttccatgctccctgattgacgtcgagcaccatgacgttcatgccgaggttcatcgcggccttctgcgtcgagaggcgcgtgcggagactcgaattgaagaagagcatcagcagggtcttgttgcggcccagtccggtgaactggtagcggtcgcgcttgatttcgagcgcttcggcgacggcggtgcgcaggtcgccgatatctgccgcacaggtgaatttatgcatatcgttttcgttttatcttgttttgtctgtcgcttgcttgcggagggcttttgtccgcggcggtgcgctgcgttggagtctgccctcccctgactttcctccgcagaggggacttgtcgtatcgcgtccgggattttatttcccgcggagcgttgcgtcgaatgcgtcgaggaagcggtcggccagttcgcgcgtcaggcagagcgcgggcagcagccgcacggtcgaagcgcctgcgccgcccgtgaagacgtgtttcccgaaaaggagttttttgcggaattccgcgcccgaaccgtcgatctcgatgccgatcatcaggccgcggccgcggatctctttcggtccgtcggccttacgcagttcgccgagcaggtattcgcccgtgtcggcggcgttctcgaccagcttctcgcgctccatgacatccagcacggcgatggccgccgcgcaggcgaggtggctgccgccgaaggtggtgccgagcagtccggggcgcgcctcgaagtggggcgcgatcagcacgccgccgatcgggaagccgttgcccatgcccttggccatggtgatcaggtcgggacggatgccggcccactggtgggcgaagaagcgtcccgtgcggccgtagcccgactggatttcgtccagcacgagctgggtgcccgtttcggtagcggctgcgcgcaggccgcgcaggaattcgtccgtggggcagtggatgcccgaaacgccctgaatgccctcgatgatgacggcggcgaattcgcgcgtggcgagcttggcgcgggtcgcttcgaggtcgttcagtggggcgaattccacgttgggcgtcccgttgaacggcgaccggatggaggggttgtccgtcgcggcgacggcgcccgacgtgcggccgtggaaggctttggagaaggcgagcaccttggcgcggcccgtctgaaacgacgccagcttgagtgcgttttcgttggcttcggcgcccgaattgcagaggaaaaggctgtagtcgccgtaacccgatgcgcggcccagcttttcggctagcgcggtctgaagcgagttttcgaccgaattggagtagaatcccagccgggcggcctgctccgagatcgccttcacgtagtcgggctgggcgtggccgatcgaaatgacggcatgtccgccgtaaaggtcgaggtactcggtgcctgcggcgtcgtagacgaagcagcctttgccgcgcaccggctcgacggggtagagggagtatacgttgaatagtgtcatggcaaaaattgtttggcatcttgcttccgattgcggtaatcacggcgtgccgccgtgtatgcaagtctgatccacccccaaacccccgcctcaggcaggggcttggtccgccgcatgcggcggaaagcgaatcccggaaagcgatttcgttgtttctaaaaagcggacgctttgagccgaagcccttcgccctcgtccagtccgaacataaggttcatgttttgcacggcctgtcccgacgcgcctttcagcaggttgtctatgaccgacacgacgtgcagtttgccgtcgtacttggccacgctcagcagggccttgtcggtattgacgacctgtttgagatcgacgctgccggcggcgacgtgcgtgaagagggccggggcgtagtaatcctcgtacagtctgcgggccgccgtctcgtcgagcgggcagtcggtgtagacgctggcgaggatgccgcgggcgaaatcgccgcgcatcggcacgaaattgacggccttgccgaagccgggctgcaggcgtcgcaggttgcgtccgatttcgatcaggtgctggtgcgtgaaggctttgtagaccgaaatgttgtccgtccgccagctgaagtgggtcgtggccgaaggctttacgcccgcgcccgtcgaacccgtgacggccgtcacgtgcacctcgcccgtcagcaggcccgccgccgcgaggggcagcagcgccagctggatcgccgtggcgaaacagcccggattggcgacgcgctccgccgtgcggatgcggtcgcggttcagctccggaagtccgtagacgaagccgtcgctctcgtcgcggaagtcctgcgcgaggtcgatgatcttcacgccggcgggaacgtcgttcgcttcgagccatttgcggctctcgccatgcgccgaacagagcagcagcacgtcgatcgacgcgaggtcgcaggtgtcggcgaagcgcagttcggtgtcgccctccagtccgccgtgcacgtcggcgatgcggttgcccgcattgctggtgctgtggacgaaggcgagccggacctgcggatggtttaccaagaggcggatcagttcgccggcagtgtagccggcgcctccgatgatgcctgcgcgtatcatttctcgttgcgtttctggacgttgtggtagattttgatctggttgccgaggatcttcgtgaagcccttcacgtcgtcggccgtccacgccttgttcacctcgccgtattcgccgaagtcggtcttcatcaggtcgtaggtcgaatcgacgcccacgagcgtgtagctgtaggggcgcaggatcagttcgacggtgcccgtgacgttgcgctgtgacgagacgagcatggcttcgatgtcgcgcatcaccggttcgaggtactgcgcctcgtggaggaacatgccgtaccagttggcgacctgctccttccagtagatctgccacttggtctgggtgtgcttttcgagcatcctgtgcgcggcgatgatgaggatcggggcggcggcttcgaagcctacgcggcccttgatgccgatgatcgtgtcgccgatgtgcatgtcgcggccgatgccgaacttcgagccgacggcctccacggcgcggatggcctcgaccttgtcggcgtagggcctgccgttcacggcggcgatttcgccctgctcgaaggtgattttcagccgctcctcgcccgatgcggtgatctggctcggataggcctcttcgggcagcgtctgctcggaatggagcgtctccttgccgccgatcgacgtgccccaaagccccttgttgatcgagtactccatcttcttgaagtcggcttcgaagccgtgcttcttgaggtagtcgatttcgtattcgcgcgtcagggtcatgtcgcgcgtcggggtgatgatctcgatttcgggggcgagcacctgaaacgtcaggtcgaagcgcacctgatcgttgccggctccggtcgagccgtgggccacgcagtcggcgccgatcgacttggcgtattcgatgatggcgatggcttggaagatgcgctccgagctgaccgaaatcgggtaggtgccgttgcgcaggatgtcgccgaagaccatgtatttgatgctcttttcgtagtactcctgctcgatgtcgagcgtggcgtgccgcacggcgcccagcgccacggcgcgtttctcgatgttcgcaagctcctccttggagaagccgcccgtgttggcgatggccgtgtaaacgtcgtagcctttctcctccgaaaggtattttacgcaaaacgaggtgtccagaccgccgctgaacgccagaactactttcttcttttccattttatatcggttttatttacttcaggtgaaacagtttcttgaatttgttcttgaagaacatgacgtagggcgcccagcgcgactgcgactgcggaggctccttcgccggatcgtacagcatgcccgtacagagacacatgcgccggttgttgcgctgcaggatgtcgtaattgcagcatccctgacaaccccgccagaactcttcgtcctcggtaagctccgagaaggtcaccggcacgtagcccatgcgcgaattgagcttcatcacgggcagcgacgtagtaatactgaataacttggcgtacggaaatcgtcgtcgggccagctcgaaggttcgtcgtttgatacgctccgcgagtcccatatggcggtactccggatcgacgataagtcctgaggtggcgacgaaatcgccgtgaccccagcactcgatgtagctgaaaccgattagtttctcaccgtccagcgccacgacggccttgccaccggtcatttttgcggcgatgtattcgggcgaacgtttggcgatgcccgtgccacgctgcaatgccgactcgtagatcaggtcgcagatacgctgggcgtagtgggcgtgcgacgagtcggcaaataagacgctgatagagttgttatccatttacttagttatgtgggtaaaattgtgtgtgaatcagttgttgatgcggaaggcgcgctgaacgcccttgatgcgcatgatcgaatggatgagcgtatcgaccacgcccgcgccgggcacctcgacgctcaccgtgcccgcgatgcagccgttggccagcgaggcgaagttgatcgagcggatgttgagtttcaggtcgcggctgatgacttcggtgatgtggttggccatgccggtcgtgtcggcggcgacgatgcgcagcgagacgcggaacgcgccttcggccgtcgaacgccagcgggcgtcgatgacgcggtaggggtaattctcgcgcatgcgcttggcattggggcagtcgcagcggtggatcgtgatgcccgaattgatcgtcacgaagccgaacacctcgtcgcccttgatcgggttgcagcatttggccagcttgtactggatcttcgagatgtcgtcgtcgatgaccagcgcgtcctgcgccgcgggactctccttggcgttgtggaccttgttgcgttcggcttcggccgcagcggcgcgccgctgctcgtcggcttcgcccgaaatatggcgcgtgaggatctccttgatggtccccagatcgaccttctgcgtggcgatcagggcgtagatttcggtgcccgtgcggactttgaagtatttgaccagataggccaccgcctcgtcgatggtcagcgggaatttccagttcttgagcttgcgttccagctcctcgcgccccatgcgggtatgcttggcctgctcctcgcgcaagaacgatttgatcttgttgcgggccttcgacgtgaccacgaagttgagccagtcggatttgggcgtctggttcttctgggtgaggatctcgacgatgtcgccgttgcgcagctgctcgcggatcgacacggcccggttgttgaccttgccgccgacgcacgtcgaacccagactggtgtggatgtcgaatgcgaagtccaagagcgaggccccttcgggcagtttccgcaggtcgccgttgggcgtgaagacgaagatctcgcccgaagcgggtttggcgtcgaagcgctgcgccagcgagtgggtggtgtcttcgagcagttcgcgcaggcggcccagccagacttcgctggtctgcgcgccctgattcacccccttgtagcgccagtgcgccgcgatgccgcgttcggctacggcgtccatgcgctcggtgcggatctgcacctcgacccagcggccttcggccgatacggtggtgtgcagcgattcgtagccgttggacttcgggatcgaaatccagtcgcgcatgcggttggggttgggcgtatagaagtccgtcacgaccgaataggccgtccagcactgcggcttctcctgctctttcgggcagtcgatgatgatgcggatggcgaagatgtcgtaaacgccctcgaacggcacgtgctgtttgtgcatcttggtccagatcgagaagatcgacttcgtgcggctcttgatgtggtatttgatgccgagtttgtgcagacgctcctcgatggggaccagaaaccgcgcgatgaaggctttgcgttcgtcagcgctctcttcgagcttggtgacgatgtgttcgtagtccttcggttcgaggtatttcagcgcgatgtcctccagctcgcttttgagactgtagagacccagcttgtgggcgatctgggcgtagaggttcatgctctcccagctcttcttgcgccacttctcgtgcgggaagatctccagcgagcgcatcacttcgagccggtcggccagcttgatgaggatgacgcgggggtcttcggagtaggagacgagcaggtcgcggaaattctcggcctgctccttggcgaccttcagtttcagttccgagatgttgcacatcccgatcgtgatgccgacgacctgttcgccgaagcggctgcggatgtcggcggtcagggcgaggaactcttcggccgggagctgtttgtgggccagacgtaccacgtcgtgcaggatggccgagatggtggagttgcgtccgagtcccacttcggagatcacgattccggccacggccgcggcatgcgtcagcagggggctgccgtcatagcgggtcagggacgcaagcttcccgtcggcgtagaccagcgcctcgtccacgagtgcctgagtctgctccgagaagttcgcgcgcacgagcgtgcggagtttttcgtaacgtgaaaagtccatttttccctaaccgcataaccttgacggcaaagatatgaaaaaaattcataaatttggcacatcggaccaatacacccgattatgacgaagaaaaaggatgcttatgtcccgaccgtgggggaggaggtcgccaatacggtcacgcacggcgtgatgtcgctgctggcgctcgtggcgcttccctttgcggccgtgtgggcctacgcgcacgatcccgaccgcattctggcgtcggtgtcggtgagcattttcgtgatctcgatcttcctgatgtttctcgcttcgacgctctaccattcgatgaatccggcctcgaaacacaaggccgtgttccatatcctcgaccatattttcatctacgtcgccatcgccggaagctacacgccgatcgcgctgtcggtgatcggagggtggcagggcgtcttcatcacgatcctgcagtgggcgatggtgctgttcggcatcttctacaagtcgctttcgcgcaagacgattcccgccctcagcctgacgatctatctggtcatggggtggacgatcgtatttttcatgccgcttttcgtgcggcaggcgtcgacgccgctgctggcgctgatcgccgcgggcggcgtgctctatacgctcggcgcgtggttctacgcccggcagggattccgctaccaccacatggtctggcacctgctgatcaatctggccgtggcggcccattttacgggaatcgtgttttttctgtactgagtgcgggttctacggtaaaacgccccgaaacctgagtttcggggcgtttttgtgctgactcggagggagccatgccggtttgcctcaatgcttgtagacgacgtaaatatggtctttcggcagggcgtaaagccggcgttcggcctcggagaaggtcgcggcgtagtcgatgtccgcggcctcgaagcccgcggcgcgcagccggtctgtgtagtccgcgccgtagatgcggcgatggtcgtattgtccgaagatgcgtgtccgttcttcgggatcggtgatcgagtcgtcctcgtaggtctgttcgtagtccggttccacgggcgagagcaggatgccccagccaccgggtttgaggatgcggtagagttcgtgcagcgccctgcggtcgtcggcgacgtgttcgagcaggtggttgcagaggatcacgtcgaccgaatcgtcggccagcggaatctgctgcacgtcgaagtgcaggtcggccagcgggctttcgaggtcggcggtgacgtactgtcccggatgccctttgaagtggggtttcaggtggcgcatgatgcagacttcgggcgcgatgtggagcgtgcggggaaaatccgtcagcaggtcggtctcacgtgtgaggtagagccacagcaggcggtggcgttccagcgacagacatttgggacagagtgcgttggcccgtgaccggacatagccgtagggcatgaatctgcggtatcgggagccgcagaccggacattcgacaccccggcctttgtagaacaggcccgcggcgggaacggcccagccggcgacatgctgcagaagcggccgcggcacgtggttgagcatccatttgataagctttttcatcgcaggtgtggttttattcccgccagtgttcggggcggttcagggcgtcggcgcatacgactcggcctttgggtcctgaaaatccttcgttggtcagcgcctgcgccatccagtagtcggcgtgtttttccgcgatcgggtagggagccgggaatcccagtttttccgcaccgggaatgaatccgtggcgcgggtagtactccttgtgtccgagtacgaagacgagtttcgcgccccgctcccgcagcagctgcagcccctcggcgatcagcagtcggccgacgccctgcttctggcaggagggaacgacggcgagcggtgcgaggaggtagaacaacggccggtccggctcggcgcctgcgatgcggcaccgggtgaacaggatgtggccgacggcctccccgtcgcgcagtgcgagcagcgagacggccggttcggcagtcggatcggacagcagttcggcggtcagcccggcctccttgtcgtagccgaagccctttttatgcacttcgacgatcgccgcgaggtcggcggggacggtttcccggatgacgatttccccggacattacgattccagtattttggaaacctcctcctcggccttgcgcagccgcgatttgcagccggcgatcagctccgtggcgcgtttgacctcggcggcgaggctgtccacgtccatctcttcgttgcggaagcgggcgagaatcttctcgatctcggccatcgcttcggcgtatgtcatctctttctttgccatatctgttttttgtcgttgcgtgttcgctgccgccgctttggggcggttccggggcaggccggggagaaaactccgcggcggctttacttcggttcggtgctttgtgcggtgccgaggatcgtgccgtcggcgacttcgatttcgagggcgtcgcctttgcggacgccgcgggccgacacgacggctttgccgcccgtgcggacgacggcgaagcccagccggagaatgcgctccggggagcggccggcgatcagttccgcggcgttgtcgagccgtgtggcctgccgtgcgaggaaattgcgcaccgcttccggcagcagggccgaaaggtgctccgcgcggagccgctgccgcgtgagcaggtcgccgctcatctggcgcaggtcgcccgtgagccgttccagccgcacctcggaggcatgcatggcggctttcgtggcatcgtgcagttgcagggccgcgtagtcgagccagccttcggtctgcgtcatccgttcgacgagccatccggctacggccgtcggggttttgagtgccgtgtgggccaccatgtcggcgacgctggtgtccttgtcgtggcctatgccggtcaggatcggcagcgggaactgcgccacgtgggcgcagagcctgtaggcgttgaaacagttgaggtcgctggccgagccgccgccgcggatgaggaccacggcatcgaattcgtccatccgctccgcgacggcgcacaacgccgtgacgatcgactcctcggccgccgcgccctgcatgaaggcgtcgaagagcgtcacctcgaaacggtagggacttttggccagctccttgcggaaatcctgatagccggcggcgttggcgctcgatacgaccgccacgcgctgcaccacgacgggcatcggcgcttcgcggttcatgtcccagacgccctctttctgaagctgggcgatggtcatctgccgctgccgctccatgtcgcccagcgtgtaggtggggtcgatgtcggtgatctggagcgagaatccgtagagttcgtggtaattgacggcgaccttggccagaatcttgattccggcggcgagccgctggccggtttcggcttcgaagtatcctgcgatgcgggggtaggccgtgcgccagatcacggcgcgcgactgggccagcggaacgccgttgtcgccccctttttcgaccagttcgaggtagcagtggcctgagtaattgacctttatttcggagatttcggcgctgacccatacgggcagggcgaaacgctcgtggagggtctccttcacgagccgctgcaattgggaaagggtgatatgtgagtgcgtctgcatgggttagcgccagaccagttctacctgacgcggcatcagcttgccttcgggaagctggatgtgcaggatgccttcgctctcgacgggcgtgccgtttttgcgggccggcgtccagcggggcgcttcggcgacagctttgagcacgcggcgtttgagacggctgtcggtcgattcgagttcctgagccacgaccgtgtcgccttcgggcgttacggtgtaacgcaggacgatgcgggcggccggttcgtcgtcgccccacttcacctgccgggcgatgtagcagctgaaggtggagtcggcggtgaaaacggcggactggtcgtagcggagcgtgacgagcatcaccccgtttgcggctttgtcgccgtagcgggcgatggtctcctcgtcggccgggagcatctcgacgttctcgatgtcgtcgggcgggatcgacgcgatctgctcggtttcgacgccgttgactatatataaaggctgctgcgccgcaacgggaagcgttgcggcgaggagtgccgatataaacagaaagtatcttttcatgcggtgctttttcccggtaaacggtcgctggggcgggaatattgcccggccgccggtgtcgttcggtacgtgcgaagataacggttttgctgcggaacgccaaattttcccgcgattttcggtccgcaggacggtttgcagggcggtctttccgggtgttgcgtgcggagcgggtctttcgggccggttttcgcggggcggtatttgccggtgcatttgccggatgtcttttgccgggccgggtgtcttttcgggctgtccttgatagcgcgtcttgcgggggctttagcagggcggcctttaattgtgcgtcttgcggagggggcttcgcagagccgtttttgccgggcgtctttggggctggctgatggttccgaacccagcggcaggggcggaacaacgatgcggcttttgggccggcgtggttttggaccgggccggcttttgactggaagtggctttggttcggagcggcttttggctgggtgttttttgtccggcgtggctttggttcggggcggtgttgaaccgacacggctttgggaccgggcgtttgcggattccgcggcagctgcagagcggcgttaccggatctcctcccacccgcagcgggcgaggtcggcgcagccgttggccttgaagcgtacgccctcggcttcgagcagttcccgctgccgcgtccatccggggacggtgcggcctgcgctgttgacgacccgatgacagggcagacccgccggagcttcggcgagcgcgcggcccacgcggcgggcatggtcgggcatgccgatcagccgggcgatctgcttgtagctggtgaccttgcctgcgggaatttccgccacgacggcgtaaacctccgcgtcgaagttttcgggcatgcgcatggggcgtgccttgggcggattagagttcgctctccttcagacgctcggcgttctcggctacgatcaggtggtcgatcacgtcctgaatgtcgccgtccatgaaggcggagaggttgtagatcgtatagttgatgcggtggtcggtgatgcggccctgcggatagttgtaggtgcggatcttggccgaacggtcgcccgtcgagaccatcgtcttgcgcttcgaggcgatttcgtcgaggtacttcgagtattcgaggttgaagacgcgcgtacgcagctcctcgaacgccttgtcgaagttcttcagctgggatttctggtcctgacactgcacgacgatgcccgtcgggatgtgcgtcaggcggatggccgaataggtcgtattgaccgactggccgccggggccggacgcgcagaagatgtccttgcggatgtcgttcatcgaaatctcgacgtcgaactcctcggcttcgggcagcacggccaccgacgccgccgaggtatggacgcggccctgcgtctcggtctggggcacgcgctgcacgcggtgcacgcccgattcgtatttgagcgtgccgtagacgttctgacccgtgactttgagcacgacctccttgtagccgcccgcggcgccgtccgagaacgaggtcatttcgtagcgccagcctttcgattcgatgtatttggtgtacatgcgcagcaggtcgccggcgaaaatggccgcttcgtcgccgcccgtgccgccgcggatctccatgatggcgttcttcgagtcctgcgggtccttggggatcagcagcagcttgatctgctcctccatctgctcgatggcgggttccagctcggtgatctccccgcgcgccatttcgcgcatctcctcgtccttgtcgttggcgaggatgtccttggcttcggcgaggttggccagagccgtgcggtaacgttccgaggtctcgatgatcggttccagctccttgtactccttgttgagctgtacgaactgcttgacgtcggcgatgacttcggggtcggtgagtttctgtcccgtctcctcgtatttcagtttcaggccgtcgagacggctcaaaatggtgttgtctgccatatattgctttattttgactgtaaaagaacagcaccggccgagcgcgtagtgtcaaatccgtttgaattctgcggggcgcagtctgtccgggcaggagttttatttccggcaaaggtaagaaataaaactgaaagaaagagcaggtgagtgcaagaaggttttaacggggccgtcagcggaaaacaaagggcggtaagaagccggatgaggttggggcggaatgtcatccccggagtttattgaaggcaggttcggagaatcgtgctctgtacgctctcggagacaattgttttgcctttttgaaaaggcggttgaaatgcggaatgtcgttgaatccgacggcataacagatctcggcgattgacagcggtgtagtcttgagcatctcgcatgccgtgtcgatgcggtatgcggtcaaatatgccagaaaggttatgcctttgcagcgtttgaaaaaggagcagaatgccgagcggttcatgcacacttctgcggcgatgtcgtttaaggagatcgtgtgggtgtaatggcgcattacgtaggtgcagatatgctgcatgcgccttacgtcgtgttcgatgcgtatgggcctgcctgcaaaggtcgtgtcggacgaagtgaatacaacagaaagcagtcggagcatttcgcaaaggcgtcccaattcgttcgttccattcatctgtataagcatttggcggatgatgcgggagctttccgggccgaagttcagggcattgacgggaaattctattccgtcaaggctgtttcgcatttcggggaatgtctccatgcaccgttccacgaaagtgtggctgaaggcgaccatcaggtaacggatatgtccgtccttgtctgtcgagtcgggtgcgaattcccagcgatgaagcatggagggcggtattagcgccacgtcgcctgccgaaaatggctgcagagtgtcgcccgtcatccgctgtccgcatccttggatgacgtaatataactcccatgcgtcgtggcggtgcagtttggcttcgatgtcgggattgatgcgggcatctacgaagaagaaggagtggttcttcacgtcgggcaactcataaggagtgattgttttttcctgcatggattttttaatggctcgaatgcaaatatacgacaattattcgatacaattgcgcaaatatataacaatgtcaggacctaactttgcaacggttaaataaattaaacattattgattatatcacgatggaattttatcaggtactggagaaaagaagaaccgtccgcgatttttcggacaggaaggtcgatgatgaagtgttgaaaaggatattgggggccgcgtttaaggcgccgaccaacgattacctgcgacagttcgagtttgtggtggtgcgggggcaagaaaggatcgggcggattatctcgccggtttcagagaatacgcggaatattcagcagacgggactcgaagttgccgggaatacgatggaccgggacgagtatgccatgttcgttgatgcgttgcccaagcaacagcggatgcttatacagagcggttgccttgttttgccgtttttccgtcagaaagattgtccgctgtgccgccctgcagatcaaagttcgctcaactatttcgcttcagcgtgggcggctgtggaaaatattctgctggcagcgacggcggaaggactggcctgcgcgtttcgtataccgatcggtaatgagccggaatatgtcaagcggatggtcggcgctcctgacggatatgagttcacctgctttcttgccgtcggctatgctgcggaagatgcgcatatatgcaagcaaaaagtcatcagtgtagagagtagaattcactgtaatatctggtgattgcagtgaaggattggcatggaatttggattccgtatagcggccggctgtcgaaaacagcaaagggcgggacttgttatttacaagtcccgccctttgctgttgccggtcgtgcagcggctatttgtcgattccctgcagccagtcgagcacggtctgctgccactgctccctgtatttgaaattcttgcggatgccccagccgtggccgcccgtcgggtagatgtgcatagaggccttgacgccgttgtccttcagtgcgttgtagtagagcgtgctgtttacgggcgggacgacgcggtcgtcgtccgaaagcagcagcagggtgggcggggtttcgctgctcacgcggttctggagcgagtaccatgtgtcggtctccgcgttgcgcttgtcgcccagcagggcgttgaacgacccttggtgcgccttgcctttttcggccgtgatgactgggtagaagaggatcgagaaggcgggtttggtgcgggcgagcgtcgaagccgaggcggcgaggtgaccgcctgccgaactgcccacgatgccgaccttgtccgccgtgaagcccgtggctcccgcttcgagtcccatcatgatgcgaagggcctgctcgacgtcctccagcggcacttcggggtggccgttgggcatgcggtatttgagcacggcggccgtgatgccgtgttcggcgaaccactgggccatttcatagccttcgtagtctatgcacagctttacgtaaccgccgccggggcagattacgacggcctgtcccgtggccttctccggagcggccgggaagatgtagagcaccgcttccgaaacgtcggtgaggcggttcttttcgggttcgcgttcgggcgtggcgatgccgttgccgtggggtgcggtcttgttgtcccagattttcagcgtgcgggcctgtccgtagtcttgtgccgttgcggtgcctgccataagcagaagtgctgtcaaagtcgttgcgattcgtttcatggacgtgtcgttttggtgcggatcagatgacgatgttgatgatcttgcccggcacgacgatgacctttttcggggttttgccttcgagccatttctgcgcttcgggcagcgtcacgacgtcggcctgcatctgggcgggcgtcagcgacgtggcgtactctttcttgaagcggagtttgccgttgatcgaaaccgggtactcgaatgcgctctgcgcgaggtgtttctcgtcgtagaccggatagtcggccgtgcagaccgaggtggtgtgtcccagcgccgcccaaagttcctcggcgatatggggcgcgaagggggcgagcagcacggtcagcggctcgatgatctcgcgcttgttgcactcgcccagctcgttgaggcagatcatgaatgccgagaccgaggtgttgaacgagaagttctcgatatcctcgctgaccttcttgatcgtcttgtgcagcgtgcgcaactccttctcgtcggccttctcgtcggtgacgatcagcctgccgtcgcggtcgtagaacagccgccagaaacggcgcaggaacttgtagacgccgtcgatgccgttggtgtcccacggcttggactgttcgagcggaccgaggaacatctcgtacatgcgcagcgtgtccgcgccgtagttttcgacgatgtagtcggggttcacgacgttgtagaacgatttggacatcttctcgatggcccagccgcagacgtatttgccgtcttcgaggatgaattcggcatccttgtattcgggcatccacgcgcggaaggcgtcgatgtcgaggatgtcgttgcggacgatgttcacgtccacgtagagcgcctgcgtccggtactgctccttgagacccagcgagacgaacttgttggtgccgacgatgcggtacacgaagttcgaacggccctgaatcatgccctgattgacgagtttgcggaacggctcctcctcgcataccacgccgaggtcgtagaggaacatgttccagaagcgcgagtacatgaggtgtcccgtggcgtgctcgatgccgccgacgtagaggtccacgctgcgccagtattcgtcggcttcccggccgacgagcgcctgatcgttgtgcgggtccatgtagcggaggtagtaggccgacgatccggcgaatccgggcatggtcgaaagttcgtagggccagccttccggcgtcgcccactccttgacgcgggccagcggcggttcgccctgctccgtggggccgaagtcggcgacgggaggcagttcgagcggcagtttgtcttcggcgagcgggtaggcgatgtcgttcttgtagtagatcgggaacggctcgccccaatagcgctggcgcgagaagatggcgtcgcgcaggcggtagttgatgcgcttgcggcccaatccgcgccgctcgatttcgtcgaacatgagaccgatcgcctcttttacatccttgccgttgaggaaatccgagttgattactttgcccgatttggcgtcgtacgactcctgcgaaatgtcaccgccctcgactaccggaacgatctccagcccgaagtggcgggcgaaggcgtagtcgcgcgagtcgtgcgccggaacggccatgatggcgcccgtgccgtagcctgccagcacgtagtccgaaatgtagatcggaatggctttgccggtgaaggggttgacggcgtaagagcctgtagccacgccgcttacacgtttcgtctcggcgatgcgttcgcgttccgaacgcttcttggcctgacagatgtattcctcgacggcggcccggttttcgggcgtcgtcaggctgtcgacccactcgtgttccggggcgatgaccatgaaagtgacgccgaagatcgtgtcggggcgggtggtgaatatttcgagtttccggtccgaatccttgatgtcgaagaagacctgagcgccttcggagcggccgatccagttgcgctggatctccttcaaggagtcgctccatgcgagtttgtccagtccgtcgagcatgcgctgggcgtaggccgtcacgcgcagaagccactgcttcatgcgcttctgctcgaccggatagccgccgcggaccgaaagtccgtcgtgcacttcgtcgttggccagcacggttcccagcttcgcacaccagtttaccatcgtgtccgcgcggaacgcaaggcggtagttctgcagcgtctgctccttctcggcctccgacatggcgcgccactcttcggccgtgaagtgcagctcctgcgtgcaggcgacgttcagcccttcggtgccgttccgctcgaaggccgcggtcagctcctcgatcgggcgggcctgctgcctgtcgttgcagtagtaggagccgaacattttgaggaacgcccactgcgtccatttgtagtagcccggatcgcaggtgcggacttcgcggtcccagtcgaacgagaagccgattttgtccagctgctcgcggtagcgggcgatgttctgctcggtggtgacggccggatgctggcccgtctggatggcgtactgttcggccggaaggccgaaggcgtcgtagcccatcggatgcaggacgttgaagcccttctggcgcttgtagcgcgagtagatgtccgaggcgatgtagcccagcgggtggcccacatgcaggccggcgcccgacggataggggaacatgtccagcacatagaatttgggccgcgacggatcggtctcgaccttgtaggttttatcctcctgccagcggcgctgccacttggactcgatctccttgaaattgtactccatgatatagctcggttctgatttgtcgctttgttgcggatttcccgcaaagataggaaaaaatgttttacagggtgcaaaagggtgtgaaaaaaggcgctcctgcggggagcgtctccgggtgcggcggcggatgcggatttccgcagccgttgtgccggacgcggacgggcgttgccgtgtcgcggcggtgtcgtgctgtaccgctgtcgcgctgctctgctgctgttccgttgcgtgggctggtgtgggctgctgttttgctgcgccggcgcagggtgtcgccgacgtgccgcggcggtgctttgcgggcggttaattgatcaggatgctcgtcactttggcgccggggttgaagtcctgcgccgagatgcgcggggtgacgccgccggcgtgcgcttttccgagcttttcccggccttcttcgccgagtcccgaaactctgtatgtcatgccgttgagggtgatgacgagccgtccgtcgttgtcggtctgggagatgccgccgttttcgaaaaggtgttttacgtccgttcccggcgcgatgccgtccgtcgatccgactcccggtccgaaaatttcgatcgattcgatttcgtcgccgtacgcccgtgcctccatgaccggctccccggccagcgtgaagcgcagcacggtctctccttcggaagtccggtcggtcgtgaatgcgtcgtaaagccccggatgcgacgccgggatccgcgcggcggacacggtgagcaggaccggtcccgcgccgagcggattggccgtgaaaaggggctggcggcggctgtcgcaggccgaaatgcagagcgccgccagtgcgaacgcaaaagtcgtgaggagtcgtttcatgcttcgttcggaatttttgcaaatatagcgaaatcggccggatggccgcgatgccgcggtcggtgcgtgccggcgttcggaacggatgtaagccgatgataaatagccggttgttgatttgtatataagtaaaaagttatatattttcgatttgtatcagcaaaaagaattgtaaaacggctgaaatgcaggaaaacagcgaaaaaagatgctcatatatattgtaattccgaaaaaatgcgtacctttgcagtccattttggacaatggagatagattttttaacaattaaaaggacagtttaagaaatgccaactattcaacagttagtgagaaacggtcgagttcgcatggaggataagagcaaatctccggcactcgccgcgtgtccccagcgccgaggcgtatgtacccgcgtgtacaccacgaccccgaaaaagcctaactcggctatgcgtaaggtagcacgtgtaagattgaccaacggcaaggaggtcaacgcctatatccccggagaaggccacaacttgcaggagcactccatcgtgctcgtccgcggcggtcgtgtgagggacctccccggtgtacgttatcacctcgtgcgcggcgcgctcgactcggcaggcgtggacggccgtcgtcagcgtcgctcgaagtacggtgcaaaacgccccaaggccggtaaataatcacaagaaacattaattttagacaattttcgaataaacaatgagaaaagctaagccaaaaaagcgaattctacttccggatccgaagttcggagacgtgtccgtgacccgtttcgtgaacaaccttatgctggatggtaagaagagtattgcctacaccattttctacgatgcgttggagctggtgggcaagaagatgaaggatgctgataaatctccgttggaaatctggaaacaggcccttgagaacatcacaccccaagtcgaagtgaaatcgaagcgtatcggcggtgcgacgttccaagttccgatggaggttcgtccggagcgcaagatttctatttccatgaaaaaccttgtcctctattcccgcaagcgcgccggcaagacgatggcagatcgactctcagcagagataatggatgccttcaaccagcagggcgccgccttcaaacgcaaggaggagatgcaccgcatggccgaggccaacaaggcattcgcacactttagattctaaaaaaggagactgacagatggcaaccagagatttaaattacactcgcaatatcggcatcatggctcacatcgatgccggtaagaccaccacgtcggagcgtatccttttttacacgggtaaaacccacaagatcggcgagacgcacgaaggcgcagccgttatggactggatggttcaggagcaggagcgcggtatcacgatcacctcggccgcgacgaccgcattctggaactacaagggcaaccaatatcagatcaacctgatcgacactccgggacacgtggacttcaccgtcgaggtggagcgttcgctgcgcgtgctggacggcgccgttgcgacgttctgcgccgtgggcggcgtcgagcctcagtcggagaccgtatggcgtcaggccgacaagtacaacgtcccccgtctgggttatgtcaacaagatggaccgcacgggcgccgacttcttggccgtgtgcgcgcagatcaaggagcacttcggtgcgacggccctgccggtcgttcttcccatcggcgccgaggataagttcgaggggctggtagaccttatatataataatgcgatctactactacgacgacaagaccgtgcgcgacaacttcgagctgaaggagattcccgaatcgatgaaggccgaggctgccgaatggcgcgccaagctcatcgaagaggttgcggcgaccgacgacgccctgatggagaaattcttcgaggatccggattcgatcacggccgaggagctgctcgcagctatccgcaaggccacgatctcgatgcaggtcgtgccgatgctctgcggttcgtcgttccacaacaagggtgttcagaaactgctcgactacgtgatggctttcctgccttcgccgctcgacgtgcccgcagtgacgggtatcaaccccaaaaccgagaaggaagagacgcgtaacgcctccgaggacgatccgttctgcggtctggcgttcaagatcgctaccgacccgttcgtaggccgtctggctttcgtgcgcgtttactccggtaaactggacgcaggttcctatgtgctggatacccgcagcggcaagcgcgagcgtatcagccgtatctaccagatgcacgccaacaagcagaatccgatggagaccgtcggcgccggcgatatctgcgctgccgtaggtttcaaggagattcgcacgggcgacacgctctgcgccgagaacgcaccgatcgttctggagcagatgaccttccccgaaccggtgatcggtctggccgtcgagcctaagacccagaaggacctcgacaaactcggcatcgcgctgggtaagctggccgaggaagaccccaccttcacggtgcataccgacgaggattcgggacagaccgtcatcagcggtatgggcgagctgcacctcgatatcatcgtagaccgtctgcgccgcgagttcggtgtggagatcaaccaaggcgctcctcaggtcaactacaaggaggcgctcaccaagacggttcagcaccgcgaggtcttcaagaagcagaccggcggtcgcggtaagttcgccgacatcatcttcgagatcggtcccgccgacgaaggtcagatcggactcacgttcgtggatgaggtcaagggcggtaatattcccaaggagttcattccttctgttcagaaaggttttgcttcggcgatggacaacggcgctctggccggctacaagatggactcgatgaaggttaccctcaaggacggttcgttccacccggtggactccgaccagctctcgttcgagatcgctgcccgtaacggttaccgcgcagctgctcccaaggccggttcggtgattctggagcccatcatgtccgtggaggtcgtgacccctgaggagagcatgggtgatatcatcggcgacctgaacaaacgccgcggacagatcaccggcatggagtccaagggcacggctcgcgtcgtgaaggccaaggttcccctgtcggaaatgttcggctatgtgaccgtgctccgcaccatttcgtcgggccgcgccacttcgtccatggagttctcgcacttcgaggaagttcctgccaacttggccaaggagatcatcgagaaagcgagtggtaaacgtaaggatatagaataagaaaacatatgaaccagaagattagaatcaagttaaagtcattcgatcacaatctcgtggacaaatcggccgagaagattgtgaagactgtgaagagcacgggcgccgttgtgagcggtcctgtgccccttcccacgcacaagcagattttcacggtgaaccgctcgactttcgtcaataagaaagcccgcgagcagttccagctctgcaccttcaagcgcatcctcgacatctattcgtcgacgcccaaaacgatcgacgcgctgatgaaactggagcttccctcaggtgtggaggtcgaaatcaaggtgtgataacggaaggcttgtacctgttgagtatagcaacgaaagatcactttatttataacaaacaatcgacaacaaatgtcaggacttattggaaagaaaatcggaatgacttccgtttacagtgccgagggtaagaatataccatgcactgtcattgaggctggtccgtgcgttgttacgcaaatcaagaccgtggagaaggacacctacgaagcggtacagattgcctatgacgagaaaagtgaaaagcacaccagcagcagtttgttaggacacttcaagaaagccggcactacccctaagcgcaaaatggctgaattcaagggtatgcccgaagtgaatctcggcgacacgcttaccgtggaactcttctcggaagaggactgggtggacgtgaccgggatatcgaaaggtaaaggcttccaaggcgttgtgaagcgtcacggtttcggcggcgtgggcggacagacccacggtcagcacaaccgtcagcgcaaacccggttcgcttggcgcatcgtcctatccctcgcgcgtcttcaagggcaagcgcttgcccggccagatgggcggtgagcaggtcaaggttttgaacctgcgcgtattgaaagttattcctgagagcaaccttatcctcgtgaaaggttcgattccgggagcaaagggtgcttatttaacaattgagaagtagtatggaattagctgttttaaacacacaaggaaaagaaacgggtcgtaaggtagttctttcggacgccgtcttcggcgtggaggctaatgaccacgctatctacctcgacgtgaagcagtatcttgctgatcagcgtcagggtacgcacaagtcgaagcagcgcaacgaagtcgccggctcgacgcgcaagctcaagcgtcagaaaggcaccggcggcgcccgttgcggcagcatcaagtctccgctgtttccgggcggcggccgtatcttcggtccccagccccgcgattacagcttcaagctcaacaagaagctcaagcagctcgctcgtcgcagcgctttgacctacaaggctcaggcaggtgcgatcagcgtcgtggaaaccctctcgctggatgctcccaagaccaaggctgtcgtggctttggccgacgcactgaaagttgcagacaagaaagtgctgctggttctcccggagtccaacgccaatcttcagctttcgtgccgcaacctgccttacgtacagcccgtgctggctcagaacgtctgcacctacgacgtgatgaacgcatcggcgatcgtgatggtggaaggtgccgagaatgttttgaatacgatgttagcttaaaaacgcaagacacacaatggaaattattattaagccggttttgaccgaaaaaatgacgattcagggcgaaaagttgaatcgctacggttttatcgttgacgtgagggctaacaagctgcagattcgcaatgccgtagagcagatgtacaacgtcgtcgtgacgaatgtgaacaccgtgaactacatgggcaaactcaagagccgctttaccaaagccgggcttctggagggtcgcgctaacaacttcaagaaggctatcgtcaccttgaaggacggagataagatagatttttacagtaatatctaacgaagatggcagtaaaaaaattcaaacccgttactccgggtacaagacataagatcatcggtacgttcgacgaaatcacgacgaataagcctgagaaatcgttgctcagcccccagaagaattcgggcggacgcaacaattccggtaagatgacggtccgctatatcggcggcggtaacaagcagatgtatcgtaacatcgacttcaaacgcaccaaggacggcatcgctgcaactgtaaaaactatcgagtacgatcccaatcgtaccgcacgtattgcacttctggtatatgccgacggtgagaagagctacatcatcgcaccgaacggactccaagtgggtcagaccgtggtaagcggcgcaggcgtcgctcccgaagtcggaaacacgctcttcctgagcgagattccgctgggtacggtcatccacaatatcgaactctaccccggtcagggagccgcgatggctcgctccgccggttcttacgcccagctgctggctcgtgagggcaaattcgccatcatcaagctgccttcgggcgagactcgtatggtactcgtaacttgccgcgctaccgtgggtgtcgtgtcgaacatcgaccacagcctcgaaagctccggtaaggcaggtcgtgagcgttggctcggccgtcgtccgcgcaaccgcggcgtggtgatgaaccccgtcgatcacccgatgggtggtggcgaaggccgtgcgtcgggtggtcacccccgttcgcgcaagggtctcttggccaagggttacaagacgcgtaatcccaagaagacgacctcgaagtttattatttccaagaagaaaaaataattaaataagagtacataatgagccgttcattaaaaaaaggaccgtttatcgaccccaagctcgaagcgaaagtcgtcgctcaggccgaaggtaacaaaaagtcggtgatcaaaacatggtcgcgagcaagtatgatttcgcctgacttcgtgggtcagacgatcgctgtccacaacggaaacaaattcattccggtgtatgttactgagaatatggtagggcacaaactcggcgagttcgctcccacccgtacattccgtgggcacagtggtaacaagaaaaaataggtagaaaatgggtgcaagaaaagcaataagagccgagaaactgaaggctgaaaagaagcagaaggcaatcgccgtcatgcgcgactgcccgacctcgccccgcaagatgcgcctcgtggccgacatcatccgcggcgtggagatcaataaggcgctgggtatcctccgctattcgaagaaagaggcgtcgatccgtttggagaaactcctcaaatcggcgatcgccaactgggaggccaagaacgagaccgaacgtctggaagacacgacgctctgcgtgaaggagatcttcgtggacggagggcgcatgctgaaacgtattcaggctgctccgcggggtcgtgcgcgccgcatccgcaagcgttcgaaccacgttacgatcgtagtagacaaaatggtaaccgaagaaaagaagtaagcaaatgggacagaaagtcaatccgatagcaaatcgtcttgggatcatccgcggttgggattccaactggtacggcggcaaggatttttccgacaagctggtcgaggacgccaagatccgcaaatacctgaatgtccgtttggcgaaggcaagtatttcgaagatcatcatcgagcgtacgctcaaactcgttaccgttaccatttcgacggcacgtccgggcatcatcatcggcaagggcggtcaggaggtcgacaaactgaaggaggagctgaagaagctcaccggcaaggagattcagatcaatatcttcgaggtgaagcgtcccgaggtggatgccgtcatcgtgggccagaacatcgcccgccagctcgaaggccgcgtatcgttccgccgcgccgtgaagacggccgtggcttcgacgatccgcatgggtgccgagggcatcaagattcaggtttcgggccgtgtgggcggtgcggaaatggcgcgcagcgagaccgtcaaggaggggcgtattccgctgcatacgttccgtgcggacgtggattactgcctgacggaagccctcaccaaggtgggtattctgggcgtgaaggtgtggatctgccacggtacggtgtacggcaaacgcgatctgttcgaaatcgcaggcgcatcggcgcaggctccttcgggagaccgtggcgagcgcggtgatcgcggagaccgtcgcggccgcggagaccgtcgcggaggacgcggcgaccgtggcgaccgcggtggtgaccgtcgtcgcaacaacaacaataagtaagtcggacctttttaaagcaaaacaacaatgttacagccgaaaaagaccaaatttagaagaatgcagaagggtcgtatgaaaggtatcgctcagagaggtaaccaacttgcatacggatcgttcgcaatcaaggcacttgaatcgacttggatcacaggtcgtcagatagaggcggcccgtcaggccatcacccgttacatgaagcgtgaaggtcagctctggatccgcatcttccccgataaacccatcacgaagaaacccgccgaggtgcgtatgggtaagggtaagggtaatcccgaaggattcgtggcgcccgttactcccggacgtattctcttcgaggcggaaggcgtgcccttggaaatcgcgcaggaagccctgcgtctgggcgcccagaaactgcctattaccaccaagtttatcgtacggcgtgactacgtcgaaaccacaatctaacgagacgacaagatgaaaagtgcagaaatcaaggatatttcgatcaaggacctgcaggagcgcatcgagaccgaaaaggcgcagctggcgaagctgaaggtgcagcacgcggtgtctcccgtcgagaacccttctatcattaagaaaaatcgcagagatatagctcgcatgctgacaatcctgcgtcaaaagaacgcctaataaggaataactatggaaagaaatcttagaaaagagcgtattggggtggttgtcagcaacaaaatggaaaagaccattgtggttgcggtcgcacgcaaagtgaagcatcccatttacggtaagttcgtcaacaagacgacgaagttcgtcgctgagagcctcgacgagacctgcaaggagggcgataccgtgcgcatcatggaaacccgcccgctgagcaagacgaagcgttggagattagtacaaatcattgaaagagctaagtaattatggtacagcaggaaagtagactcatagtagctgataacagcggtgcgaaggaagtcctctgcatccgggtgctcggcggcaccaagcgccgctacgcatctatcggtgataagattgtggtggctgtcaagagcgcgactccttcgggcgacgtcaagaagggcgccgtgtcgaaagcggttgtcgtaagaacgaccaaggaaatcagacgcgccaacggttcgtacattcgtttcgacgacaacgccgtggtgctgcttaacaaccagggtgaaatgcgcggtactcgtatattcggccccgtagctcgtgagctgcgcgaccagtatatgaagattatctccctcgcacccgaagtattgtaatcataaaaacaatttcggatatgtcagtgaaattacatattaagaaaggggatatggtccaagtcattgccggtgacaacaaaggccagcagggcaaagtcctgaaggtcgaggttacgaagcagcgtgccatcgtcgaaggcgtgaacctctgcaagaaggctaccaaacccaacgcgcagaatccccaaggcggtatcgtcgagaaagaagcggcgatccacatctcgaacttgcaggtgctcgaccccaagagcggtaaaccctcgaaggtgggccgcaagctcaatgcaaaaggtaaattagtccgttacgctaaaaagtcaggggaggagatcaaataatggcatacgtacctacactcaagacacaatataaggagcggatcgaacccgcccttatgaaggagttcggttattcgagcgtcatgcagtgcccgaagctcacgaagatcgttatcaatcagggtatgggacaggctgtagccgataagaagcttatcgacgtggccgaggccgagctgacgcagatcacgggccagaaagccgtgcagacgcgttcgcgcaaggacatctccaacttcaagctgcgtaagggcatgcccatcggcgtgcgcgtgacgctgcgcgatacgaagatgtacgagttcttggagcgtctgatcgccgtggcgctgccccgcatccgcgacttcaagggtatcaacgagaagttcgacggtcagggcaactacaccctcggcatcaccgagcagatcatcttcccggagatcgacatcgacaagatcaccaagatcttcggtatggagattacgttcgttaccacggccaagaccgacgaggaggcttacgcgctgctccgcgaattcggccttcctttcaaaaacgctaaaaagaatcaataagctatggcaaaagagtcaatgaaggcacgcgaggtaaaacgcgtgaaactcgcaaaccgctatgcacacaagcgcgaggagattgctgccaagttgaagagcggtgagatcgaccacgaggaggcttgggttgcgctttcgaagctgccccgcaactcgaatccgatccgccagcacaaccgctgcaagatcacgggccgtcccaagggctatatccgcctgttcggcattagccgtatccagttccgcgagatggcttcgaagggcctgatccccggcgttacgaaagcaagctggtaatattttcggatgccggatcaggtccggtatccgaaaattcattttctgccgggaggcaatccgaagggggaggggagtagggctgtgaaggctctaaggtaggctgagttcgtccgaagggagggacaaggtttgccggttaagctcatctgaaggagaaatcccggatacgagtccggattttgagggcgcaagcccgtggacggacggctgtcgctgagacggcccggcgtcggagaggggctttgcaggagggggaaacccggaatgcggagcgtgaatccggcgattgtgcgcaggccgatgaagcctgccgcagtccgataccgcagagatcggggcttatatgggtgcagaatccgagtagttacgtcgcaatgtcgaggaaagtgccgccgcaagcggtaacttctcggcggcggggcggaaatcgaggggttaggcatttggttacaaatttctcggaccaaggggccggagagagaccgcgcagaatgcgtacggcacggcgtaacccgttgaatgacggggcggcgcgtgtggatgcggatgcggcgtgacgggcgggcggaaagccgccgcagcgtcgtcggacggaatcttctcctgaaaggcggacggttgtcgatgggaatttttgtacgggtcatgttagcaacacctcagtgctaacattgtccgtattccggcatcggcacttaaaacgctgaaaataggctcgtaacttggttttttgagaaataatatgtatatttgcgcgctttatccccatgccgaacggcctgtcggagagcgcaaaagcgctgaacgtgaggcgcaaaacgaaaaacatccgaagcggcggcgagtctgttgaaagattcaaagtgctgaggaccaaataattaactaattcattaatttttaacttctattcgttatgactgatcctattgcggactttctgaccagaattagaaacgcagtgaaagccaaccacaaagtggttgaagctcctggctcaaaaattaagcaggaaatcactaagattctttacgagcagggttacatcctcgcttacaaattcgacaccgacgagaaaggtcatccgtcgatcaaaatcgcccttaaatgggacgctgccaccaagggcaacgccatcaaggacctcaagcgcgtgagccgtccgggtctgcgccagtatgtgtcggtggccgacatgccccgcgtgctgaacggtctgggcatcgccgtgctctcgacttcgaaaggcatcatgaccgacgccaaggcccgtaaggaaaacgtgggcggcgaggtgctgtgctacatctactaacggaaatttttaaacaagaacaacaatgtcaagaattggtaaattacctgtaaacctgcccgccggcgttaccgtagaggtttcggccgacaatgtggtaagcgtgaaagggccactcgggacgctgagtcagaaagtggactcggacatcaaggtagaggtcggcacgcacaaggacatccacaccgggaacgaaattcccgccgtgctcgtatcgcgtcctaccaaccagccccgccaccgttcgctgcacggtctctaccgtgcgctgatcaacaacatggtcgtcggcgtatcgaagggctacgaaatcaaacaggaactcgtgggcgtcggtttcaaagccgaagtcaagggccagatcctcgaaatgagtctcggttactcgcacgacacgcatttcatgcttcccaaggaggtgaccgctaccgccgtgacggagaagaagggcaacccgatcgtaacgctgaagagcatggacaagcagctcatcggccaagtcgccgccaagatccgttcgctgcgcaagccggagccgtacaagggcaagggtatcaagttcgtcggcgagcagttgcgtcgcaaggccggcaaatcagcaggtgctaaatagtaaatagtctagagttatgtcattgaacaagatagaaagaagagagaggatcaagatgcgtatccgcaagatcgtgagcggaaccgccgaacagcctcgcatgactgtatatcgtagcaacaagcagatctacgtgcagtttattgatgaccttgcaggtgtgaccatggctgcggcatcctcgctggacaaagaggtggcggaagccgccgccggcaagaacaagtgcgaagtagccgccctcgtgggcaaactggctgccgagcgcgctgccgccaaaggcatttcgtccgtagcgttcgaccgcaacggctacctgtatcacggaagagttaaacagctggccgaagcagcacgcgaaggcggtcttaaattctaagcgattatgtcaaataccaacataaagaaagtacgcactagcgatctcgagcttaaggacagactcgtaagcattcagcgtgttaccaaggtaaccaagggaggtcgtacattcagtttctcggccattgtcgtcgtcggtaacgaggacggcgtcgtaggctacggtctgggcaaggcttcggaggttcagtcggccatcgccaaaggcgtggaggacgcaaagaagaatcttgtgaagatccccgttatcaacggtacgattccccacaagcaggagctccgtttcggcggttcgctcgtcatgatccgcccggccgctcccggtacgggtatcatcgccggcggcgccatgcgtgccgtgctggagtcggtgggcgtgaagaacgtgctcgccaagagcaaaggttcgtcgaacccccacaacttggtgaaggctaccatcggcgctctctgcgagctgcgcgatgcgcacagcatcgcccgtctgcgcggtatctcgatggacaaggtgtttaacggttaatttcgtagagacaaatggcaagattgaaaatcacccaagtcaaaagccgcatcggcgcaaccgagcgtcagtgcaaaaacctcgacgcgctgggactgaagaggatcaacgcgagcgtcgagcacgacgactcggcgatcatcaaaggcatgatcgagcgcgtgaagcacctcgtcaaagtggaggaggtagccgtcaagaaggctgcagcgcccaaggccaagaaggccgaggctacggaagcagcagcagaataagtttaacagctaagaagtaattttacgatggaactcaataatctcaaacctgcaaagggttcaacgcaccacgacaaacgtatcggtcgcggtgccggttcgggtcacggtggcacggccacgcgtggtcacaagggtgcgcagtcgcgttcgggttactcgcgtaagctgggcttcgaaggcggtcagatgccgctccagcgtcggctccccaagttcggtttcaccaacctgaaacgcgttgaattcaaggcgatcaacctctcgacccttgaggagctggccgccaagaaatcgctcgccgagatcacggtagacacgcttatcgccgcaggtttcatctcgtcgaaggacaaggtgaagatcctcggtaacggtgctgttaccaaggcgctgagcgtaaaggctcacgcattctcgaagagcgccgaagctgccatcacggccgcgggcggcagcgtcgaaaaactctaggaacccttagaaaccgaaaattatgaatcagtatctcgttgttggtgtcgtctttttagtggtaatcgctcttttggcgaccaacaagaaattggttgaaacgctcaagaatatctacaagatcgaggagctgcgcaaacgtgtgatctacacgatcgggctgctgctggtctaccgcttgggtagtttcgtagtgattccgggcatcaaccccaacgccttgggcgaggggtcggcttacgccagccagctggagggcaacggactgctgggtctgttgaacgtattctccggcggcgcattcggcaacgccgcgattcttgcgctcggagtcatgccgtacatcaccgcctccatcatcatccagctcatgggtatgatgatcccgtatttccagaaaatgcagaaggaaggtgagagcggccgccgcaagatgaaccagtggacgcgctttctgacgatcggcgtgctgatcctgcagggtccggcgtatatcgccaacctgtatcatcaggtccccactgcgttcgtttacggcaactcgttcggcttcgttgcctatgcgacgacgatcctgatcgcgggtaccatgttcatcatgtggctcggcgagaagatcacggacaagggtatcggtaacggtatctcgctgataatcatgatcggcatcgtggcacgtctgccccatgcgctgttggccgaggtcaatgcgcgcttccagaccgccagcggcagcgccatcatgcttatcctcgaactggtgctcctgttcctcgtcttcatggcgacgatcgccctcgtgcaggctgtccgcaaggtccctgtacagtatgcaaagcgtatcgtcggtaacaaacagtacggcggcgtacgtcagtacattccgctgaagatgaatgccgcgaatgtgatgcctatcatcttcgcgcaggctctgatgtttattccggcgctgttctccggtacggctttcgcggctgctttcagctcgatgaccggcttctggtacaacttcacgcttgcagtgctggtaatcgcgttcacctacttctacaccgcgattatcatcaatcctcaaatgatggccgatgacatgaagcgaaacggcggctttattccgggtgtgaaaccgggtaagcagaccgtgaactacatcgacaccatcatgacgcgtatcacgctccccggttcgttcttccttgccatcgtggcgattctgcccgctctggcgatgaagttcttgggcatacagcaggcgttcgcctacttctacggaggtacgtcgctgctgattatggtcggcgtggtgctcgacactctgaagcagatcgagagctacctgctgatgcgccactacgatggtctgatgaagaccggacgtattcagggtcgtcattaggagttttccgaagagttcttagcgaagaatgatatatataaagacagacgaggagatagagctgctccgcgagaacaatatactggtgtcgaagacactggcggaggtgggtcgccacatccgtccgggtgtcaccaccaagtttttggactcgattgccgaggatttcatccgcgcgcacggagcagttcccgccttcctcggatatcagggatttcccgcttcgttgtgtgtatcggtaaacgaacaggtagttcacggtatcccatcctcgaaatgcgtcctcaaggagggcgacatcgtttcggtcgattgcggtacgtttatgaaggggtttgttggtgattcggcgtatacgttcgccgtcggagaggttgccgaggaagtacggcagcttatggaggtcaccaaagaggctctttataaaggtacggcgcaggctaaagccggcaaccgcgtaggcgacgtgtcggcagccgtgcaggagtatgccgaaagcttcggttacggcgtggtgcgggagttggagggacacggtttgggtcgcaagatgcacgaagaccccggtgttccgaactacggcgcccgcggcagaggaccgctcctcaaggagggaatggtcatctgtatcgaacccatgataaacatggggaccaaagcggtggttttcgaaagggatggctggacagtccgcacgcgcgaccacaaacccgcggcgcactatgagttcgccgtcgcggtccgtaaagacggtcccgacgtgctgacggactttagtatcatcgaacaggcaattaacaagtaagactctatggctaaacaggctgctattgaaagggacggcacgatcatcgaggccctgtccaacgcgatgttccgcgtcgagctggacaacggacacgtgctcaccgcccatatctcagggaagatgcgtatgcactacatcaaaatccttcccggagataaagttaaagtggagatgacgccctacgatttgacgaagggacgtatatctttccggtacaaataacattagattgcttgaaaatcatgaaagtaaaagcatccatcaagaagagaagcgaggattgcaagattgtgaagcgtaaggggaaactctacgtcatttgcaagaagaatcccaagtttaaaatgcgccaagggtaatgtttaaacggtttattaaagaagaaaaagaatttatatggcacgtatagtcggtgtagatttaccaaaaaataagagaggcgagatcggcttgacctatatctacggtatcggtcgttcgacggctcgcaagattctcgaagtcgctggcatcagctacgacctcaaagtacaggactggtcggacgaccagatcggcgcaatccgttcgacgattgccgacatgggcatcaaagtcgaaggcgaatgccgctcggccgtccagctcaacatcaagcgtctgatggatatcggctgctaccgcggcatccgtcaccgtctgggtcttcccgttcgcggtcagtcgaccaagaacaacgcccgcacccgcaagggacgcaagaagactgtcgcaaacaagaaaaaggcaacaaagtaatctttagagaattatggcaaagaaaactggaacagttaagaaaaaggttgttaaggtcggtgccgtgggtaacgcttacgtacactccactttcaacaacgtgatcatcaccatcaccaacgaggtgggtgacgtcatcagctggtcttcggccggtaagatgggtttccgtggttcgaagaagaatactccgtatgccgcacagaccgcttcggccgactgcgcgaaggtcgcttacgacatgggcctgcgcaaggtgaaagtgtatgtcaagggaccgggtgccggtcgtgagtcggccgtgcgcaccatccacggcgcaggtatcgaggtgatggagatcatcgacgttactccgctgccgcacaacggttgccgtgctcctaaccgccgccgcgtataatctgcgtcggggtaaggaatatttctaaggttttaaaaaagtcaaaacaatgggaaaatacataggaccaaaatcgaagatcgccagaaagttcggcgaagctatttacggtgcggacaaggtgctcgaaaagcgcaactttcctcccggacagcacggtctggcgcgtaagcgcaagaaagtgtcggagtacggcacgcagttgagcgaaaaacagaaagccaagtatacgtacggtctgctggagaagcagttcgcacgcacgtacgatcaggcggcccgtatgggcggcatcacgggcgagaacctgctgaagctgctcgaatgccgtctggacaacgttgtttaccgcttgggtatcgccccgacgcgtgcagctgcccgccagctcgtttcgcactgccatatttgtgtgaacggcaacgtcgtgaacattccttcgtactcgctgcgtgcgggtgacgtcgtgtcggttcgcgagaagtcgaagagtctggaagtgatttcggcatctctggccggcggttcgaagagccgctacgcttggcttgagtgggataacgcctcgatgagcggcaagttcctgcagaagcctgagcgcgaggagattcctgaaaacatcaaggagcagctcatcgtcgagttgtactcgaagtagtaatcaaacaaattcaaatatattatggcaatattagcattccagaaacctgaaaaggttattatgcttgaatccacttcatcgttcggaaagttcgagttccggccgctggagcccggattcggtatgactgtcggtaacgctttgcgtcgtattctgctctcttcgctggagggttacgcaatcacgactgtcaaggtagccggtgtcgaccacgagtttgccgctatccccggcgtgatggaggatatgttgaaaatcatcctcaatctgaagcaggttcgttttatccgcacagtcgataatcaggatgccgagaaggtctccattaacgttgcgggtgtgacggagctgactgccggatatatctcgaattacctctcgttcttcaaggttttgaaccccgatctggtgatctgccacctcgcgcccggcacgaagatgcagatgacgctgaccatcggcaagggccgcggctacgtacccgccgaggagaatactcccgccgagtgcgagttcggaacgcttccgatcgactcgatcttcaccccgatcaagaacgtgaagtattccatcgaaaactatcgtgtcgagcagaagaccgactacgagaaattgaatttggaaattactaccgacgggtcgattcaccccaaggaggctctgaaagaggccgcgaagattctcatccagcacttcatgctcttctccgacgagaagatcaccgtcaacatggaagacaccaacggcgccgaagagttcgatgaggatatcctccacatgcgtcagctgctgaagaccaagctctcggatcaggacctgagcgtccgtgccctgaactgtctgaaagccgccgacgtggatacggtgggggacctcgtgaagctcaaccgcaacgacctgctgaagttccgcaacttcggcaagaagtctttgacggagcttgacgagctgctgacctcgctcaaccttaagttcggtatggacgtatcaatctacaaacttgacaaagattaattatgagacacaataagaattttaaccaccttggccgtcaggcgggacaccgcaaagcgttgatgtcgaatatggcttcgtcgctcatcctgcacaagcgtatcgagaccaccgttgccaaagccaaggccgttcgccagttcatcgaaccgctggtgaccaagtcgaaggacgacacgacgcactcgcgccgtatcgttttctcgtacctcaagcagaaagaggccgtaaccgagttgttccgcaccatcgcgccgaagatcgccgatcgtccgggcggttacacccgcatcctgaagaccggtttccgtctgggcgacgctgccgacatgtgcatcatcgagttcgtcgatttcaacgacgcttacacgctgggcatcgctcccgcagccgcagccgaggctaaacccaagacgcgccgttcgcgcaaacccgcagcgaaaaagaccgacgctgtcgaggaggctaccgttgtcgagggcgaagccaagaaagccgcacccaagaaggccgctgctccgaaggctgcgaaaccggccgctcccaaagctgccaaggttgccgctccgaaggttgccaagaagaccaacgtgggcaagaaaatgtagttttccgtttaatcggaaaacgatcggaaaatccggataccccgatgggtgtccggatttttgtcgtttgtgcgggtgaatctgtcgtttatgcgaaggatttgtcgttcggcggaaagattcgttgtcgtgcgggaggagtgcggcggatggtttgtccgttactcctgccggcgggcggaaactttgccggttcggagacattctcttgtcccttgtccgtccgtcgtccggctgccgagggcctattggcggttcagcctatgggtgaaggccggatagacgaggcccgtgtaattcgctttggcggattcgatcgtggccgtcgtaccgtcgtaggtgtccgtgaaggagacttcgtagaggaaacagccgcggtaacggttgtttttcagcagttcgtaatagaactctccccagtcgatcagtcctccgtcgtaaggctgcaggtgcttgtccagcgtgccggattgcccttcggcgccgggattctgctggatgtgcagcgtgccgaggcgtgtgccgagctttcggagtatggcgacggcgtcgccgtttctggtcggattgatatacgacccgttcagcggaatcagggcgtggcccgtatcgaggcagacgcgcacctgctccagcccctcgccgctgagcagggcgagcatcgtttcggcatcgtaggcgacgcttcggggacagttttccacgcagagaatcgtgtgcaggccgtacgtcgaattgcaggacgcgatgtgggtctgtaattccctgagcgatttccggctctggaccttgcgtgccgcgaagtcgtttccggtggtgagtatcgtgccggtggaggggtgaattacgaaatgcttgggcgacatgtgtttcatgacgctggttatcacggctttgagtttcgctacggccgtggtgcgggccgtttcgtcggtcgccgagatgtcgtatgtccggtagggcagatggacgccccacaggtttgccgcggcggagccgattgccgctcccgcctcggaaaacagtgcgtcgagtttcgcgtcggtcattccttcggcgaagacggtggcgtcctgcgccatgatgtcgatgcacatgccggccgccgcggcgcgtttgcagttggtcgtgttgacctgtttgagtgtaatcagtttgcccggtttgagttgcagccggaagatgtcgttgttcggggcgcccaacgccgtcgtcggttcgacgacggtgattttgccgtcgcccgtttccggacccttgtcgtcggagcctccgcagttgcagaggagcgcggcggccagcagcggaagtatccgcgtttttttcattttgcaggaggttgattgtaaacgatcggcgggcgggggattgtccctccgcccgccggatcgtgtgaaagtgttcgtttagtttttcctgacaacgatgttgtccagacagatacggccgttggcgctggtagatcctgctcctgtcgtatcccagcatatctgggtttccgccgtcgcgccttcgatggttatcgagaaattggaccatttcttcaaggcctcgtttccgtgtttggggcagtgcgccgatgtgatattgatcgacttgccgccgctttccggagcgatcgatgcggccgaaccgctgccttcgacgaccacttgcgccgaagcgattgttccggcattcagtactttgacgggaatgtcgtgttccgatgcaaaccggacggcgtcgaatgtgacggtgacggtcgatgccgcggtcagttttgacagtttgggcgtggtcagcactccgtaatacatattcgaacccgaagccgaattggagagacggacatatcccggaaactcataacagtatttgatgccccaatccgtcagtccccggtttgcgagataggccggtgccgcatccttgtcggaactgatgtttatgccgaacgtcgtgtaacttgcagtagccgtggcaggttcggtgccgtcgatggccgcaggactcgtggatgccagttttctgccgctgcttgccactttccccgtctggatccagtcgcctccgtataccatcagatcgaaatactgttccagaatgatcgacggatcttcgttctcgacgagtttcagacgatagcgcggagtcttgtcggcgttggtgcagtcgatctcgacgtctattttgcaggtcgatcccgaaacattgacccagaatttatttatatcagcatcttcggtcttggccgtcatttgtccgagactttcccgcacgtagtatacggctgccgggtaggtgtagaacgggacggtcgcataaacgctgtttacggttccgatgccgccgttgccgctgtaagcggtgaacccgtaaggcgtgttctcaatcaggatggtgatgtcgtccgaggccttgcaggtgatcgcagcggtatagatgccggattccgactctttgagttcgtacaggcttccgtcggaagtccttgcccatacgccctccgaagtgtcgatcagctggaacggaagcgtaagttcctccgaatcctccgaatcgggcagttggcccttggcgtatatggtaaaggtgtttttcgcttccggatcgaatccgctcttggtgattttcaatacgtcggctccgacttcggtccattgcgtctcgtcgttgaatttgtaggcatagccgatggcgcctttgacggcttgccatgtgacgacgacctcgtctgcggattcgcctctggtgcatgacggggccggggtcggaagcgtcgggtcgatgtcgaaatcgacggtgcgttcggccgagtcggtcgtgtgtccctgattgccgacggcatagatgcggaacgtatgcgaaccgcgcgaaagtcgggtcagtttcagggttgtggtcgctgcgtcgacggtcgtgtattcggtggagttgtccaaagcataggcatagccttccgtttttgtgacggcatcccatttgaaagaggcggtcgccaactcggtcgtaaccgcaagttttttggggctgaccagctcgatgctcatgacctcgtcgtccgacgattcgcacgaactcaggccgagcgccagaagcaggcaggggaataataataactttttcatataggttcggttcttagtctgtttttaataatccagatggtatatgccgggatgcgaatcggggtcggtgaagaccgtctgttcgtatttgttgccgaagcggtcgatcgcttcgactttcacgtccgcatcggcattcgtcagcgtgtagtagaacatatgatccgtggccttgttgtagctgctgctgttgttcaggatgccgatgtggtaggccactgtccatgcgtccttgtccgaatactgggtcatggtgccggttttcgcgccgttttcatagacattgacggtccaagcggggtcccagttccagatgttcgcgacgatctggccggcgtttttcttcgagaagtagtacgaagcgtcgccgccgccggtgaatttgtcggacccgcggtagagccggatctggaaatcttcgccgtgctgcaccgatttgtagttccactccttcatcgcggcgccttcgatgcggtagatgccgaagccgatgggcgtgccttcggtgcagacggtcgaacgccaccatgcgccgcaggaggtgcccgtgacatgctcgaagatctccttgccgttcttggtgtggatgtggttgatgttcgagtgggtgtgggccgacatgatcgttgcgtatttgtactgcgagagcagctccagcacttcgtcgtagtaggcgtatttgctgttgcggaagggaatgtgaacgcacaggatcaccattttatccttcggaacatagctcaggtcctgcttcagccactcgtattgctcggcgctgaaaccgccggtgtaacctgcgctctcctgacattcgtggatgatgttgtccatcgatacgatatgcacgtcgccgcggttgaacgaatagtccaccggaccgaagaagctttcgtatttcgcgcgggcctccttctcgttggccgtcgggaattcgtggtcgtggttgccgatggtcgagaatacggggattcccgtctgttcgggctgcagggccaccaccatgttgctgtagagcgcccatttgttgttcaccaagtcgccgaggtggatggcgtagcacgggatgtcggccgcggcggaatactcccggatgtccttggccgcttcgcgcttgaaccggacggcgtgcgccgcctcgttgatctgggggtcgccgatgcagatcaggtcgaaccgggtttcgggagcgtccagcgccgtcagcgtgaagtcgtagcgggcggtttccggtttgagtttggtgaagaatttgggcagtttgtaggtcttgtgcatgttgaccttgtagcccgaaggcagggagtagaagacgaagcccgattccgcgttgcgggtcagcacatactggccctcggcgtcggtctgcgtgcaggtgaagccgtcgcttacgacaacccccggaacggggttgccgtttgcgtccgtgacatatccgtaggtgtcgccgccgtcgggaacgatctctccgccgtttccgccgttattgtcattgccgtcgctgtccgagcaggccgcgaaaaccgcgatcgagcagaagagaagcagcagtctgtatagccgttgtatcatggtgtgtttgtttttattgttattcctcgattgaatggccggcataaccggggttctgggttatcagcggattggcgatgcgctcgtcctccggaatgggccacagggcgtctttcatcgggtcgtaggacatcgtgatgaatctgcgcaggttcatatccttgccgtcgaacgtctggccgttgtaggttacgtgccagtcggagtcgatcgtcggtacggcgttcgataccgaaccgtcgagagccggtgcgtagagcgtcccggagatgaccgattcggccatatcccagcggcggatgtcgaaccagcggaaaccctcgttgcagagttcgaccatacgctcgtagcgcagcgccgaacgcaggccgtcgcggctgaggttttcaccgagaccgggcatgtgtgcgcggctgcggatcgtttcgatgtcggctttggcgacgctgaggtcgccgccgttccactcgatgttggcttcggcgcggatcagataaagctcggccagacgcatcagcggatagctcagcacgcataccgagctggtgccgaatgcattgttgtatttgtactcctgaatgtcgaggtatttgcgccacaagtaaccgcacgggcctttcgaaccgttggcgccgtattccgatttgctgccgtaggcttccgagtttgcgacgtctacgccttcttctttgtcattgtagttcttgatggtctgggcggaaggattggtctcgaactgcatgcccagtacgcgggaacccggacgtacgcagaagagatcgagacgcgggtcgcggttcttccacggattctggtaatcgaacaggggcgattccacgatcgacttgccgtccgtgcactggatggcgtcgaggaaagcctgcgtcgggctgaagtaggagcagccgcctgcgatacgcggcgccgcataatagccggcattgtgctggttgctggagatcgccgtattgtactgcaaggcccaaatccattcgtcgctgttcttgtgaccgttgatgccgaacaggttggagggagtgggttcgcccttcgtgtggtcttcgccgcagtagcggatgtcgtatgcctgaagggaatatccgccctcttcggccagtttcagcgctttgtcggcataataggccgcctcttcgtaatatttccagttcagacagatgcgggctttgagtccgtaggcgcctgcgcgtcccagacgtgccgatccgtagctgttcttgttgtggcggatcggcagaaagtcgagcatttcgtccgcaagatcttcgttgagaatccgtgaaatcacctcttctttcggcgtgcgcgtgtaggtgtcgcccaatttcagggtgtggtcgatgtaggggatgtcgccgtaaagctggcagccccagtcgtagaggaaggagcggacgagcagcagctcggctttatacatattgtactcctgctcgctcatcagctcgcggacgttgtcgatgccgtccagtacgagattggcgcgggctgcggttttgtagatttgggtgtagactttggtcacccatgcgttcgaaggcgggagtttcgactgctgctggtagttgtagttggcggcgttcagacgcgatgcgccgatgtcggaagcattgtcctgaatgccggggaacggcgtcgaggatgcgtcgatcagggtaaggcccttgtaggtcgcgaagacgcccgcttccacctccgatttcgtagccgggaacgtggacgcattcggaccgttgagatatgctttgtcgagcgagcagcccgtgatgaagagactgcagagcgctatgccggtgattattttgtttttcatggttgtaatgcgttaaaatttgagttcgagtccgaccgtaacgatctttacctgcggatagttgttcgccgagccgagtttcacgacgtcgaagtcgccgctcgaatcgcctccgtaacccacctcagggtcgtagccgtcccagaagttggtgaccgtgaagaggttctgcgcattgacgtaaagataggccgaattgagaccgatccggtgcatccacgacttgggcagttcgtagcccagctggatgttcttcaggcggaggtaagcggcgcttttcatccagaacgacgagtcgtaccagttgtttttgttcgcactcgtcagacgcggagtcttgccgttgggattctctgcgctcgcccagtcgaggtgctccttgcggaacgtaccgccttggttgctgggcattacgtaataggtgttcagataaccgtccgttttgccgacgccttggaacagcagacccagacgcagccctttccagccgaagttcaggttcaggctgtaggtgtagcgggggatcgtgctgccgacgatgtctttgtcgttctcgtcgatcgagttgttgccgtcgatgtcggcatagcggatgtcgccgatctggacggtttccttgaactgcgggcagttggcgttgacccagtcggcctcctcctgcgtgcggatgatgccgagacttttcagcgcatagatgctgccgatggaataaccctcctgattgcgcagcacgccgctggtcgaggtcttgccgcgcatgtcgaggatttcgttcttgacgtcggacaggttggcctgcacgccgaacgagaagtcgcgccactggttgttgtaacccacgcttacctcccagcccgtgttgcggaccttacccgcattctggtagggagcgttgagaccgatgccgaggggcatgtcgagtttcatcagaatgtccttggtctccttgcggtaccagtcggccgtgatgttgagcttgttgaaaagcgagaaatccacgccgacgtcgagcatcgtggtggtttcccatttaatgtcggggttggccagcgtgttgagggtgacgagcgagtagatattgtcgttcatcgagatttgtcccatcgcgaggttctgcgtggtgggatagtagctggctgcgtcgccgccggcaaggttctggttgccgagcgtaccgtacgatgcgcggagtttcaatccgtcgattatgtgcttgacatcctgcatgaacggctcctcggagatgcgccatgcacccgataccgaggggaagtagccccagcggttcgatttgttgaagcgcgacgatccgtcgatacgcaggttggcctccagcaggtagcgctccttgtagttgtagttcagacggccgaagtaggactgtatggcccactcgtaacggcggccggagttgtccatgttgtcgatttcgcctacgtcgatctggtcgtagttgtaattgaagacctgacggtaggccatcaggtatttatagtcgtacgtgttgcgctcggcgccgagaatcagtttcaggtcgtggccgctgaagttgtgcttgaaggtagccagaaagttgtagttgccgtagaaagcgcgcgaacccgattcggtgagggtggcataggaagcggaggtcagcgtcgaggtgcctttgtagtcctgataggtcgtaacgggcttcttccagttgtggcggttggtggtcgtatagcgcggcgccagcataccctgcagggagagccattttgcaggctcgtaggtcagcgtgatggctcccgaaagccgtatggtgttggtgttgttgctgccgccgtaaagcatcagggctacggggttcatgccctgcattcccagaccgttgtaaagaccggtcgaaaattggttgggaatgtcggccggacgggtgttcatgtagttgaagatcgtgctctgatagggcgaggccttgcggtcgtcgttcgagaacgaaaggtcgagtttcatcgacagtttgtcgttgaacttgacgtcggcgttgttgcggaacgtgtaacgctggaagtccgcatttttgatgatgccttcctgatccacgtatcccagcgtggtgagcatgcgtacgcgctcgctgcccacgctgagcgaaacattgtggctgtgggtgaagcccgaaccggtcagcacggcgtcctgccagtccgtattgggataaagatccgggtccttgccccagtttttgcggtatagcgccatatcctcgtcgttgtaatcgggaatgggggtgctgcccggcttttcgccgttgaggtccacgccgtcgttgaggtacatggcgcgtgtcagctcgcggaattcgagcgcattgaccatgtcgggcaggtcggtcggcgactgccagcccacatagcccttataggtgatggagaaccgctccttcgaaccgcgcttggtggttacgaggatcacgccgttggcggcgcgcgaaccgtagatggaggaggacgcggcgtccttgaggatggagatggattcgatcaggttgggatcgacgctgtccagactgccctcgatgccgtcgatgagcaccagcggcgaggtcgagctgccgccgaaggagttgatgccgcggatgcggatcgcgccgccgtcatcgcccggtgcgcccgactgcgtggtgacggtgacgcccggagccatgccctgcagggcggccgaggtcgagacgatcgggcgtttgtcgaacgccttcgagtcgatggtggccaccgaacccgtcacattcacctttttctgggtgccgtagcccacgacgatgacttcgtcgatctgcgcattgtcgctttcgagccggatgtcgtaatcggtcttggtggttacttcgaccgaagtctccttgtagccgatgtaggagacggagagccgctggccgggagccgccgcaatggcgaacttgccgtttgcatcggtcgtggtacccccccccggctgagtgcctgtaatgacgatcacggtagctcctacgagaggcatgccgtccgcgtcggtgactgttccgcggactgtcgtctgggcgtgcacggccacactcaggcagcatgcgatgaccgctgccaacagttttgttaaggtgcgtagctgttttttcatagttggtgaaattagtaaaattttaaggtctttggtcttgggataaaacaccacggggcagacgcgatgcgcctgtccgtcggaaggaatccgggttattggcccgaaaaggccggaaattcagggttcataatgcgatgtcgtttgtcttggttgtgtgtgcgggtgttttctctttgttgtctgaattatgggtggagtttcttttcgttgtcgtaaggtattctttaggcgaaaggcgcgctcgaaagaaaatgcgcgtcggattatgcgggaattccgagtccgatacttattcggggcgatttccgtttgttgtataaaatataggtataaggccggcgcattggaaaagggttgtcggaggtttttgccgcatgagcttcggagaaaccgcccggattacagcgaaatgcccggtccgccggatatgccgtccggaaaacggaacgtccgtttgcccggcaggcagaggatgaggtcgtcgctgtaaagttagtcattatttgcttttatttgtttttcttatctttttcaggggtgaatttatatttattttttgtatttgcaaaatttattgccgaaaattttctttttgtagcaatattttaatatattcgcaaagtcaaataaagggttttgctctcttttacctttcgtttaccggacgatttgcactgaaaacaagctataatggaacacctgtacgttattggaatagactacggcaccgactcggtgcgggcgttgctggccgacgccgaatccggcgaagagattgccgtcgccgtctgcaattactcccgctggggccggggtttgtactgcgataccgcgaagtcgcagttccgccagcacccgctggattatctggaggggctggagcaggtgctgcggcaggtcattgcgcagtgtcctgcgccggaggcgatacgcgccatcgccgtggatacgactgccagcacgccgtgtctggtcgatcgtacctgcacgccgctgtcgctgacggcgggttatgaggagaatcccgatgcgatgttcgttttgtggaaggaccacacggcgcagcgggagtcggaggagatcaccgccctctgcgcccgcggcgaaatcaattacgcccgccgttcgggcaaccactattcgtcggagtgtttctggtcgaaggtcctgcacctgctgcggggttccgagagcctgcgccgcgatgcgtgggccgtcgtcgagttgtgcgactggattccggcggtgctgaccggctgccgcgctatggaggatttgcggtcggggctttgcgtcgccgggtcgaaggtgatgtgggccgaagagtggggcggctatccgcccgaagagttcttcgccggactcgaccccgttctgctgcccgtcctgcggcgtctgcccgtcaggacgtacggctgcgatacgcccgcaggtacgctcagccccgaatgggcggcgaaactggggctgtcggagcaggtcgtcatcggagtggggaatgtcgactgccattcgggcgccgtcggcgcgggcatctgtcacgggaccgtggtgctgaatctgggtacgtcggcctgctacatggccgtcatgccgcccgaaaagatgggcggccgggtggtcgaaggcattttcggtcaggtggacggctcgatacttcccggcatggtcggattcgaagcggggctgtcggccttcggcgacgtgtacgcgtggttcaagcgcctgctctgctggccgctgcgcgaagtgctgctgccggccgatcctgagaacgagacgctccgcgcgctggccgcgcagaccgaagagcggttgctggccaaactggccgaagccgccgcgcagctgccccttcgggccgatgcgccgctggcgaccgattatctgaacggccgccgttcgccctatccctgcaaccggctgaccggttcggtcgtggggctgaacctttcggcgactgcaccggagctttattacgcctttgccgaggcgacggttttcgcgacaaaggccatactcgaccatctggcggagaacggcgtggagatcgggcggctggtgggcatcggcggcatttcgcagaaatccccctttgtcatgcagctgctcgccgacgtgacgggtatggcgatcgaagtctccggcagtgcgcactcctgcgcgctcggcgccgtggtccatgcggctgccgccgcgggactctacccgtcggtcggtgcggcgcagcgggcgctctgtccgtccgtcgcccgtgtttacacgcccgacgccgcgaagtcgggcatattggccctccgctatgagcgttaccgcgccttgggcgctttcaccgagaacctttttataaaccgataagccaaaagaaacccgaatgaatttactccaaaacccgaacaagcgtcgttggtatattgtggcgacgattttcgtcgcaatcatctgcaactacctcgaccgccagctgctgtcgatcctcaaacccgaaatcctgacccatttcggcatcgaagacctccagtacgcgtggatcgtcaacgtattcctgatctgttacgccatcatgtatcccatatcgggcattctggtggaccgcttcggttcgaagaaggtgatgctgggaggtatcgtcgcatggtcgctggcctgcatcggcggcggcctttcgaccaacgtcgtcgaattcaccatctgccgcggcatcctcggactggccgagccgacgatcttcgccggacagatcgtggccgtcacgctctggttcgagaaacgccaccgcgccacggccaacagtctctgtacggcgggcggttcgctgggaacggtcatcgcgccgctggtcatcgcgtggatggcccggttcctgccatggcacgacgtcttcatcgtggccggtctggtaggtctggtgatcgccgtggcatgggcgctgatctataagaatccgccgcaggaggtgctggccgtcacaatggcccccgacaaggacgaagtcgcgcggaacaacggcgaacagcagcgggccttcacgtggggcgagctgtggacgacgcgctcgctctggggcgtgctgctgatccggctgatcagcgaccccgtctggtatttctgctgcttctggctgccgggatacctgcgcagcatgggcgaagcgcaggggctttcgcagcaggctacgctcgatatgattcagtatatcggcggactgccgttcctgttcggtgccgtgggcggcatcctcacctcggtctggtccgactggctcgtgcgccgcggcatgccggcgctgaaggcccgcaagacgatgatgattatcatggcgttcgtggcgccgctgtgtatcctcacgccctatgtgagcgagtggcaggccgtgtcgttcgatgcgcgcatcgggcttgtggtggcgatcttcagcctgatcgcgatcatgtgcctgagctggctctacacgatctgcgtggtcatcgccgaggcgtttcccgtgaagaacgtcgccagcgtggtcggcatcacggccggcgcgggagccgtgggcggcgcggtgttcaacattttcatcggttcgctgctggcgacgatgggcaacgtgctgttcgccgtcatgggcgtgatgcacctcgtcacggccgttatcctgtggcgcatggtacgccacgaaacacccaaaaacgtaaaataaaccttaaaacattgcaaatatggcaaatcagaaaaaaacgattacggaaccccggcgggagattccggttcgcgccgaagtggacgtgctcgtcgtgggcggcggccccgcgggcatcatggccgcacgtgcggcggcaggcaagggcctgcgcgtcatgctgatcgaaagccgcggctatctgggcggcaacctgaccatcggtctgccgattctgggttatctcggacgtaagggcaaccagattatcaaaggactgccccagctcttcatcgaccgcctgcgtgcgcggggcgccgccggcgaacaccgtccctgcaagctccatgtgagcctgacgatcatcgaccccgaagaggcgaagaccgtggcgctggagatgctgcaggaggtcggcgtcgaggtgctgatgtacgtcttctgcgtggacgtcgttaaaaacggcgacgccgtcgaaggcgtcgtcgtcgagagcaaggcgggacgcgaggcgatcctcgccaagacggtcatcgactgtacgggcgacggcgacgtggcctgccgtgcgggcgtcgagtgccgcaagggcgatgccgacggcggtatgcaacccccgacgctgatgttctgcatgaagggcgtcgacgtgcagaaactgcgcgatgcgctggtcggccggcccgatgtcttcgacatggacaccatgcccgccgagcagttccggaccgggaaattcatcaccgtcggcctgcgcaaccagatccgcaaggccgaagaggcggggtataagattcccgtggcgcgtacgatcctcatcaccggcatcaaggacgacgaaatctgggtgaacatgtcgcgcgtgagcggcgtcgatgcgaccaagccggaaagctatacgcacggcgaggtggagggccgcaagcagatttacgaactggaacgttacctgaagaacttcgttcccggcttcgagaacgcatggcgcgagaaggtggctcccttcatgggcatccgcgagagccgcgtgatcgtcggcaaatacatcctgacggccgaggatatcctcgcctgccgccgtttcgacgacgcggtcgccgtggccagctatccggtggatatccaccatgccacgggcggcgactgcacgctccactggtgcgaggactgctacgacattccctaccgttcgctcgtgccggccgcggtcgagaacctgctggttgcgggccgctgctcgtcgatgaaccacgaagcgatggcttcgacgcgcgtgatgtccacctgcatggcgctgggcgaggccgccggacgtgcggcgcgcatcgcgctcgaagagggcgtacgcccctcggcggtcgatgtggagaaggtgcgggaagaactgcgccagaccggtgcataccttcgttgatacggttttttggttagataatgtttaaaccgggtgagcctgtggtgggccggattccgcccgctgcagcgcttgctttaagatttgaaccgatgaagaagagttttatgctgtgtctggcaggctgtcttgcggcctgcgttacggcggtctccgcaactgcggcgcgtccggcgtccgggcagccggcgacccgcgtcatgacctgcaacgtccgcatcacgggactgcccgaagacgagaccgcaggacgccgctgggaggaccgccgcgacgcctgcctgaaggcgatccgcatgtatagacccgatgtgatctgcatgcaggaggtgatttacgattcgtataactatttcaaggagaaattctcggattatgtcgcttacggtttcgcaggtccggagatggacccctataccgagggttatcactttatcggcaagaacgtgattttcttcagcaaaaagcgctacgagttcgtctcgtcgggctgctactggctgtcggaaaccccgcttgccgcgggcagctgttcgtggaacacgatgcgcgcccgccactgcaactgggtgcgcctgcgcgaccggaagagcggtgcggagttccgcgtgctggacatccacctcgaccacaagtcggacgatgcgcggcgcgagcagatgaagatgatcgtcggggagtgcgcgcagtatgccgacggcttcccgcagatcatctgcggcgatttcaattcgggaatcgaaaatgcgcccgtcgcgtgcctgcgcgacgccgggtggcaggaggcgtacgaggccgtacacggtcccggcgaagcgggcttcacctatcatgggttcaaaggcccggattaccgaaaaaagaacgcgcgccgcatcgactttatcttcgtgcgcggcaacctgcggcccgtctcggcggagattctccgcgacaaggtcgatggtctgtaccccagcgaccactacttcctgatgtccgattttatcattcagtaaccgaacgaaaaacagatgagatttacaaaactattcgcagccgttctctgctccctcgcggcgctggccgcttcgggacagaacctccgggacgaaatagctgcaaatcccggcaagtccggcggcgtatattatgtctacacctacgacaatcccgtgctgacgcctgcgccgaagggttataaaccgttttatatcagtcactacggccggcacggttcgcgctggctgctgcacgacagcgaatacgacgaggtgatggccgttttccgggccgccgacgccgcgaatgcctttaccgagcggggacgcgaggtctacggccgggtgaagcgcgtctacgacgacggcatcgaccggggcggcgatctttcgcccctcggcgccgagcagcaccgggagatcgccgcgcgcatgtaccgcaatttccccgaagtattccgctccggcgcggtcgtcgatgcgcaggcgaccctcgtggtgcggtgcgtgttgagcatggcggctttctgcgagcggctcaaggagcttaatccccgtctggaggtgtcgcgcacggcgggccgcaggacgacgcgctacctcaatttctacagcaagccgaccaacccgacgctcagccgggaatacctcgacttcatcgacaagggcggttggctggaggagtacgagcggatcggggatcggttcgtgcgtcccgaccggctgatgtcggagctgttcgccgacggggagttcgtgcggacgatcgacgcgcagaagctgatgaagggccttttctatttcgccgccgacatgcagaacgtcggtctgggaatttcgttttacgacctctttaccaccgacgagctttacgggctgaacgtgtacgacaactataagtattacgtgatccgcggtccctcgccgctcaacaggcgttttccgcagtattacgccaaggcgctgctggaggatttcctcacgcgcgccgaccgggccgtggagggcggagcggtttcggccgacctgcggttcggccacgacggcaacctgatgacgttcgtgtcgctgctgcagttcgaggggtgcgacgtcgtggagagcgatcctgagaagatcgcccaaatgtggcccctgtatagaatatcgccgatggcggccaatatccagctggtcttctaccgtaagaaagcttcggacgacgtgctggtgaagttcctctacaacgaacgcgaggtgcggattcccgtcgcaagcgatctggcgccttactaccgctggaacgacgtgcgcgacttctaccggaacgtgatggagaacctgcccgacccggctgggaaataggccggcggcgtttcggggcgggacgctccgggacggatatgaaaaaagctcttcccggaggaagagcttttttttgtttgcggtcgggaccgcttatttagcaaagcctttgccgatgctgaggaaatcctccgccttgagggctgcgccgccgatcaggccgccgtccacgtcctcctttgcgaatatttccgccgcgttcgagggcttgcacgaaccgccgtacaggatcgccgtctcttcggctgctgcgccgaacttctcggccagcaccttgcggatgtaggcgtggatctcctgcgcctgctcggcagttgcggtcttgcccgtgccgatggcccaaacgggttcgtatgcgatcacgaggtccttgtactgctcggcggtgaggttgtagacgacctcttcgatctgggccttcaccacgtcgaagtgcttgccggcttcacgctcttcgaggttctcgcccacgcagtagatcggcgtcaggccgtttgcgtaagcctgcgccatcttcttgttgagcgtctcggaagtctcgccgtagtactggcggcgctccgagtggccgaggatcacgtacttgcagcccagcgccgcgatcatcgaagcggcgatctcgcccgtgtaggcgcctttggcttcggttgcgcagtcctgcgcgccgagtgcgacgtccgaacccttgagcgcttcggcaaccgtcgagaggtgcgtaaacggagggcatacgatgaaattaacgcacgagcatacttcgccgcggcctgcgacgatgttcttggccagttctacaccttcggcgggaagcgtgttcatcttccagttgccggcaacaattttctttctcatattcggtttgtttttataagtaaaataaattttccaagcggaattattcctcgcaccattttttgacttcttcgatcgagggtgccttcaggccgagtttgtttttcttgttgaagccgcacaagtcgttgaagaacttgcccggagcgagctttttcagcgcttcgaccgtaatgtagcccattttctggatcacgggcacccactcttcgggaacgccgatctcggtgtatttctccaccggatcgctcacggctttcttttcggggcgcatctgcgggaagaacagcacgtcctgaatcgaagcctgatcggtcatgaacatcgtcagacggtcgatgccgatgcccatgcccgaacacgacggcatgccgtattccagtgcgcgcacgaagtccatgtcgatgaacatcgcttcgtcgtcgcccttttcgctcagctggagttgctcttggaagcgctccagctggttgatcgggtcgttcagctcggagtaggcgttgcaaagctccttaccgttgacgaacagctcgaaacgctccgtcagttcggggttcgagcggtgacgcttgcacaggggcgacatttcgatcgggtagtccgtgacgaacgtcggctggacaagctcctcctcgcagtactggccgaagatggcgtcgatcagcttgcccttgcccatcgtcgcgtcggtctcgacgttcagacgcttgcaggcttcgcgcagctgctcttcgctctggccggtgatgtcgtagccggtcttttcgcggatggcgtcggtcatcgacaggcggcggaacggcgctttgaacgaaatctgcttgccgtcgagcgtcacctccgtcgtgccgtttacggccacggcgactttttcgagcatctgctcggtgaattccatcatccagaggtagtccttgtaggccacgtaaatctccatgacggtgaattcggggttgtgcgtgcggtccatgccttcgttgcggaagttcttgccgaactcgtagacgccgtcgaatccgccgacgatcagtttcttgagatacagctcgctggcgatgcgcaggtactggtcgatgtcgagcgcattgtggtgcgtgatgaacggacgggccgcggcaccgcccggaataggctggagaatcggggtttcgacctcgacgtagcctttcgagttgaagaactcgcgcatggtcgagatgattttggcgcgcttgacgaagacctcgcgcacctgcggattgaccgccagatcgacgtaacgctggcggtagcggacttcgggatcggtgaaggcgtcgaacgtctggccgtccttctccttgaccacgggcagcgggcggatcgacttcgagagcaccgtgaacttgcggcagtgcaccgacagctcgcccgtattggtatggaacgcgaagccttcgacgccgatgaagtcgccgatgtcgagcagtttcttgaacaccgtgttatacagcgtgggatcgccttcggggcagatgtcgtcgcggcggatgtagacctgaatgcggcccgtgtggtcctgcaattcgaagaacgaagcgctgcccatgatgcggcgcgtcatgatgcggcctgcgatgcggacgtccccgtagttgcccttggtctcgtcgaagttttcggcgatctcccgcgccgtggccgtcacttcgtaacgggcggcggggtaggggtcgatgcccagctcgcgcagggctgcgagcgactgtctccggagctgttcctgttcactgagttcgatgctcatatcgtatgtttttgaatgttttgactattaaccgtgcaaagttaataaattctgccgaaatacgaaccgggcgcggcacggaatgaaaaagagccgcattttttgcggctctccgtattgtccgggaagcgtcgtccgggcgagttgtccggggcggaagctattgtccgggggcattgggatgcgtcgtccggaggccagtcttccgggatgtgtcagccggcggcggaatcccggcggatcagacggcggtaggcccgcagtgcggcgtatccgagcgcggcgccgaccagcgtgccccatacgaggtccatcgggaagtgtttgccgaggtagatgcgcgagtagcagatcaccaccgagcagacgaccatcagccccgtgaaccagcggcggcggattgcgccgcaggcgagtacggtcagcgcgacgatggtcgcggcgtgcgccgagacggtgccgtacatgccgctgacggcttcgggcgggacgtggaccgcccagtggtgggggactgcctcgcggcgcatgacgcgcagcgaatcgggcgtgatgtccagcccttcgagcgagggggtgaacatcgggcgcgggcgcggttcgaaatcagggagcaggccgcccagcactccgttgctcttgaagatgcccgacaccatgtccgcgagtccgatcgccgccagcatcagcgccgtgaagatcagcatgccgcgccagccgctgcgccgccataccagccagaggatcagggcgtagagcgggagccacatggcggtgcccgaaacggtgagcatcacgcggtccaaggcggtgccgccgtcgaaattgagggctgagaaaaggtcgtggtcgaaggtatacatgggtcaatggatttgtcgtaaatggtcgcaagccgttttgggcgcattgccggaagtctttccggggagcggggccggacttgcagacacggctgccggccgtggaaggaacatgccgggatgcaaggcggccgtcatacgcagtttaaaactgaaagtagatgaacggttgtatgtcgctcgacttgacctgcatcacgcaccagatcatcgccgccgccatgacgatctgcaggaccagcggtgcgtgcgacaccagccgctgcgcgaagcggtccgcgcgtccgggcatcaggtggagcaggaagcctgcggcgatcagggcgaaggcgcccgcatagccggagacgacctgcgggatcatcgcggcgttgaagttgtagaaaatctggtgaagcatcagctcgacggtctgcatcgactcggcgcggaacatcagccaccccagacagacgaggttgaacgtaaagaagatgccggccgcgcggctccaccagtgcatccggtcgcccgtggccttggcgcccggcacgaccgccatccagagcttgtgcagcgccagcgccgcgccgtgcagcgcgccccagaggatgaagcggacggcggcgccgtgccacagtccgcccagcagcatcgtgatgagcaggttgccgtaggtgcgcagtttgcctttgcggttgccgcccagcgaaatgtagaggtagtcgcgcagccatgtggagagcgagatatgccaccgtcgccagaattcggtgatggtggccgacttgtagggggcgtcgaagttcttggggaaccggaatcccagcagcagggcgatgccgatggccatgtccgaatagcctgagaagtcgcagtagatttgcagggcgtagccgtagatgcccgccagacattcgaagcccgaatagagcagcggctcgtcgaagatgcggtcgacgaagttgagcgagatgtagtccgaaatgatcgccttcttgaacagacccgtcaggatcaggaagacgcccgtgccgaacatttcgcgcgtcacgacgatggggttctgccggatttgcgggatgaagtcccttgcgcggacgatcggcccggccaccagctgcgggaagaacgagaggtagaacaggtagtcgcaccagttgtcgagcggcttgagctgaccgcggtaaatgtctatggtatagctcatcgactggaagacgaagaacgagatgccgacgggcaggaagatgttctggaactgcatgaatccctgcccgaacatctggttggcgatgtcgatcaggaagttggtgtacttgaagtaggccagcatgccgaggttcaccgccacgctcagcagcacgagccaccgctttgcccgcgtcgagcgggcggcatggatgcccttggcgatccagtagtcgctcgtcgcggcgaagatcagcagcaggaagtagatgccgctcgacttgtagtagaagtagagcgaaaagaggatgacgtagacgatccgggccatcggggcgcggcggaacatgctgtagacgagcatgaatccggcgaacagaaacaggaacagcccgctgctgaagatcagcggcgacgaggcgtcgtacgtgagcagcgcctgcagcttttccgggatgccgtccaatgcggggagtgtcatttcagcggtgcgttgagggtttccggcggaatgccggggatcaggtcgcgttcgatccgccggcgccgcaggctgtcgagcacggcctgctcggcctgccggcggatgcgtgcggcttccgcttccgtataggcccggaacgccccggcgttgagggcgtcgaagagcgaccacgccacgcgccggccgccggcgtagttgatgtgcgtgaagtccttgccggcccagccgttggcgacgaactgctccatgccgcccagcgaacgcatggcgtcgcaggtgggccagaaggccgctccggtgttctcggcggcgccccgctggtagccgagcatgtggggaatggcgtccatcggttcgaaaccggcgtcggtcttcaccgaacggtcgctgacgcccagcaccagcacggcggcggtcgggaagcactggcggacgtaagccaccatcttctcgatctggccggcgtagttggtgtagttgctcacgcccgtctgcatgatgttgagtccgtattgcaggatcacgaggtcgtaccccagcagggcgttcatctgcgcattgaccgacggattggtccagaacatcgcctgcccgttgttgctgcgcaccgagtagttgtccaccactacgccgtcggcttcgaataccgcgccgtagccgatgaatccctcgttgccggagagcaccttgaacgagagcgagcggacgtggggagccgtgacggcgatctggcgtatgttcggggcgccttcgaccgtgaattcacggcgcagcgagtcgttgagcgtcagctccacgcggctttcgccggggctgatgaagaagacccgcgccgcggtgcaggtgtcgagccgcttgcggtagtcggtattttcccagcgggtcgaagcgccggccgcaggctggcagacccagcccgaaacgtaaaagttctcgcgcaggttctgcggcgcggccttgcgctgcatgatgttgtaggaggtccagcctttcgactgggttttgatcgtgcggcggaacgccgtcaggggcgaggccatcggcgcgaagcctgcgcctccgccgccgtaagcctgctggagcctttcgcgcaggtcggccgtgaggatgtcgccttcgatgaacgagtcgcccagcacggcgatgcgcaccggacgccgggcgcagagcagcgtgtcgtagaaggcccgcagacggctcgaatcgggcgtgccgaaatcctcgatctccaccagcgtcgggttcagccgggtgctgtcgggaacgaccggcatgcgccggacgctgtccggggcgagcgtccattcgaaggtgatctgtacggggcgcggcgcggaatcggcttcgatccgctcggcttcgatccgttcggcgacctgctccatatcgacgtggaaatcctcttcgtcgaagagcgcaggctcctcggccgcggcgaccgcgtcgtcgaacgccacgaggtccgagaggatattggcccggcggagttttacgccgcccagactctgaggggggatgaaactgacggccgtcagcactgcgatcagcgccagcgccgcgatccatccccggtggatgcagtctttttcgggggtgttcatccgggaatcagtcgcgccgtccgaggattacgaagacccagtagagaaccgatgcgacggcgctcagtgcggctacgagataggtgcgtgcggcccagcccagcgcctctttcgcctgagcgagctgcgctccctgcatcgtgcggctgacctgcagccactccagcgcgcgggccgaggcgttgtactccacgggcagcgtgaccagcgagaagatcgccgacatggcgatcatgcccacgccgatccagcacagcagggcgttctgcgtggtggtcatgagcaccagtccgaggatgatgacccatgtggcggccgtcgaggagaactgcacgacgggcaccagctgcgagcggagcgtcagcggcgcgtagccttgtgcgtgctgcacggcgtgcccgcactcgtgggcggcgacggcggccgcggcgacgctggtcgaagagtagacgctgtcgctcaggttgacggtcatcgtctgcgggttgaagtggtcggtcaggtggccgctgacatgcgtcaccttgacgttgtggatgtggttgtcgcgcaacatcttttcggccacctcggcgcccgtcagcccgccggggaactggactttggagtatttgcggaacaccgactgcaggcgcgcctgcacggcgtaaccggcgatgccgatcacgatgatcagtatgtacattccgatcatggctgcggagtagtggattccctgagaacccgaatccgcgtaatatcccgactgaagcagggtcaaaagcatgtgtgtcatagtctaacggttttttctgtatgtgtagtaagcgcccgcctgctgggagggcatcagtaccatttcattaacgttcatatgggccggtaattgtgcggcccacgcgatcgcttcggcgatgtcgtcgcccgtaagcggggtgacgccgtcgtaaacccggtcggcgcgctccttgtcgccgtggaagcgcacctcggaaaattcggtctcgaccatgccggggcggatctccgtcaccttgattccgcttgacagcaggtcggcgcgcatggactgcgaaatggcgtgcacggcgtgtttcgaggcgcagtagaccgcgccgttttcgtaggcttcggtgccggcgatcgagccgatgttgaacacgtggccgccgcccgcggcgaccattttgggcgtgacgacccgcgtgacgtagagcagtcccttgacgttggtgtcgatcatggcgtcccagtcggctgtgtcgccttggtcgatgtgttccagcccggccgccagtccggcgttgttgatgagcaggtctacccgttcgagggggcttaggaatttgcggacctccgcttcgctgcgcacgtcgaagacgagcgcggtgcagcggccgcccgccgcttcgatttcgcggcggagcgtttcgagccgttcggcgcggcgtcccgtcgccgttatgtcgtatccttcggccgcgagccggagcgccgtggcgcgtccgatgcccgatgtggctcccgtgatcagtgcctgttttttcataaagtgggtttatgatgggcaaaaatacgaaattattgtgttactttgcataaattttccagcaaattaagcagccgtgaatctcgcctttttcatcgcccgccggacagcgcagcgcaccccggagaacaaacccggtgtgatggagcgtatcgccgtgatttccgtggcgttgagcgtcgcggtgatgctgctggcgatggccgtgatcatgggtttcaagcaggaggtgtcccgcaaggtggccgccttttcgggccatgccgtggtgaacggcgtgcggggcgtggggacgctcgattcggaccccgtgcgccgcagtgcccgcgccgaggagctgatccgcaccaccgaaggattcgtgtcgctggccccctatgccgtcaagggcggtatcgtacgcacggcggatgccgtgcagggggtgatgctcaagggcgtggacggggattacgactggtcgtcgttcggccagtggctggtggagggcgagctgccccgtgtgggcgattcggtgcgtacgaaagatatactgctgtcgcgcggcatggccgaaaaactgatgctcggcgtgggcgacaaggtcgaaatgctcttcgtcgagaccggagacaggccccggcgcgaccgtttcaaggtggcgggaatctactcgtcgggaatggacgaaatggacgacgcggtgatcatgaccgacctgcgcaacgtgcagcggctggcggactgggcggacggcgagatatcgggctacgagattttcacctcggacttggccggagccgacgatttcgcccgcaggctcggacgggccctgctctacgacgatgccgacgacacggcgaacctcgccgtgagcagcgtgacggagctttatcccaatattttcgactggctgaaggcccatgacgtgaatgccgcggtgattatcggcatcatgctcgtggtggcgtttttcaacatgacttcggcgctgctgatcctcgtgctggaacgtacgcggatgatcggcctgctgaaggcgttcggcatgcgcaacgctacgctgcgggaggtgtttctctggcgggcggcgttcgtcacgctgcgcggactggcgtggggcaacgccgcggggctggccgtgtgtctcgtgcagaaatatttccatgtcgtgaaactcagctccgagggctacctgctctccgaagtgcccgtcgcgctggggtggggctggtggctggcgctcaacgccggcgtcgtggcggcgatcgtcgcgctgctcgtggtgccggcctgcatagtatctaccgtaaaacccgacgaatcgatccgatacgaatgaaaccgtacaataccgaacagaccaagaaagaggaggtccgcgagatgttcgacaacatcgcgccgaagtacgacctgctgaaccatacgctctcgatgagcatcgaccgcatctggcgccgccgcgtggtgcgcatcgtgcgccgctgccgtccgcaccggatactcgacgtggcgaccggcacgggcgatctggcgatcgagatggcgcgccgcatccgcggcgtgcaggtgctgggcgtggacctttcggaggggatgctcgacgtggcgcgccgcaaggtgacggcgcgggggcttgacgggcgcgtcgtgctcgacgcgggggacgccgaacacctgcatgtggccgacgcatcggtggatgtggcgacggtggctttcggcgtgcgcaacttcggggatctggatgcggggctgcgcgaaatggcccgcacgataaagccgggcggcaaggtcgttgtactggagttctcgcggccccgcaaccggctgttcagggcgttgtacgaattctatacctataagatactgccccgcatcggcggcatggtgtcgaaggacaagcgggcttacgaatacctcccggcgtcggtcggggagtttccggcgccgaaggagttcatggcgatgatggagcgcgcggggttcagggagtgccgcgcccggagccagagtttcgggatcgcgcagatttacaccggacaaaagtgacgatgaacgcaaaacgcatacgaccgggcagtgcgccctcggataactgcttctgccgccggattcgctcttcggaagaggacgcgtcggcgggaaggggcggctgccgtcccgctgcggcgggcggggacgggccggggaataggctttgcttccggtccgttgccgcggatggcgtttcgggcggcgccgggcgcggcggcagggctttggggcgcatgctgttctgcatactgctgctgtgggtcgtattgccgttgggctcctgtcgccggatggccgagaaggcgcagcgaaacatccggctcgaagcggtcgagaaggcccggcggcaggggttgtcgggggccgagatcgtattgcgcgtaaagaacggcacggggcacaagttgaaactggagaaggcgtcgctcaccgtttactatgcgggaggagtcgtgacgaaggtcgctctgcgcgagccggccgaggcgccccgtcgtgcgacggcgagcgtcacgacgttgtggcggatccggacttccgacccgatggcgctccatgtgatgaccaagaagatccgggaggacgatatttcgaagatcggcgtctcgttcgccatagaggggcgcggcggtcccgcgcgcgtaaaaatttcgcgggagatgatgccgttgtcggaatttttgaatatctttgggctgtcgttgaacgacgtgaaaaactatctggaagagtaatgcgcagatcgctgaccatcctgctgattctttttgccgccgcggcttacacgcccctgcgcgcgcagtcgttggatgcgttcaaggagcggctggccgctcccgtggcgtccgacgccgcattcggcacggcaaaggtcaccgttacggagtacggcgacgcggcgcgggccgtggacgaagcttcgcgggcgggcgcccgcctgcgtttccccggttaccgggtctgcatcttcttcgacaacgggcaggacgcccgtgccggggccatcgccgccaagcagcttttcgaagagaactatccgggaatcaaggtttacatggtctatgagaatccctatttcaaggtcgcggtcggggactgcctcaccacggaagaggccatcattctcaagggcagggtgtcgtctgctttccccaaggctttcgtcaagaacgaaaccctctccattgccgaccttttgaactgaaaaacttcccttttcgaaagttttttagttttttatttgcatttatcctgctaatatctaactttgcggcgttacagaaaaactaataattaaacatttgacgttatgaaaaagattttctcttttgtcgtcgttatggctgccgtcgcaatggtaagctgctgcggtaattcgaacaaaaaggctgccgaaggcgaagctgccgccgctgccgctacgaccgaagccgctgcctgcacggagtgcaccgagaagtgcgactcgacggaggcttgctgcgccgagaagtgcgattcgaccaaagactgcgccgagaaagccgagggcgagtgctgcaacaaatagttcttgtcaggcatgagagtgaaggagattcgaaagaatcccctttttttgtgtccgtatttccggtcgcgggggcggtgcggcgcgtctgtccgggcattgctgttttctgaaagccatggtccgagggccgaaagtcatggggcatgagctgagagtcgtgagtcgtgagccgtgagccgggatgccggagccgttgaaccggtgggcggcgtctgcggggctttgccgcggcggggccgtgcggagttctccggcgcggaatgtgcggggtatagctgaaaaaatatatctttgcgaaaactcttgataccatgaaagtactgctgataaacggaagcccccatcgcgagggaaacacttttatagccctttccgaggtcgcgcggaccttggagtcggagggcgtgcaggccgagatcgtccatatcgggaccaaggccgtgcagggatgtatcgcctgcggaaaatgcgccgagctggggcattgcgtcttttcggacgcgctctatacgacggtgcgggagaaactcgccgatgccgacggaatcgtcgtcggttcgccggtctactatgccggtcccaacgggtcgctctgcgccctgctcgaccgtgtgttctattcctgcgggaagtatctcgcctacaagcccggcgcagcggtcgccgtatgccgccggggcggggcgagcgcgacgttcgaccggctgaacaaatactttacgattatgaacatgccggtcgttccgtcgcagtattggaacagcgttcacggacgtctgccgggcgaggcccgcgaagacgccgaggggctgcagacgatgcgcgtgctggcccgcaacatggcccgcctgctgaaggcgggcgtcggtccggtgctggcgcccgaagccgaggagcggcagtggacgcattttatccggtagcggagcgcggccggacgcggagcgccggattgagtgcgtcgcggatgtgtacgaagggagcttggctccctttttttgtcgcacggacttcgtccggggtgcttccgctctattgtccacgcatacagcggggtgcggaaaagcccgaaaaaatatcggccggaggggctggttttatggaaaaaaacgataacttgccgccatgaaagagaccgtgctcgaaaaactcaaggtgctggccgaatcggccaaatacgacgtctcgtgcgcgtcgagcggcgttacgcgccggcatcgcgcgggcggtgtcggcagcacggcggggtggggcatatgccactctttcacggccgacggccgctgcgtctcgctgctgaaaatcatgctcaccaatgtctgcatttacgactgcgcctactgcatcaaccggcgcagcaacgacatccggcgggccgccttcacgccggacgagctgaccgagctgaccatcgagttctaccggcgcaactacatcgaaggactctttctctcgtcgggcgtcgtccgcaaccccgactataccatggaaaggatggtccgcgtggcgcgcgacttgcggacggtgcaccgtttcaacggctacatccacctgaaaagtattcccggcgccagtcccgaactggtggccgaggcggggcgttacgccgaccgcatgagcgtcaatatcgaaatcccgaccgaacgcaacctgttgctgctggctcccgacaagaactatgaaagcatctaccgcccgatgagttacatccagcagggggtgctgcagagcgccgaggagcgcggccgtttccgccatgcgccccgtttcgctcctgcggggcagagcacgcagatgatcgtcggggccaccgacgagagcgaccgcgacattctgctgctttcgtcgtcgctttacgaccgtcccacgatgaagcgcgtctactattcgggttttattccggtgaatccctacgacaagcggctgcctgcgctggacaaagccccgctcgtgcgcgagaaccggctttatcaggccgattggctgatgcggttctacggattccgtgccgaggagatcgccgacgagcagacgccccggctcgatctggatatcgaccccaaactggcgtgggcgctgcggcatcccgaattttttccggtcgatgtgaaccgcgcggactacgaggcgctgttgcgcgtaccgggcgtcggggtcaagtcggcgcggctgatcgtcagctcgcgccgttaccgcacgctgaccatgcagtcgctgcggcagatcggcgtggtgatgaagaaggcgcagtatttcgtccgctgccgcgagctgaccacggggcagggggtgaacgaactgcggccggagcaggtgcgccgcctgctgactgcgcctaaacggcagaaaccggataaaaacgaaggtcagctgacccttttctgaatgcgatgttggtttttcgttacgataaatctttcgacgggctgctctcggcgctgttcgacgcctatgtgatgcgggcgttcccggagcagctgatcggtcccggagagccggaaccgctttttacggagcgcgtgcacgaggtcgcgaccgatccggcgcacgccgcccgtgtctggcgcggactggaacgcaggcttgtcgtccgggcgcgttcgatgctcgtctacgcatggcacggggagcaggagcggagcgatctgctgatgctgcgctgcatgcgccgggttttcgacgagggcggaggcgtgctggccgatcaggccgatcccgacatgaaggcgctgcaccggctggcgctcaaagtttcgcacgagtgcgagcggctcaggcagttcgtccggcttcagaaggctgccgacggcacctattttgccgcagccactcccgaacacgacgccctgccgctgtcgctggattactttacggaccgtttcgccgaccagcggtggcttatctacgaccggcggcgcgattacggatattattacgacgggcggacggcgcgccgggtgacgctcgaagacgaccgcggcatgatcgccgacaagctcgccgaccgttggctggccgaggacgaacggcagtttcagctgctctggaagaattatttccgggcgctggcgattccccagcggatcaacgagcgtcagcagcggcgcatgatgccccgccgttactggaagcatctgaccgaaatggagtgaacgggaggtgttggcgccggaaatgaaaaagtccgcagattatttctgcggacttcggttttgcggggcttgcgtgtttcacgcctctggcggagaggaggggattcgaacccctgaaaccctttaggggtttactcgctttccaggcgggccagttcaaccactcctgcacctctccttgcggttcgcaaaggtaataattattttcagaatttaccaatgatcggcgattttccgctgccgaaaagataaattcggcccctccggcggcccggccgttttgccgggcgccgatccgcagccgttttcggaggggaatcctccccgtcgccgatttagaacggatagccgatggccagatggaaaccgagtccgtccttgaagctggagatgttgtaatagcccgttttgtccggattcggatagggcgtgtgcaggccgattccgagatcggcgcggatgaccagatagctgatgtcgtaacgcagtccgaagcccgttcccagagcgatttcgttgagcagccctttccatttgagttcggcgccgggacgcttggggtcctttttcaacagccagatgttgcccgcgtcgaggaaaacagccccgttcagccgtcccatgatgccgaagcggtattcgacgttggcctccagcttgaagtcgccggtctggtccagatagccgttgcggtcgtctgcgggtgggcggtagctgcccggacccagcgaccggatcgtgaaggcccggatgctgttggctccgccgatgtagaactgttcgctgtagggcatcacttcggagttgccgtaggcgtatcccactccgacgagaaaacgggtggccagccagttgttgcggcgtccgatgcggtggtagaacttcacttcgctcacctccttgacgaactgcgagaagcggttgccgaacaaatgctgcggctgtttgctgccgaacaggctcaggacgcccgaaaggatgttgccggccgaggtgacgctgttctgccagtagaaacggcggttgccggtgcggccgtaggttttgtcgaaggtgtaggtgtagttgatcgacggaacgaactggttgcggaaactcatggcgatcgccggattctcgtccatcgtcttgtcgaaagcttcggtcgtgtgcagcagtttgttgtaggtcagcttgaatacggtcagcgaatggcggctgtagggcgaagtctggaaattgtagcccgccgagccgctgaaggcgatcagccggaagaagctggggcggttcatcaggtccacgcccagctggaacgtcgtgcttccggggtatttcagcctgcgcgttgcgaacgacggcagcagcagccgcggaatgttgaggttggcgttcagtcccagttcgtaggagttgagccgcgacgaacggcccccggagttcttgttgcccgtctgccattcgtacgagccgttcagcttcacggcgagcacctcgccgccccggaagaggttgttgttgctgaccttgaaggtgatgcccggaccgatgaagctgttcgacttggaggttacgtcggtctccagcgccgcttccagcggatagtcgaactgggcgtcgatgaccacgtccagcgtgtcggcgccccgcagcgagtcgagcggcgtgacgcccagattgaccgagcggaaaatgcccagtttgttgagggcggtctgcgtgcggttctgagcgtccacggtgaagagctggccgggttcgagcgagagcgtccgggagagtatcttcgggcgtattttcatcggcctttgggcgatgacccgcacgtcccgcaggcggaacgtatcggccggaccgggtttgatgttggtgaggcggaccgtgatgtcgcccacgcggtagggtttgagggccacctccgggacgttcggtttgaggttcagccgcaggtcgacccgtcgccgttcgacggtcgtgtcggcgaggtattccatgtattcgggccggaaataataatagcccctgttgcgcagcagctgcgatatgcgcttgcgttcgagcgtcagcgagtccatgttgtactgcgccccgacccgcagcagggaggtcgcctgcatgctgtcgatcaggggctgcaggccgcccccggcctgcgggtaggagatgttcgagtaataccacggcggcgcgatgcggagcgtataatagaccttggcctttctgccgtgcttgcggtagagcagggagtcttcggcttgggagccgaaataaccgtagttttcgagcacctgctcggcgactttggtccgcagtccgggctgtaccttggagatcagcacgggctgtttggccagccgtttgtagagccagtatttgaatcccttctccttcggcgtgtagaggtagttgtaggcccaaaggccgatcggcagcggcgtgcggagataggggctgtaaagcgggttgttcggggccacggagagcggctccttcacggccgattcggccgctgcggagagcacgacgcccgaatcgggttcgatccggatcttcctaactcccgtgtacaggacttcgtccgttcccagacgccgggtcgtggaacaggccgccgcgagcagtgcggcgcagaggagtatgcagctatttctgacgcgcatcggactcgtttcgtttttgtttttccttttccgctttgggacgcatcggtttgaacaggtcgcccagccggagcagtttcttccggatgacgaagcccacgcccgtctcggtgatctcgccttcgaggatgctttcgtagccggtgtggcggaagaccttcagatacatgttgtcgcgtttggtcagcatgtattcgagcgaaatgtcgtcgatcaggttctccttcaggttctgtgacgggtcggcgtcggtgctgaacttgcccccgatgacggcgcgcacgcggttgctgaagagacttttggacagccggtacgaataatcggtccgctggccgttcgggtcgtcctcgccgtaggagtcgatgccgaagctgaggtccacgcccttcaggttgttctgcgcccactggttcagctctttctgtatgaacgagttgagcgggttctcggtgctgaccttggcggtcgttcccggaccggtgtaggtgttgtagatgagcaggttcatcgcctgattggcccgctgttcggccgtcagcgaattgagctggttctgcatcgtgaggtcttcgggggcggacagtccgaagctgacttcgaggtcgttcagcgtattgcggatattgatggagatgttgaaattcaccgagcgcgaatcctgcccgtccgcggagacgctggcccggacggtttcgaccgccgtaatgttgaaggccgggtcggcgacgtttccgacccagtctacatagctgtccggcgtgatcttgaatatcttctgggagatcacgggcggattgtagcgcaccgtcccgcccgaaaggatgtatttgcctgacaggctgacgtctcccagcggattcatcgtgaaggtcaggttgccgccgccctgcaggtctatccggttgctgccgtcggcggagaggtccacggcggcttggacgtcgtcgttgatgtcgacgttcaggaggatgtccatgccgccgatccgcaccgtcggggtggcctcggcgaagctttggttgtccatgtcgcggaacgaaatgaaggtcacgatgttctgcggacgctccttcacgtccatcggcgaatcctgcatgacatagttgatgtcggtgtttttgagcagtgcgacgctgccgcggacgacgagttcgtccagagggcctttggccgtcgcgtccagatcgagataggctttcccgtagacggccgttccctccttccgggccacgttcacgaactggaaatccgacgcccgcagcgcgatgtcggccgttatgcggccgaagtcggtcagatcgacgtagcctccgatcgtcagcgggcttttgttgggggcggtgaccgcaaagtcgtcgaacaggacccggctgtcgtcgatgcggatcgtgtcggaagagagacggaacgaagtgccgatcatcggcacgcggacctccgtctgtgcgaactgcaggccgccgttcagctgcagccgttgcggcgttccgcccgcgtggagcttcccggagagtatgccggagagacggagcatgtcggcgggcagaaagacgtcggcccgctgcagggggaatccggggatcgacgccgtgaggtcgagcgggctttcccgctctttgcaatagttgccccgcgcggtcaggacgtcggcgccgtccagcgtgagccgtacgtcggcctgctgttcccgcccttgtgcatagcgtacgcccagcccgacgtccccgaagcgctgcttgtcgtacgagagtccggcgacggagacgtcgccccggacggccagcgagtcggcgcccgtgttcagggtcacggcggcgcccagcacgccgccgacgggcggggcggaggggagcatcgccagcgccccgccgatgttcagccctgcgatgtcgagccggatgccgcggagcgagtcggtttccggaacggtatggatcgcaaaccgctggtcgccgtgagtcatgtcgaggtcggcgctcaggtttccgtcgaaccggtagacgaggtaattgccgggattcaccgtccacggctcggagccgaataccggggcgaggggcgttacggatgcacggatcagactgtcgttccacgctgcgtccaccccgaagcggaatccttcccggcctgcgcggttcttttggtagaaattcaccgctcccgtgttccgtacgacgtggccgtacactcccgcgagggctatgttatccagatttccgggggcgttcgccacgcggagggcatattccagccggctcccgttctgcaccgcggatgccgtcagggtgtcgagaacgatgctgccgtaagccagtttttccacgcgcatccggagcgatacgggcagggagtcgcagttcgtgccggcgatgtcgaggttgctgaaagcgattcttttggttctcaggaaactgctgaggatgttgtcgcgtcctgccgagacccgcagtccgaaatcgggcaggaccgttttgagcgaatccatatcgacgtgctgcgagcggatctgctgcgccagcaccccggcgctccgggacgcggcggcggtcagcgaatcgagcggttcgggggcagcgaacgagagcgtcagatcgccggaggtcagtccggcgcgggtggctgcggtgtcggtgccgaacgtgacgttcgtccggcggatgcggtccgtgcggtttttgctgcggattacgatgctgtccagtgtgagacgtgcggccatgccgccggcatccgaagcggaagcgtcggcgtcgagcgcgaatgatccgccgatctgctccggagtgattcccatgtcggccagatcgaagtcgaagacattgcccgacacgccgatccgctgttcccgctccgtcagcgttcccgaaacggacagcagcagacggagcgcttcgtcgcggtcgtaaaggcggccggagaggtgctggttttcgaggtccgcatccagctctattccgccgaaatcatggctccggtactccgcgcggccgatctgcatccggacgcttccccgtgtctgcggcagcaacggatcgaatccggcgccctcggccgtcagcgtgaaatccagtgcgcccagcgagtcggccggaaggaaacggttcagcggaaggctgtcacaccggacttccgcatcgtatatctgtttttcagggtcgatccggccgttcagcgtcagttggccgccgtcggcggtcagcgtcgaagcgagcgagtaaagtccccggtccgcgtccgccgctccgcggagcgtgagccgttcgggaatcgtcacgcgccgccgcagggccgtgtcgggcagcagctccagcagaaaagccatgtcgcggaactccccttcgaaacgggccgcggcttccagccgcttcggggcgagcaggtttttcgcggtgccgttcaccgcaaggtcgatatgtccgggcgacgagatgtccagccccgcctttttgatgtcgcccagcgttcccgccgccgaaagcttgatccggacgatccggtcgttcagtgcggcgggaatcaattgcggatagagcagttttatctcctctgtattcaggctcgccgagaggtcggcggtcagcggggtgtcgggcgccattcgcatgattccggctccggcgtgcgcctcggcccggatgccggaaagcggcgtcgcaagctcgaacccggagagcgaaatgccggtggagtccattgcgaacgccccggcggcattccgtacggacaacccgctgcgctcggtgaacgccagccggcggatccgaagggcgatgtcggcgccccggttgtagatcgaatcgaccgacaggtcgagcggcgagaggacgatgaacgccggatcgaatcccgccgcggggcggtggtgcagcgttccgtattcgagactgttgtcgttcagcgcgatgctgccgacccggacggtccacggcagggcgggagcttcgccgtcgtcggccgttgcgtcgtggggtgatgatgcgttgtcggcggccgctgttttatcggggtgcgccgctttgccctgagtcgctgttttgtcggagggcgccgctttgctccggaccgtcgttttgttcgaggccgttctcttgtccggaacagccgtcttgtccggagccttttctccggcgtccgccggggccgtcaggtaggcgtatccgccccggttcagcaggatgcttttcacggatacctgccggctgtccagcagaacccggcagctgtccacctccccgtccggcaggcggacggagaggtcggttaccgcgggggcggtccgcatcccgaaggcgaggtttgcgaccgtcagttttccgacgtcgatctgccacggcagggttgcggcgctgtccgccttttcggcgggagcgctctcctccgtgttcagaaatacatccccgtccgtcagcgcgatgcgggaaatgccgaccgttttggccggcaggccgacccggcagtcgttcacggcgaactgtccggcggcgaccttcaggtccatgcctgccgtggaatctctgtaatgcgccgcgagttttgccagttcgagactccgcacggcgacctctttgcggagcaggggccacacggcgacctccagcgaaaggtgtccgcaggagaggagcgtgtcgcccttgtcggtcagcagcgtattgtccacggacagccgcagcgggaaggagagccgcagacgctccaccgacaggtccattccgagcgtccgggatgcgtagccgacagccttgccccggacgaaatcctgaacggccgggatgtagagcagggcggggaccagcatcaggacgaggaggatgacgagcagcgtccggaacgtatatttcagtatctttttcagcatttgcagagtgactgattccgtgtttgtcaggcggcgacgcgtctgcgtgcgattgtccgcccggtgcgcggggcctgcgaaatttcgcgcaaattactaaaaacccgatgatcgggcaagggcttcgctccccataaacggtctctttttaaacaattatcgtcttttcccttcccgtgttgccgccggtcgtgcgaaaagtcgtttaaacgttccgggcggattccccgaaatcgaaccgcagctgcacgcactcggcgcaggcttcgggcgaattgccgaccgtaaggccgatcaggcggatcttccgtccgcggaaatcgaccgccgccagcagctcctcggacacctgcctgagcgtttcggccgaattgacgggagcgaaaagcgtcttcgaccgggttatctggcggaagttgtcgaacttgagtttcagcacgacggtctttcccttgaattcgtgccgcatcaggcggttccagacctcttcgcgcacggccgacagctccagccgcagttgttcccggtcgtcggtatcttcggcgaaggtcgtctccgcgccgagcgatttgcggatgcggttcggtgtgacctcgcgttcgtcgatgccgcgggcatagccgtaatagctgtgtccggccttgccgaaatggcggaccagctccgcttcgtcccgcagcctgaggtcggcgcccgtatggattcccatgccgtgcatcttccgggccgtcacctccccgatgccgaagaaccgctcgatgggaagggccgcgacgaactcttcgatctgtccgggcgggatcgtgaacagtccgtcgggtttccggtagtccgaagcgatcttggccagcatcttgttgaccgatattccggccgatgcggtcagtccggtttcggcgaggatgcgggctttgatctcgcgggcggcgagggtcgccgagcgcaggtgcgtcacgtcgaggaacgcctcgtcgagcgaaagaggctcgacgagttcggtgtagtcgcggaagacggcgcggatctgccgcgacacctccttgtagacgtcgaaacgcgccggcacgaagatcaggttcggacagagccgtttcgccagcgcggaggatatcgccgaacgcaccccgtagggccgggcttcgtagctggccgtggcgacgacgccccgcgggccgtcatggccgacggcgatcggtcggccccggtattcggggtggtcccgctgttcgacggaggcgtagaacgcatccatgtcgatgtgtatgattttccgttgcgtcatggtggtgattcctgcaaagatagtgaataaatgccgctctttcgtccggtgattttgcgtatctttgtctccggattaattctgaagaaaatggcggacgactatttaggacggaaaatggaggagtatctggcccggacggcatcggggccgcgcaatcgcaggccgttggcgacgctgggcaggctgctgctcaaaaaccggagccatcgcggttacgacgcgcggttcgtcgtgcgcggggatcagctccggcgcattatcggcgtgaatgccaaaatcccctcggcgcggaatcaacaggtgctgcgcttccggcccgtactggcggacgaggctcccaaagtattgccccatatccggctgggaggggctttgcccgaacttcatctgcccctgccggggaccgagccgaacgctttcatcatcatctgctcgacggtcgccgaggaccgctatgtcgatatcgatctgggcatttctgcccagagcatgctgttgcaggcggtcgaaatcgggttgaacggcatctgcatcggagcgttcgacaaggagcagatcaggcgggagttcggactggatgcggagccgctgctgattctcgccctcggcaagggcatcgagaagatcgagctgacggagatcggctccggcggcgaccgcgcctattaccggaaaaacgggacgcactatgttcccaaagtccgtctggaggatttgctgatcgggtgatgcgccctcttccgtgtcgggcggatggccgtgcggcaggttaaagccccgtgccgttggccgcgaggatgccggcgttgagataggtggcgaagagtatccagcagaggtacggaacgaagagccacgccgctccggcccggattttcccgctctgcgcaatgtaggcggcgacgagaatgtcgagcagcgcgatgtcgatcattcccagcagggggcttcggcatacgaagaagaggatgctccacagcacgttgaatcccagctgtgcgaaccatagcgtcataactctccggcgcaggggcgaggcggaggtcagaaccagtccggcggagaggcccatgcagaggtagatgatgctccatgcgatgggaaatgccgcattgggcggcgtcagtgcaggttttaccagatgcggataccattcgcggatcgcgtcgttctgccaccatccgaccagccctcccaatacgaagcagagcagtgtgggaagaatataagcccaagcctttttcatcgttcagccgtttctgatcgtgtgtgcaaaatcggtgcccgccctgttgccggacgatccggcggcgtgaatcccctgcaggtctgccggacggtcggtggataaaagacgggactgcctgaacccggtcagacagtcccttgcgacactctatcgaaagacgaactgcgtcgttagcagttgccctgcgattttttggtgtactggttgtgtccttcgggattgttgctgcgcgatacgcggcccgtggcggacgactggcttttggcggttccccggctcgtcgagctggcgtgcgaggtggtcgtgcgggacgacttggtcgccgatttgttttgtccggtctgcgtgcggccggcggtcttgttggttgactctttcatgactgataaagaatttagtttgacattgtgctgtcgttcgtaccgaaaaaacctttcggccgaaagcaagtttgtaacgccgcactgttgacgcaatatgcggcgttgctcggaaagaatacaaaacgtataccattccggcccggcaggccgctctttcggctgtttcggctgtccgggacgtgttatttcttgacccagacggccagttttcctccgtgtaccctgaagagggccttgccgtcgtctccgatgactatttcgtcgtcgtagcttcccgtgatctcgtgccacgtctcattggcatgcgttacgcctacggacatcaccttttcgccgtcttcgccgttggagagcagcagcgcaagtcccgaatccggatgcttctcgtcgcctgcgcgggtgaaccccacggtgttgggatggtcgaagtagtcggtctgttcgccgaaagcccgcgagcggcgtgcgtcgagcagtatgtcgagaatggcccggtggggcgacgcttcgcccttcatgctgtaatagtcgccgtagaagatgcaggggtacccctccttcatcagcaggatcaggccgtacgccagcggcttgaaccacgacttgacctgcgattcgagcgaactgccgcgctgcgagtcgtggttgtccacgaacgtcacggcgagcgtgggatatttccgcacgagggtgtcgtcgagcagcgtccgcaggtcgaaatcgcgtccctgctgcgaagcggtgaagagtttgaagtgaagcggcgcatcgaacaggtcgatctggtggtccacggcgtcgaggtaggcttccagcgactcgaaatcgccgctccagtattcgccgacggcgtagaactccttgccgcgcgaagcccggacgctgtgcatgaattcgccgataaaggtgttgcggatgtgtttgagcgcatcgagacgcatgccgtcggcatcgagcgttcgggcgatccatgcgccccagcgtttcatctcctcgatcacttcgggatggtcgaaatccacgtcgttgaagatcaggaagtcgtagttcccgttctcgccgtcgaccccttcgctccacttcttgccttcgccttggatgaggtagatggcccgcttgccggtctcgtatacctgatcggttccggagaagtggtaccagtgccatttgaagggggagtacttgtcgccgcgccccggaaaggtgtatccggtccagccttcgacttcgacgggggcgccgatcacctgctcgcggttttcgggatcgacttcgcaggccatgaatttttcggtgtagtcggcgccggttttctggttcatcaccgtgtcgatatagaccgaaatcccgttggcgtgtagcgccgcgatcgcctcctccagctcctgccgcgtgccgtacttggtgcggacggtgcctttctggtcgaactcgcccagatcgtagaggtcgtagacggcgtatccctcgtcctgctgttcgtcggccttgtaggccggcgggatccagaccgaggtgacgccgacgtcgtgcaggtgtcgggcgtcctctttcaactgcgtccacaatttaccgtcattgggcagattccattcgaaatactgcatcattactccgtttttcatagatatatgtgtttgatgtttgcggtgttttgctgcaaagcgcatgcaaaacaggaagaacgctccggctgaaattccggagcgttcacacccagcgggccgacgggatatttagtcctgttcgaccggctggcggcgggacgccttggtgtcttgcggatcgtactcgcaccaccggaggttcttctccggcgtcgccttgcggatttcgccgctgcgctccttgctgagtttcttgtccgcgctgcgcaccgaagcttcggtgcggggtgttccctgcggtttgagctgcgtgagtccgtcggtttcgagcacctgctcgcgcgggtcctcgacatagagccactcttcgcccagtccggtgctttcgccttcgttccacgggccgcgggcatcctctcccgtcgaatgattggagtagatgttgctgtagcggggatcgctctggagcactcccggcgggaagttgggctggatggtccccagcgccgcctcgaactgctggaagtgcgccacttcgcgtgtcatcaggaagttgagcgtggccagcacgtccttgtcgtcggtgaactgcatcaggtattcgtagacgatcttggcgcgcgattcggcagctatgtccgaacgcaggtcgaccgtcaagtcgctgttggcattgacgtaggagccttgccaaggcacgccgttgctgtcggtgagacgcggaccgccgcccgtcagtacgccgaactgcggattgatcgaaaaggccgaatggatgaaatcgtccttcgaaatgctttcgccgaagacgtcgttgcgctcggccgcatccttcaggttgccgttgacgccggcgagcagcatctggatcgtggcgccgacgatttcgaggtggcccagctcctcggtggcgatatccatcagcatgtcgtatttgtccggataggggttgtggcaggcgaacgcctgcacgaaatactgcatcgcggctttcagctcgccgttgccgccgccgaattgttcgagcagcagccgcgcgaagcggggatcgggtctcgatacccgcgctttgaactggagttctttggaatggtaaaacatatattcgctgtattaagttgaacatgccggaagccggcctgactatcgtttctgcttgagactctcctcgttcatgcggcttccgatgctctgttcccggtcggagcccttctcctcccagtacgagcctttcttcgagccgtattgctccttgttgtccggctgctgccggtagctgctgccttcggtgccgcctgcgtgcatgccgctgttgtcgcggttgtggctccggctgtcgaggtcgttcgtattgccgttttgcatcggggcgctctgcgtatcgttttgctgttcacggctttctccgtgcatctggtttgtcttgtccataatcgtggtttttaaatgattcggtttaatttgtccgtccccgattcggggtggtcgtgaccttcggtcttgacgatcttgttgtaaagtcccatgatcaacagcggggcggcccactggccgacgagcagcgctgcggatttacggccgcggaacatcatgcaggccgagaccgccaatgcgcccagaccggcgctcaggtagaccatcgagggaattttggaggtctttttttctacggcaacggtaaccttgccttcttgtgatttgtcgtttgtcatgattgtacgggtttaaaaaccggagcagtttcctgctccggacgcaattaacacacacacgacgatccttagtagatcgttatcttgacgattccgtcgacggcgggaaccgggtaggtgtcgccgactgcgctgatggccttgtcttcgggcatcagcgttccgccgaagatggactgggcattgccggcaccggggtactggcttacggccgtaccgtcgtcgagcagaacggtcttgctcgttacgtcgcctttggtcagggcgttgagttcgggaccgttggcgaagaaccagtcgttcgaatagccgaacatcgttgcgaacgctaccttttcgttggccgcggcctcataggtgcattccatgctctcgccgggcagggcggtgcgcgtaatggtgtagatcttgcgtacctgcgggaccttttcgagcgaagctttcagctgtcccggatcgccgcgctgtgcaagagccgccagaccgagctgggcgtctttctgtcccagctgatagatcgggttggtgttgcccgtgtagaccactacgatggcgccgtgcagcgtggtgatgatacccgtctggtcggctacgagcgacttcaggggatcgacgttgcccgcttcggccagcttggtcagctcgacgcccgatttctgatcgacgctgaagaacggcttctccgccaccagcttgccgtcgagcatgttcgatacgacgaatacgccgccggagagcggagtctcgttcgaggtgccgttcgagatgttggagatggtgcaggtgaacagcgactgtacggcgtcgtaagccagacttacctgaagcaggctcgaagccgccgggtaggtgtgaccctccgtgtccgtaccgttcacttcgctcactacgccggcctgagctacgcccggatggttgacgctggggccgggctgttcattgacgcgggttccgttgtcccagagtttcacggcattggctatgacgccggtataggggacgcccgaatcgttgaagagtgcgatacccggattctcaggggcgaagaacaggtcgttggagtaggaatacatggtggcgaacatcagccgctgccctttggccgcatggaatgtgaacgaggtcgtcgcaccgggagccacggcggcgaacgtgccgctctgaacgtaattcttcgtcgggattacgttttcgaacttgatcgtcggcttcgtgccgggggcgctgttgtcgtcatcgtcgtcacaggccgtaaaggcgaatcctgcgaaaagcaaagccgcagcgaatgcggtgaaaaagtacttttttttcatagttgatagaatgattaattaagttaatactcggttaaaccgttattgccatttatattaaggtatatgctcgtatttgttgtccggcacccttttcgatgcagttgcgtgcatcatttatgccatgaaaaacacttttggatggattggaaaaacgcgaggatggatcttgctgcaaaacacgcagtaacgggaggatggattttttcgggttttcggacgctggggtaaaagctttttcctgcggaggttcggacgctgttccggcagattttttgcggactccggaccgtaagcccgccgctccccggccggggaggcttcgggtgaaataaccacacaaacgggactgcgatgacaaaaaaccttttgaccctgcaacgggacgagactaccttgtgcgaagtttaccgccggctggccggactggaaaaggatccggtccgccgccggacgctgctgcgtatcatgcaggacgaaagacgccattgcgaggtcctcagaagccgtacgggccgtacggtggctcccgatcccaaacgggtttggtggtacgtgggaatggtcagggtgctgggccgtgctttcgtggtccggcagatggagcagtgtgaaaagggtacggaggcgagctattcgcgctatcccgaacgcgaagagttcgtgcggatagcttcggaggagcgacgtcacggggaggagctgacgacgctggccggcggaatgcgattgtgctacataagttcggtcgtgctggggttgaatgacgctttggttgagttcacgggcgcgctggccggattcacgctggcgctgaacgagccgcggctcgtggcgcttacgggcggcatcacgggcattgccgcggccctttcgatggcggcttccgagtaccttgcgaccaagtcggaaaagggccgggagaagcatccgctgcgggctgcggtctgcaccggggtcacctatctggtgacggtcgccatactgatacttccctatctgctcttttcgagtgcgcttgccgcgctgggagtcatgcttctggcggcccttaccgtgatcgcgctgttcaattactattacgccgtggtccggtgcgagagtttcagacggcgttttttcgaaatggccctgctgagttttggcatcgctggaatcagcttcctgatcggttatatcctcaaactgtttacgggtgcggacgtatgaggcggtcccgcagtccgttcgtgctgtccggcaggccggatccggacatgcggcggcttgggcgtcccctgaaaaaaactgattctcagtatgaaaaatatttttcggacaatttcaacctcaatggaataccatttgcaggtattccggtatcattcatcacttaaattctttatattatgaaaaaaattcttttactcgtcgcagctgcggtatttgcttttgccgtgaacgctgctccccagaaggtggatttcggtaaactgccgaagaattcgcaggaattcattcagaagaacttccccggcgaaaaggtgaaggccgtggagatggaccgcgaggcgtcgtgggacaagtacaccgtctacttcaacagcggcaaccaagtctccttcgagggcggcagcggcgattgctcgcagatcattatgaagaacggttcggttcccatgtcggtgattcccgccaagatcaagacctatgcgggcaacaactatgcggggcagcggatcgtcatgatggagacgaccgccgacggctacaaggtggccctcgcggacaagacggtactcgatttcgataaggacggcaactttacgaaagctacgaaatagtttttgccgtatgaaaagcgcagggggcgaccgtcgtcaggctccctgcgtttttatgtctcgaacgggccgtgcaggcccgaattgtaattctgtcatgccatgtgttatcatattttcctcgctgccgggcctgaggagcttgcccggcatttcggccggaaggccgatctgatccgtaatctccgtccgcccttgcgtgcctgcgcgttttcgcacctcccctatccggtcctgaccggggacgagcagatccggtattcccgctgggggctgattccctattggctgcgcagaccggaggatgtcgtgacggtccgcaaccagacggtcaacgcccgtgcggaaaccattttcgaaaacgcctcgttccgggttccgatccgccagagacggtgtctggttcccgtgagcggattctacgggtggcgccatgaacagcatcgtaagatccccttgtacgtgaccctgaaggagcgtcctctcttctcgttggccgggattttcgatcgctggtactgccgcgcgaccgctgcgtggacgacgacattctcgataattactaccgaagccaatccgttgatgcgctacgtcaacaacgccaacggccggatgcccgtcatccttcgttccgacgatgagagccgctggctcagtcccgcgctgtccgatgcgcagatcgccgcactgctcaagccttatccggagcaggagctgcacagcgaattcgtgcggtgcgacttcatgcacgaagtcgctgccgatccgggcatactcgtacccgcttagacgggcgcagcaaaaaagggaagtccgaagacttcccttttcttttgccgcggctgccgggtcatactttctccttgatccggttcgccgcctgcgtcgcagtctcttttaccttgtgcgcggctttggtcatgccctctttggtcgcgttcttgactttcgtgccggcctcttcgattttgccggccatcttgtgaacgcccgttcgggcttcgttcttcgcttcgatggccgcctcttcggcgtcatctttcagcttctgcatgttttcctgcaggttgtgtctggcctgctggccgtgttcttctaccttgtgaaccgctttttcggcgtgctcccggtaggtttcgttctctttagtcgaatacttttccataattacatcgttttagcgggtttgtgccgtgtgaacagcgatacgatccacagcaggacgatggcgccgatgatcgacgagaggaaagttccccatgtgcccgtcggaacccatccgaacaaagaaacgagccagccgcccagaatgccgccgatcagaccgacgatcagattgaccagcaatccggagccgctgcccttgaaaatcaggctggcgatccatccggccgccaagccgatgagtaaataccataagaaatacataatttttataattttggttgacaatcaggataatacaaaatttgtaccccggaggatgaacttccgggaaattattcgcagtatgcgatgagagccgaggagggggccatgcggacgacctctccggagagacgctcgcggctgtcgggatcgatccggccgtcgcggcagaccacgatccgctccgcttcgggaatccggaattcggccggatggcggttgccgttgtaggccaccagtatctctttccacgcatcgccgttggcgtgttcgcccaaagtataggcgatcacgcccgaatcgcccgtgtcgaggaaccggagccactgccgcagcccttcggccgtcgggatgcggaatgccggatgcgctttgcgcagggcgatcagttgccggacgtagtcgaacagcccgcggtgttcggctttcagcgcccagtcgatttggttgacggcatcgggcgagcggaagctgttcggttcgccctgcttgtcctgcatcatctcctcgccggcgcggatgaagggaacgccctgcgccgtgagcaggatggtgtgtatcagtttgtcgatcgggagcagctcctcttcggcacggtcgccagtgacggagagccgcagtttgtcgatgaccgtgtagccgtcgtggctggcggcgaagttgaccgcttgggacggggcggctgcgtagggcacggagctgtatagcagtccgttgtaatccacctgaggatgctgcgtggcgccgacgatcccgaatttcacgggttcgtagtgtccgccgatatttccggaagcgtatccgcaggcgtgttcgtcgaacgtgctgccccgcacggcgtcgcggaagtcgtcgcagaaaacggcgatgccctccatctgtccgacgtggtcccgcacggcccgtttttccggcggcaggggagagtcggccgcaagccacccctcgccgtagatgaagatggtcgggtcgattttcgacagctcctcccggatgcggttcatcgtctcgatgtcgtgtatgcccatcaggtcgaaccggaagccgtcgatatggtactccttcgcccagaatttgacggactcgacgatgtagtgccgcaccatcgcgcgctccgaagccgtttcgttgccgcagccggaggcgtcggaataggagccgtcggcgttgtggcggtaaaagtagccggggacggtaaggttgaaattcgaatgctccaccgaggccgtgtggttgtagaccacgtcgagaacgatgcgcatgccgttccggtgcaggctttgcaccatttgcttgaactcccggatgcgtgccgcggggtcggccggatcggtggagtaactgccttccggaacgttatagttcttcgggtcgtatccccagttgtaggtcttgtcgttcagtcgggcttcgtccacggtcgcgtaatcgaaggagggcaggatgtgtatgtgcgttacacccagctctttgaggtggtccagtcccgacgcctccccttggggtgtcttggtgccggtttcggtcagggcgaggaatttgcctttgttttcgatcccggaatcgggggcgacgctgaagtcgcggtggtgcagttcgtagagaatgatgtcggaatacattttcagttcgggcgcacggtccgcctcccagccttcgggatcggtctcgcgcaggtcgattacggccgcccggtcgccgtttacgccgaccgccttggcccagatgccgggcgtttcgtccagccatttcccctctttctcgatctggaaggtgtagaaagtccctttaagatcgcgctccgcggcgacgcgccatgttccgtcgtcggagggccgcatctccagccgctcctccggttccccgccttcgcccgaagcgtagaggttcagccggaccttgtcggctgtgggcgcccaaagcgtaaagacggaacgctgaggggtgtatgtcagttccagatcgctcccgtaatagacgggatatcggtcgaacgaatcgggctgtccggccgctggatggtttttctgagtcgtcatggaatgttttttaggagttctgaatttgcgtaccgtctgcggctgccggttcgccgccggctttttccgcgtcgtcctgatgcacgagcagcgtgcgtgtggggaaggcgaatgtgagtcccgctttggcgaaggagtcgaggatctccagattcacgtccgacgtcgttttcaggacgtcgccctgcttctcgatgtagtagtagaacgtgacgaccagcgccgagtctgtgtagtccgagaagtaggccgtgacgtccgacggatttccggaaacgtccttgatcttcgcagggatggcccgcagtatctccagcgcctgtttcatcttttcggctcccgtgtcgtaggtcagccccagcttcaccatggcccgccgcatcggctccgaggagatgttgacgatggaggcgtccgtgatcttgtagttcggatagctcgtgatgcgccggtcgtaacccagtatccgcgtgctgcgcatgcccacgtcgaccacggttccctccagcccgttcacgttgatcgtgtcgccgatgccgaaaggcttgtccgtaaagatggtgaatgcgccgaagatgttcttcaccgtgtcctgcgcggccagcgcgaaggcgatgccgccgatgcccagcgtgccccacagcgcattgatgtcgacacccacgttgctcagggccgttaccagaccgatgatccagatcaggaccagaatcgtccgcctgaccaccggcatcattttcaccgcatggccgtccgacctttgtccccagtactgctggagcagggtcgtggagagacgtgcgagaacccacgttatgtccagtatgatcagtatgcggtaggcgttgtcgacgtacttcaccaactggtcgggatagaccagccggtgaatggcgatccagatgcccagcagcatcacggcgaatttcaggggcgcttcgagggagtagtagatgatgtcgtccacccggttgttcgtgcgggcgataaacggctttatgaccttcctgcccagcagggagagcagttttacgacgacgaacgcccctattacgatgagtatggaaacgacccatgtctggaccgtatttccccaaatttcatattccaacatttttcgatcggttttaaattatctgttcaatttgttatctatgtctcctcttttgccatccggatttttacaatggcgcatgccgcgaggtttttttcttatccggagattcaatttttatgcctttggagacaaatttgcacgatttcgaaatgaaaatctggttgaggatgaggatgataattcataaatcgaggaagaaggcggtgtgtatcaccgtcgcagggctgcttgcgggcatcgccggcggacttgttctgtactatgtccgcgacgtcgttctggggtggtgtttcgtgataacggcgggcttcgccctgttgtacggcatagggtcgctgttcgaccgccggccctatatcgtcctgaccgaatacggcatcaccgaaccgttcgcgatccgcgagcagatcgagtgggatgccgtcctttacgcggacgacttctatttccggggccagtactgggtccggctgctgctcggccgcgactacaagccgcagctcataaggccggcttggttctggcggttcgaccgtctctacgagtcgaaaggcgtcaaggcggtttatatccgtacgatgggactggaggtcgattcgatgcggctggccgcactgatccgcaggatgaaagaggcggatatgtccgagaggatcggagtgctcagggaattccgttcggagtgacgcggaattcggtgtactgtttcagccggttttcaggtacaccgaataggccaccgccgacctgcgttacattgcttttcaatgcctgtggactaaatatacaaaaccctgcaaatgtgtgattgcagggtcttgctattttatttgttgtatttctgcggagagaaaggctctataacctataatatatttaaatgccttttgtgtcgtaatatattctgtattataggtatttgcatttgtataattaaagaaaatttatttgagtttatcttattttgccaaaaagtgtgcgtatatttgtgcgtaaataatattatgcactatgccggtaaatttttatttagataagcgaacagataaaattggggatgcccctattcgagtctccattatgattaatggagtcaggctactcacttctgtcgggtatagtatcaatccttcgaaatgggatggtttaaagcaaaaagtcaagcagggtgctattaatggtaagggtataacctacaacgttatcaattctcatttgaatgatataacacaacaatgtactcgttttgaaaataaatggttgcatgagaagatagaggtaaccatcgattctatcaaagaaaatgtatctgttcggaaaaatcctatagaaacacataagagtgcggagaaaactttttttgatgtatttgatgagtttgtacgagatgctggagcgcaaaatgattggactcagggaacttatgagaaatttgcgtccgtcagatcgcatttggaatgtttctcgcccatagtatcgtttgtcacttttgatgaaaagggattgtcggattatattgcttatcttcgtcaagaaaagcacttacgcaattcaacgatcggaaagcagttaggttttctaaaatggtttttgcgttgggcgacgaataagggatataatactaatacagcctttttatccttcagacctaaattgaaaaccgctgaaaatagagtcatatttttaacttgggaagagttgatgacagtttataattttccgattccagagagtaaaaagtatcttgaccgggtgcgggatgttttttgtttttgttgttttacatcattgcgttactctgatgtgagtaacctgaaacggtctgacattcgagatggttcaatttatattacaacggttaaaacatccgatagtttggtaatagagctcaataaatatagtcaggcaattttaaacaagtatgatggtgtcccttttgccgataatcgggcattaccaattatctcgaatcaaaaaatgaatgattatataaaagaagtagggcatttatgtggaattgaccagccacaagctgttacctattatactggaaatcaacgaatagatgaagtgtatcccaaatatgaactgatgggaacgcatactggacgtcgtacattcatctgtaatgctattatgatggggataccgcctcaggtcgtaatgaagtggaccgggcatagcgactataaagctatgaaaccgtatatagatattgcggatgctacaaaagcagaggctatgaaattgtttgatgaaaaataaacaactattagaatatgggtcacttggaactttcattgatggagatgctcgataatgcaacgggatggaaaacagattatgttttgtttccgatagatattcggagatatattgcagagcaattagaatatgcgacggctcaagatattaaagatatgatattttcgattggcgcatatttacaactgacttattcggaacatttgcgctatgagtataaacaaagtggcagagaaatgccttattttgttactccatccggggctaaattgactgatactagattgatgagagaaaatgagagccgaatacatgtttgtcagaatatcagatgtttggaagaaatgctagaaaagttgagccagcaacattctgaattgtgtaaaaatgaaatacctcagttgtcgctaaggttatcttcggagcaaatacaagtgcttttcgaacaacttaagaataatcggttgatagcctttgatactgatgaaaagagttttgaatgggcattcggcgggacgcattatccatctaaatacgagcctattgaatggacggcgagttcgaagcaagcttttcgagaattgttacgacaatttgtttctgtgactaataaaatggaacgagatgttgaggtattgtttaaatataaaaagcaaaaactaagattgaataaagcagattccaagccttccaaatacattcgagagatagaattaatcgcgaacaatgtaaagtctgtgatataaaattttccgaccagtttaatgttgggaagataacaattcatagcgcacttttggattttccgaccaaagccgaccgatttcaggtcggcttttttgattgattttgcgcttgttatgattttatatgaccttatatttgtaccagatagagcgatcaatgaacactgtctgaatccaaatttataatagatatgaatgtattacaaaagcccctatggcaaatgaatggagctgaatttttagaattacagcgaatggtagtgaaaccatctgaaacgcctaatgtaacgaattgtgaacctcggcttgtttacgggttgcgaggactgagtaaactgttagggtgttcgcatacaaccgcgaataaaattaagcatgatcctcgcttacaagggtgttattctcagatagggaaaaagattgtatttgatgcggacaaagtgttaaacgtattaatgaaaagtaaattatgatcgacattttcgctatcgacaataataaaactgtcgataataataaggagattccgacgggcagagagattttcgaatcgctcttatcgcaaattgtccccgtggattttaatgttttggcgcatccgaaattcaatgaactgcgccgaaaaatcgaggctggggagctctcctctgatgcgatcgattcgatccctgccggggaactgcgattaaacaaactcgaagacaagcaccgtctcgttgtgattattgagaatctcatgtgtctggccagccgtctgaactggggcttatgcaaaaacaacggaatgacctatgtctataacacggcctattggatgcgtgtcgacgaggaagaacttcgggcgtttctgggcgaagctgcagagcgtatgggtgtcgatcatattacatcttgctatttccgtttccgcaagaacctgttagagcagtttatgacctcggcttacctgaacacgccctcgttcagccgggaacgaattcgaatcaaccttcgaaacgggaccttcgagatcatgcctgaccgccgtggtatccgggagttcgacgcttcggactttctcacctatcagttgccgttcgattacgatccgtccgccgaggcacctatgtttcataaatatctggagcgggtactgccggacgagagttgccggaaagttttggctgagtatatcggttatctgttcgtcggcaatcagacattgaaagcggaaaaggtgctgcttctgtacggatcgggagcgaacgggaagtcggtattcttcgagatcattatggcgatgttaggcccggaaaatgtctgtaactactcgctcgaacaactgactaacgacgacaaatatcagcgggcgatgatcggcgacaagttgctgaattatgccagtgagattagtacccgtatcaacgtcgaggttttcaaacaattggtttcgggcgagccgctgagcgcccgtttgccttatggccggccgttcattctgacggattacgccaaattgattttcaactgcaacgagctgccgcgcgacatagagcagacacacgcctttttccgccgcctgctgatcgtgccgttcaaggtcacgattcctgcggaagaacaagaccggcagcttgcgacgaagattgcgaggaacgaactgtccggggtgtttaattgggtgctctccggcttggatcggctcctgaccaacaaaggtttcacgccttgtgaggcggttgaacaggaattggcagagtatcgtaagcaagcggacagcgtgaggttgttcatagacgagacgaattatctcccttcggttacggcgagtatgaaactcaaggatatatacgatgaataccggaacttttgccatgaaagcggaatgcatccgtgtcgtaaggggacgttccgggagcgtctgtccgctcagggtattaagtcggataagaacaggatcggaaatatcgtatatgttcagaaagctccgatggaataaaatctttttgtccggtcccgcatttttcacttttttcacctgctccgttcacgacaagggcggagcaggttttaataccaaagatatatacgctatgaaacatattttggatgttacggtcagctatttcgatacggtagatacccggattccccgcaatggtaatctgctgaaattacttacagccggttggtttaaagaagacgtcgaacggttacgccgcgaattggacccgaaccggcagcccgagttgaaaaaaaggcttccctgcttcaccgtgtcgggaactttcagtgctgcaggagcagagaatctgacaaaaccgagcggattgttgtgtcttgacatcgacgatgctatgaattcagacaaggagaatctgcattggatgaaaaaatttgccgcacaactgccttatgtggcttattgcggcttatccgcgcgcgggcagggatatttctgcatcgttcccatagcatatccggataaactcaaacaacactatcgggcgctggccgatgagttcggatttctgttcgggatcaagaccgatccggcttgtacggatgtcggacgcaagcgtttcgtatctttcgacgatgccccgtatgtcaatccgtcggcagaggtttactgtaacttcgcagacattccgatccgcacgccggaaggcggagtgcttgcgcaggcgcgttatgattccgtttgcccatcgaccgattccgaagtccggagatatatcgctgaaattgtcaagttcaaaaaggatattacgacgacatacgagaactggtttcggatagcttgtgcctttgccaacgcttatggcgaagaggggcgcgaaatgttccatcaaatcagtcaattttatccgaaatatagttcatcggaaacggacgaccttttcgataacgtattgaatgggcgttatgctcaaatcaatatcgggtcgttcctgtttatcgctcgccatgccggacttggcggttacgcggacttcatggatgcacctctcggagagagcgagtgaaaaaagttaaaaatgtgaagtcctgaaaaaagatttttctatttgccccgaacccaaatcggctccatattcgactccggacgcttgaaggctgattcgcctatacttcaagcgtccgggctcgttattcatatgttttaccaatcttctgaggcatgttcgtcggcccatccgataatatgctctatcatagcgtcgaaggagctgctcaatggatcataaattttacgccattttatttctccttttttattgaatagcgcaggagctaacatagtacccccggtaagtggcatctcgatcatcttgatatataatcttaaaaagttcggttgtatctttattttattgtctttacaagagataaccacgttataaatcaatctgttgttactccccattcctgtaaattcaagattcgaattgaacgtgagcgtaaaactttttttgtcctcgctaagaatatcttttgccgaaactgcgtcttgtacaattttggctcgcaaccggtcatagagttcttctgccgttgtgccgggaacatccacgactatatagtcttttgttgtatcggctaccgagacaaagccggttgcggtcaatttgattagcttttgtgcacttacaatcgttgctgaaatcagtatgcagaaaataagaataatctttttcataatatgctatttatgtaatttggacttacatatgatattcaatgacaggcctaaataattgtcggctccggattctatcggttagattgttttcgggacaggtattttgaatactcgatgtatttcttcaaagcagcccgcggtgaaccgtcccgttcgcgattgatcgcatcgaactcgtcagtcccaatcagcattttttgccaatgattgagcaatctggcatcgacaacggcatatatgctgcccaagtcgatttcgcaaatattccggattgatgctgtaactttattgagggctgataaataggagtttgcagtattgccggacatgccgacatttttaagatactccttgaactggactttgttaactgatactggattcataattaaaaggtttaaaggttgttatatgaaaagatgtcattgtcaggaatcaagttcagcatcccgttatctatgaattcgcgggcttggcaaacgtattcctctgccggaatttccgggaaattaattcccagtaatagatcggggcgatataattcccagcagattgctttatagagggcctttatatgaaatgtccgctccgtctgtttatccagaacgaatgagcagtgtaacggaatcagggcgatgttccaaagggcagtaaaataaaacgggtcgtcggtacgtccccatatatgcgaaatcatataattcttaatggtgctgatagcgcctgtgcttaccttctctccggtatattctttaatagcatttcttacccagtgattaccgtccctgtcaaccctgattcggattccgggccggacgcttgcataaatatcctcggattcgctgattcggactgcttcggctttattttgaaatacccggatattcccagtggacgttttataagcagacttgcggctggagaaccgcacgggaagtttctccgccccggaaacgtaaaacaacatcttttccgcttgtaacgcgacttgttcgggtctgaagaacagcgtactccgaaccatatggttgacaagcccgccctcgcatttcagaatcctgcacagtacatccaatccgtcgtaagccatgctttgaatggcatccgtcagcgcctacggattttaatgggtaaaagaaagcgtggcgccgaaaacttattttagttaagcaggttctggattacctcgaagataaaataagcaacagccccacgcccatatccacggatggatacgacgcaggaagatgtccgcttactctctcttcaatgaattttccagattcgcttaacgagaataaactacactttccgtgttagtatgttttacaaaggtatggaaaccaaggcgtatctccaaatttctgaataaatatgctgtcagggaaggggaatgagttgcatcttttcaatagagatggtgaggaccttttctacaatatcagatacatatcaaaaaactcaaagagtattgtgataatttcagatgatattccgtattggaatttaagataagctctatattaggtgtgtgtacataaaaagaaaagaggttagaactatttttctaacctcttggtttttatggtggcgggtccaatatttgaattaaggaccgcatgattcaaaatttgaattttgatgttagtatttttgtgctgtgtgtatttagtagagttgaaaaagatgttactgcattaatataatcaaaaatgaagagagttaaaaaagattaagcctcgtcttttattttgtcatgcaatactaaatggtttattatgcttatcgcagtaatctcgcctaatttcggcggaacagcatttccgatatatctagatgcttttgttattgatattcgctgttcatctgggaaaaatttataactgtcagggaatgtttgaaatcgagcggcttcacgtaaagatatggctcgattttgttcaggatgcccgaaacgtccattgcctattcctgtgcataaagtcgtcatagtgggggatggtttttcccataccattcgcccgtaaacgctcccaaaagatgtccctgacttttgggagtgacattttagtcttaaatccgatggccaattcttccagccacccccgtaaggagtcgcttttatccgtttttgatttatttctgataatgatctcgctctatgtaaactatctgaaatgtatgtttctccggcttggagcggaggtaaatcgccaatggcatctttgaccgtaacataattttccgggttatgtgtcggtggtatcagttggatcggacccaatctagatgccagtaaaacaatacgctttctcgtttgaggaattccataatctggacaatatactttttggcaacttacatggtatccgagcgaattcaatttatgtataaagtcttgcaaaaccggtttttgtttgaatgataggatttgagcgacattttccattgtcactatatcaggtaaaacctcttctacaagacgtccaaattgatataaaaggtcgtactttttactatctttttctttatgcttgaaagcataggaagaaaagggttgacaaggggcacatcctgccaatatccttaccgtatgtttcttaaataatttatcaatttgtgttttagttatagtttcgacatcttgagcaaaaaaactagcagtattattaaactcatatgcatacttgcaagttttatctatatcgaaacccgcaataatatcaaaccctttttgtttcatgccgtggcttaatccccctattccacaaaataggtcgataacccctatattcttgagagttgattctgaatacattgttgtctagatagattacttactagggcaaagatataaaacattatgtttattactcgttatttttttaattttgtatatcatattgaataaatgcaggctatggatatatgggataaagagacgcgatcgcgaattatgtctaggataggacaaaaagacacaaagccagaagtaatcgtgtgtaaatttttgttctccaaagggtttaggtatagaaaaaatgtcaaggcgttaccgggttcgccggatatcgtactacggaagtataaagccgcaatatttgtccatggatgtttttggcatggacatacatgtcgagcgggaaaaagacctacgagcaatactagttattggaatgagaaaatagcaagcaatattactcgagatgcaatcaaggaaagaatattaaaggaacttggctggaacgtgatagtcgtttggcagtgcgaacttaaaaatcagacgtcagcacatactcggctcgagagtttagtcggacaaataaaagaaagcggcgaataaatgcttccattggatatgctattgattgttatgtttagatatttggtaaaaagagttttttttattaaattagttggcagtatttcatcacctaaacaataataaaaatgggcgaattcaactttaatatttctcttagtatattgaatcatctaggaagaaatctgtatagaaatttcataacagttattggtgaggctatatccaattcttgggatgcagatgctaataatgttcatatttatattgataaagctaataatagctttattatcaaggatgatggagatggcatgactgcctctgattttcaagacaaatttttaagaataggctattctaaacgtaagggcggatcatctgcaaccaataaaaaaaggccatttataggacgtaaagggattggcaaattggctttattgtcatgcgctaaaaggatatctataataaccaaaaccgccttgacagattatataggtggtactattgataatcgtggattggatgaagctataactaatgatgtgtctccgcaggattattcgttagcaccagttttggatggggtttttgacacattgaagaaagatcacaggaaagggactatcatatattttcaagatattgatgaaggtataagaaataggatagagtatataaagaaacaaattgcattgtattttcgcttttcgcttttagacccttcgtttaatatttatgtaaacgacgaattagttactcttgatgaaattaaagaacttacggattcaacacaatttgtatgggttgtcggtaagatagaagacccgtatataaccggtcaattactaaaaaaccctagcttaaaagaaaataaaacagaagcttctgagttcgggctatctggatttatagcctccgtagtaaaaccttccaatttaaaaattcgaggtaccgaggaaaaagttagtattgatttatatgtaaatgggcggttgagagaaaaagatattttgaagcatataccatctactcgtgtggtagaaagttatctatacgggcaaatacattacaatgcgttggatgataaagacgatagatttactagtagtagagaaggtatagtatcagacgaccctctatttcaagaaactttgaaagaggttgatcgaattcttaaaattatacttgaggattgggacaaatggcgtgtcaaatggcgactagacggtgattctgaaaatgataggattgagaaaaaagaccgaaaatcaaaagaactggttaatcttatcgcggatggatttactccaccgccggggtcgcccaataaagataaggttgatgggtgggtcaatgacctaactgatgacgctcagtttaacatccaaacatacggagaatgctttatttctgaaaatttaatacgcaattatattaatgataaaaacgtagtgatatcctcagaagctacaaacgaatttactaaatggaaaaaagcagaagcagataataaagccaagggaaatatcagttttgaaataagagcgcggaaaagtgatatatcatacctatctatggatcatctggcaaatcttgtggataaagttgacccaatcaaagatgctggattaagtcgggatgcgaaagaatataagcctattagagatgctgttgcccatactgcattacttacgtccattgcgaaaacccgccttaatctgacttatgaaaatattaaggctagaattaaaactcttttagctacgccatagcagaatgtgatgggtaattaattgaaggggctacgatagatagtccctttaattgtgtatttaaaataaaaacacgcacagtttttagcttttgtgtgcgtaaaactgtgcgtgttttctgtaattgcttggtgttcaagcttgtttgcggagagagagggattcgaacccccggtacagttgcccgtacaccgcatttcgagtgcggcccgatcgaccactccggcatctctccaatctcccggacgaaaaacctttcgtttgggactgcaaatatagacatattttttatttctcggcattttcgtgcgaaaaaaatttcagtctgcaggaaaaaatgcggctatagcggttcgttttgatgcttttgccaaataatttctatctttgtatcaggcggacaagtgcagtattgctgcgctccggccgtttatatggtgaaaacgatactaaaagcggtatggttttcgtttattggaaaagaactaacgcaaacaccatgtgcgctatgaaaaagttgaatattttaattggaacccttatcctgtccgcaggattggccggctgttcgtcgagctactatgcgtcgtcggggtatgccaacgacgatttgtacgctctgcacgataaaacggccatcgcccgcaagcagcaggccgctgccgaagcccgcaaggccgaggccgaggcgcgccgcgccgagtgggaggcgaagatcgccgaagcgcaggctttggctgcggagaacggttattacgacgagtcgggttcgaacccttacaatgatattctggccgatacgtacgagagtgcctatgcgcgccgtctgaggggattcgagtcgccgacctaccggatgccgtcgagttactacaacttccgctacggcagttcgttcacctatgccacggcgtacgatccggctttctacaacatcatcatttccggtgacgaggtctgggtcgaacccaaatacataacctcgatgttcggaacatggggcggcacgccttacggcggctggtatttcggctggaactactcgccctcgtggtggggctatcccagctacgcatggggcggctggaactggggcttcggcttcacttggtacgatccgtggtggggtcccggatggcatccctactggggacccggttggggacccggatggggcggcggctggcatggacatcaccatgcgggatacaggccccgcgactattacagcaatcccggcggacgcggcaggagctacactcccggccggagcacttcgggggcgcggtacggcaacggaggttatgccggcggttcgcgcggcggcggccgcaacggctcctacagcaccagctacggcagccgcaacggcgacagtccgttcagcagcggctcgcgcggcagcagttacaacaaccggggcagcagttacaacaaccgcggcaacagctataacagcggttcgcggggtgatttcaacagcggctcgcggaatgacttcaacagcggttcgcgcggcagcagctacaacgaccgcggcagttcgagcagcggcagcagcttcaacagcggcggttcgcggggcggcagctccgggggtggttacagcggcggcggctcgcgcggcggcagttcgggcggcggaggacgcggttatggcagtcggtagcaactaaaacggagagaattatgaaaagcatgaaaatagtggcattgtgcgcggccttcgttgctgcggcgcctttgcaggcgcaaaatacgggtctcgaattcggcggttcggtgctgaaccacgacatgttgtgggctaccgatctggcgcagctttcgcagacgcacgttttcggcacggcccgcgtgatgggtatgggcggggcttttacctcgctgggcgccgacttgtcgtcgatgtcgctcaacccggcgggactgggcatgtaccgccgcaacgagatttcgctcacgccgctcgtgcccatggcgaaggcatcgacagcgggaacggcctcgtggaagggaaacagcaaatcgcagttcgcattcgctaacgtgggcgtcgccctgaacgtcttcgagagttcgagaagctccctgaccagcctgacgctcggtatcggcatgaaccgcatcgcggatttcaacagccgctactcgttttcgtcggaatcgcgctacgatcccgaccggcccgaccggctgatgccgacgatcgccgatatcttttcgcagcagatgaataatttcggtgtaaggcccgaccgcgaggccgagggcggaggcccgaacggaccggttcccgtcgatgcgtggaatcccaatgtctggccggccatattggcctacgacgcctatatgctggggaactacggaacggtgaaggacccgatctgggcggtggagcgtatcggccgcaacgcctcggtgctgcattcgatggatgtggtgaattcgggttcgatcaacgagttcacgatttcaatgggcggcaatatcaacaatatcctctacttcggcgcgtcgatcggcattcagagcgtacataagaaactgggcgtgacctatcaggaggaatacggctatttcaatacggacggcatcggacacgacggcagcggcaatgcgctcgccgagcagctcgacgtgatgaatctctatcaggagatggagatgaacggcagcggcgtgaatttcaagctgggcttcaccgcacggcccctgaccggcctgcgtgtcggcgtggctttccatacgccgacctactattcgctcgactattcctatcgggccgatatcttttcggatatcaggaataatgccgacaacaaggtggctacggtgggaaatgccacgccacgggccaacaacagcggcggcaacagctgggatttcacctcgccggcgcgcctgatgttcggcgcttcgtatacgttcggcactttcgccatcgtgtcgatcgattacgagcgcgactggtacaacgggatccgcgtgaagaacgttccgcagtataactacttctccgaagaggactacaaggcggagttcaagcataatttccaaggcacgaactcgatccgtgcgggcgtcgaggtcaagccgctgccgattctggccctgcgcgtgggcggcggttataccgattcgatgctcaaggagcgggatttctatgtgaacgacgcctataccagcatgccgacgacctatgagagctactatttctcggccggcgccggcgtgaacctcggacgcaacacgacgctggatctggcctatcagtatgtcaccaacaagcagacgcagtaccagctcttcttcagcaggcccgaaaacggcggcgacatggagacgtggagcggtctgtacgacacctctctgaaacgtcactatctggccgcgacgctcagcttccgtttctgatgcggccgtttcgtcaatataaaggtccgtcccggtgacggacctttatttttttattatatttgcaggctgaaacaaaatcaaaaataaagatatatggcaaaggaactcaaggacctcaccaagtcggacgagaactactcgcagtggtacaacgatctggtcgtgaaggcggggctggccgagaattcggccgtacgcggttgtatggtcatcaaaccctatggctatgccatctgggagaagatgcacgacgcgctggacaagatgtttaaggatacggggcatcagaacgcctatttcccgctgttcatccccaagtcgttcttctcgaaggaggcccaccacgtcgagggctttgccaaggagtgcgccgtggtgacgcactaccgtctgaagaacgatcccgaaggcaagggcgtcgtcgtcgatcccgacgccaaactcgaagaggagctgatcgtgcgtccgacctcggagacgatcatctggaatacctataagaactggattcagtcgtaccgcgacctgccgatcttgtgcaaccagtgggccaacgtcgtgcgctgggagatgcgtacgcgcctgttcctgcgcaccgccgaattcctgtggcaggagggccacacggcgcacgccacgcgcgaggaggctgtcgaggaggccgaaaagatgattcatgtctaccaacggttcgccgaagagtggatgtcgctgccggtggtggtgggccacaagtcgcccaacgagcgtttcgccggagccgaagatacgcttacgatcgaggcgctgatgcaggacggcaaggcgctgcagagcggcacgtcgcacttcctcggccagaatttcgccaaggcgttcgacgtgcagtacgtcaacaaggagggcaagctcgaatacgtgtgggctacctcgtggggcgtttcgacccgcctgatgggcgcgcttatcatggcgcattcggacaacaacggtctggtgctgccgccgaaactggcgccgattcaggtggtgatgattcccatttacaagggcgacgaccagctggccgagatccgcacgcgcttcgaggccattgccgcgcagctcaaggccaaaggcatcagcgtgaagatcgacgaccgcgacaacgtgcgttcgggcttcaagttcgccgaatacgaactcaagggcgttccggtgcgtctggcgatgggacctcgtgatatggaaaacggcacgatcgaactcgtccgccgcgacacgctcgaaaaacagaccgtttcgcaggagggactcgtggagcgtatcgagggcctgatgaccgaaattcaggagaacatctaccggaaggcgctcaactaccgcgagtcgatgattaccaaggtcgatacgtgggaggagttcaagcaggtgctcgacgacaagggcggcttcctgctcgcgcactgggacggcacggtcgagaccgaggtggcgatcaaggaggccacgaaggccacgatccgctgcattccgatcgacgcgcccgacgaggagggcgtatgcgtcttctccggcaagccgtcgcaccgccgcgtgctgttcgcccgcagctattagtctgcggcgggcgcgatgccgcgcgatcggatggaatatccccggcgaatatccgccggggatttttcggcccgttgtgtcgggtggtgccggccgtgcggagagtttcgggatggggtaatccggccggaaaagcgatcgccggtcttgtgtttccgtaaatttcactatttttgttcattgtcgtaaaaacgtgcgttatgtccggtgaggctgaaatccgcaaaaagaaaatataccgtgtgacctttatcggtttcgcggtcaatctcctgctcgccgggatcaaactcgcggcgggtattctgggccgaagcggcgccatggtcgccgacgccgtacactcgttctccgacatggcgaccgacgtggtggtgatcgcctttgccaagatttcggccaaacccaaggacgagggacatgactacggccacggcaaatacgagacgctcgccacgatcatcatcagccttgcgctggccgccgtaggcacggggattctggtgaacagcatcggtgccatccgcgtcgttgtggacggagggctgctgccccgtcccggcaccgtggcgctgctggccgccgcggtctccatcatcgtcaaggagattctttaccgctatacggtgcgcgaaggccgccgggtgtcgagtccgagcatgatcgccaacgcatggcatcaccgcagcgacgccctttcgtcgctgggaacgctggccggcatcgggtgcgcctattttctgggcgataagtggcgcatcgccgacccgatcgcggcgctcgtcgtggcggttttcattttcaagatcgcgttcgacctgatccgcaccggactcgacgaacttttggaacgttcgcttccggaggatgtggaagaggaaatcctgcgtgtcgttgcggcgaatcccgaagtgcgggagccgcacaacctgcgcacgcgccgtatcggcgcgtcgatcgccgtcgaggtgcatgtgcgcgtggacggcgcgatgagcgtctgccgctcgcacgagctgaccgaggacatcgaacgccgcctgcgcgcccggttcggcgaaggcacgatgatcgccattcatgtcgagccgctcaaggcggcgtgccgtgcggagtgatgccgggtggcggggcggattcccgcgaaaaacggcgtgccggttcacccgcctcttcgaccgtttcgccttgaccgctgattccgaataaaatgcctttcggagctgttccggcacggattttgctgtttctgcaatccgaataaacaggccgggacattcccgccggagtagaaagaaatttggattttcggaaaaaagtgtttatcttgccgctgtcaaggctccggaaactccgggtttccgaaagcccgaacgatgaaattatcgacatacacaacttaaaaaggattgcctatcgggaaaagtctactcttaactacatttaggagacaagagtatgaacgtgcaagtattaagtgaccaggtattgcttaatcactacctctcaggtgaccaaagtgccatatccaagctcatcgaacgccatagccgccgtgtgcgcgactacatcaatatgatggtgaaggaccgcgatgttgcagaagatatcttccaagagacatttatcaaagccgtgcgtgtaatcgacgacggccgctatacggacaacgggaagtttctctcgtgggttttgcgcatcgcgcacaatcaggtgatcgactatttccgcgcccagcggcagaacaaggccgtcaccgaagccgaagccggatacgatgtattgggatcgctgcgtttcgccgagcggaacgtggaggacgccatggtcagcgaacagatcgagcgcgacgtgcgcgcattggtcgagttgctccctgccgagcagcgcgaggtggtgatgatgcgttatttcgccggtctcagtttcaaggatatcgccgagcagaccgacgtgagtataaacaccgcgttgggccggatgcgctatgcgcttatcaacctgcggcggatgatcaaggaaaaaaatatgattttgtgctgaccggcacacaatatttccaaaggcgcggcgtttagttagtacaaagcaaaattacaagatgcctatggaggatattgacaaaaacgaagtttcggacgacggcatctccgatgaagaagaacttctgcatcgggaggtgattcagggtgatgcggatctttactaccttcaccactacctctcggaagtttttcggaatggggataatttttaagggttaatttttgatggggaagggcgccgggaggcgcccttcattttaggggctacggcccgttcgcgcatctcttttttaattggacgattatgaaattcagcaatgtgagattattggtcagggactatgaaaagtgcttccggttttatacggaaaaactcggtttggaggcggcgttcgatatcgaaggctgttacggcagtttcaaggtggccgaaggcatcgaggggttggcgatatttacgtccgacctcatggcgcctgtcgccggcaatgcagacaaggagctgccggccggctgcagggataagatgatggtgtcgtttgaagtcgacaatgtggacgaagccttcgaaacgctctctgcgaggggcgtggagtttgtcaaccgtccgaccgacatgcccggctggggaatgcgggtcgtgcatctgagggaccccgaagaaaatctgatcgaactttttacgcctttggcagcgaacttatgacacgcatacgaatcaaacgcgtttacgaacccgccgctccggacgacggctgccgcgtgctggtcgataaactgtggccgcgcggcgtgcgcaaggatgccctgcattacgacgtgtgggccaaggagatcacgcccagccccgaactgcgcacatggtatcacgccgatccgcagacccgctggccggagttccggcgccggtatctcgaagagctgcgcggctcgcaggccgtgcgggagtttgtccgccgcatcgccggaaatgagaccgttacgctgctgtacgcatcgaaaaatgcggccgagaatcatgcgctcgtcctgcaggaatttctcgaacacgccgtgacggaggtcgcgcacgcctgaccggtgtgatgggcggttcgctccggccgtccggtttcgtgttttcggggcttgtgccgtttccggtttcatcggtttcgccgccgggaggggtggtgtgccgtggtgtgtgcgggaaagggcaaggccctctgaagagggacttgccgtgtgaaactttttttgtgtggcagtcgctgtttggggacggcagagttcccggtgcggcggcggagaacaaaaaaagcccctcgctgcgaggggcttgtacggtgaggcagacttgacggcgtgcggaaatatcagcggttgccgagacagcggtgcgcctgccgcagctggatcgagagcgaacaggcggcgatgccggcgaagagcagcgaaatgccgacccagatcacgacggccgtggtgccgaataccagcggttggaacagaatccacaacgagcagagcaccagcaggatgccgctgaaaacggtccagcccgatccgggaatctccatggcgttcatgtcgccgcccagaccgatggcgctgaatccgcgcagcatgagccagaaaccgaggaaaatcgggagtgtggcggccgaaagcgcgacgttgaagatcaggatgatgccgaggatgatttcgatgatgcccccggccagcatccagccgcggcccgtgatgaagtgtttgttggccgacgaaagcacgacttcgagaatgcccgaaaatagcatcagccagccgaagacgagcgacatgcccagatagctctgggtggggtagacgaatatcaggatgcccacgacgaacagggcgatgccgatgatcaggagcagccaccagtaacgtacggcccgcttcgaattttcgatcagtgaggaaaaattgttcatagtatatggattttcctccctccggagcaaattgcataccagagccggaacgctcaagtcctgagtatgcgtggtaaaggccgtttttccgcaggtgtcggatgcgggttgccgtggccggaggtcggcgcctcactgccgccgcagatgtttcggcagagatcgcttcggcgaagatgtttcggcgcgggtcgcgtcgtttcgccgtaggtcgcttcagtgcgggatgtttcggtgcggatcgcgggcttccggcggaatgagccggccggaaccgggatagccgcgttgaagcccgaccctgtccgatgcgctataatcccgtcggatcgtcggtctgcgcacgctccggttgcggagtttccagcggaaccacctcgccgatttcgggccgcaggaggtgcagcgcggagtccgcggccaatgccgcctcggtcgccagcggctcgtcccagcggtgtttggcgagggcgtatttcgaatggtggacggtcatgatccgccttgcacccagctcttttgcggctttggccagttggtcgggcatcgtgtggatgtatttccacgcttcgtcgtactggccgttttcgaggacggcgaggtctatgtccggaaactcttctccgatatcggcgaaatggcgtccgtatccgccgtcgccgcccatgtagattttccgcgctggcgtttgcagcaggaacgatccccacaacgtctgattggacgacagcccgcggccggagaagtggcgcgaggggagacagcggacggtgaatccgtcgccgagcgtctgttgttcgtgccagtccagctcgacgatcttcgccgggtcgaagccccagtactcgaagtgctcgcccacgcccagcggacagatgacccggccgatgcgctctttcagctcgcggaccgtgcggtagtcgagatgatcccagtggtcgtgcgtgacgatgaggtagtcgatgtcgggcatctcttcggggcggtagatgtcggtgcctttgaacggacggttgagcagcgagagcggcgccgcgctgcggaaaaccggatcgacgagcgtccggcgcccttcggcctgaatcaggtaggacgagtgcccgaaccagaccagcaggttgcttttgggatcgagcgcccgcaggtcggtgcggatcgccggcaccgcatcgtcgggtcgcagtccctcctgtttgcggaagagaaattccagtatgccgcgcaaacggctcttgtcgcccgtcatcatcggaccggcttccgtattgcggaacctgccgtcgcggtagttcggcgactgccggatgcgttcgagccgttcgccttggggcagacgcccgaaactcggcagacggacgatgacgaatgcggcggccagcgccgcgagcaggatgcttgacagtattatcattttgcctcttttttgcttgcccgacatgatttttcaggtttgtatggtgcaaatataccgtttcttccgagacggtgcgtatacggattgcggttcgggctaccattattccggaaatgtctccggcaacggcctccgatacgataaaacggattgatttaacgtatattgcgtgctgttccgggctgttttgaccgacgattcggctgatttgttctatttattatgatttaatgccaaagttttatatttttgtgacggattgtttctgcaatgtgatgccttatacgtcttactctgaaaaattaccgggacccggttgccggattttattccgcactctggtcttgacgttctgtttgtgcctgctctccggattcgaagtccgggcgcagtccgcgcaacggaagtttgtggtccgcggccgcgttaccgatgaggcgggaacgccccttgtcggggttaccgtcgtggaacacgggacttcgaacggtgtggcgaccctctccggaggtgaattctccatcggcgtcgctcccggcgccgtgctcgacgtctcgtgcgtgggctatgtgccccgcagtgtcccgaccgaaaaccgcaccgggttggacatcacgctggaggaggacgtgaaagctatcgccgacgtgatcgtgacggctctgggactggaacgcaactatgccgacctgacctattcggccgacaagatcaagggaacgcagctcacgaacgtcaagtcttcgaacatgattctctcgctcgcgggcaagtcggccggcgtgcaggtgaacgaaagctcttcgggtgcgggcgcctcctccaaggtcagcatccgcggcgtccgctcggtggccagcgacaatcagccgctgtacgtggtcgacggcatgccgattctcaactcttcgcctgagcaggcctatacggccatcgggggtgtcgccgatgcgggcaaccgcgacggcggcgacggcatctcgaacctcaatgccgaggacatcgagagcgtctcgatcctcaagggcgccccggcggccgcgctgtacggcagtcaggccgccaacggcgtgatcctgatcacgaccaagaagggcagcgccgcgaaacggcagcccgtgaccttcacttcgaaccttacgttccaaagccctttccgcctgccggacttccagaaccgttacggggtgagcggcggcgtcgaaagctggggtgcgcgcgccgcgatgaaggcttacgacaacgccggggattttttccggacgggcgttacggcgatgaactcgctgtcggtctcttcgggcaccgagcagatgcagacctacttctcctacgccaataccgccgagcgcggaatcacgggctcgaaccgcctgatgcggcataacttcaacctgcgggcgacgaccgggctgttccgggaccggatcaagctcgacggcaacatcagcttcatgcgtcaggtcgtgaaggacaaaccggtgccgggcggattctacatgaacccgctggtgggactttaccgcttcccgcgcggcgtcgatatgactccctaccgcgagcatttcgaggtctatgacccggaccgcaaactcagcgtgcagaactggatcgctccgagcgacgatttcgaacagaatccctattggatcaccaaccgcatccgtagcaagagcctgcgcaaccgggtcatggcctccctctccgccgactggaaggtgaacggctggctgcgcatccgcgcccgcggcaacgtcgactatatcgacgacaaggtccgccagaggttctacgcctcgacggctccggcgctggccgggaacaacggccgctacatcgaaagcggttattcggagacccttttcaacggcgaggtgctggccctctttgacaggcggttcacgcccgactggacgttcagcgctacggtcggcgcctccctgaacgaccgcacggtgaattcgctgcgcatcgattcgaagaccgcgtcgctctattaccccaatgtgttcaacgtggccaatatcgtcatgaacagctcggcctacgtcgacgagcagatcgacgcccgccgccagatacagtcgctcttcgccacggcttcggtcaaatacgccgagagtctcaacctcgaagtcacggggcgcaacgactgggcttcgacgctggcctacacctcgcacgagggcagcgggtttttctactgttcgttcggcgcgtcgtgggtcgtcggcaagatgttcaaactgcccgaatggatgtcgtttgccaaggtgcgcctgacgtggagccgcgtgggcaacgacattccgatgttcatcaccaacccgaaggcccacattacggccggcgggggcatcaacgccgccgatgctgctccgggcaccgacctcaagcccgaaatgaccaatgcgctcgaagcgggtttcgaatggcgtttcttcggcgaccggctgggaatcaacgccacttacaacaagaccaacacccacaaccagttcttcaagctgccggccctgtcgggcgaagcctatgctttccggtacgaaaatgccggcaacatcgagaacgagggcgtcgaggtgtcgctgagcgcctatccggtttacggcagcggtctgacgtggcagtcggtcgtgaacttcgcgcataacaggaaccgggtgataaaactgcacgacgaactgcgcgaatatgcctacggtccgtcgagcttctcgtcgtcctacgccatgaaactggtcgagggcggggcgatcggcgacatctacggccgggcgttcgagcgcgacgccgacgggaatatcgtttacgaaaccgaaggcgattacgccggcctgccccgcaccgcgggcgacggcaataccgtcaaggtgggcaatgcgaatcccgtattcgcgctgtcgtggagcaacactttctcttacaggggcgcgtcgctgtcgctgatgctggactgccgttacgggggccggctgctgtcgcagaccatggccgatatggactcctacggtgtctcggccgcaacggccgacgcccgcgaccgcggttacgtgacgctcgaagggcggcgtatcgacgacgtgaagggattctacaaactggtcggaggacgcgccggcgtgacggaatactacatgtacgacgccacgaatatccggctgcgcgaattggccgtctcctatgcgctgccgcagaagctggtccgctgcacgcgggtgctgagcggcgtcaccctgtcgttggtcgcgcgcaacctcttcttcatttacaacgccgcgccgttcgatcccgatctaatcctttcgacgggcaacgacaatcagggaatcgaagtgtacggcatgcccaccgtgcgcagcgtgggatttaacatcaaactggaattttaagcatgaaatgccggcatacatatcttttcgcgggattttgtgcgctgcttctcggcgcgtgcacgggtaatttccgcgacataaacgacgacctctccggcattacggacggcgagctggaagccgacaacaacggcttgggataccgtctgggcattatccagcagggggtctatttcaattacgatttcggcaagggcaagaactggcctttccagctcacgcagaatctcaatgcggacatgttttcgggctacatgcacgacccgaaacccctgcagggcgggagccacaactccgactataacctgcaggacggctggaacagcgccatgtggcagttcacctactcctatgtgatgcccgaaatctaccggctggagcagaccgccgctgagctgatgccgcccttctatgccattgcgaagatactcaaggtgctggccatgcagcgggtgaccgactattacggtccggtgatttatacccgtttcggcgcgcagggcgccgagtacgtgcccgacggccaacgggaggtctacatgcgcttcttcgacgatctggatcaagcttcggaaatcttgtcggattatgtcgcggagcgtccgacggccggcgaatttgcgaaattcgacctgctgctcgacggcagctatgccgcatggctccgcttcgccaactccctgcgcatgcgtctggccgtgcgtcttgcgtcagtcgcgccggagaaggcccgcgcggagttccggaaggcggccgccgacccgtacggggtgatcgaggtcaatacgaacaatgcggcggtcgagacttcgggaatctactcgaatccgctcggcgcgatcaaccggagctggaacgaagccgtcatgaatgcctcgatggagtccgtgctgaccgggttcggcgatccgcgtatcgcgaagtttttcgaaccctgcgccgacgatctcgttattacggacgacggcggggaatccgtttccgttccgttgaaagggcaatatcacggcatccgtcagggaaccgccttttcgcataactattacgccgccttttcgcggctcaccgtcgagccgacgaccgaagtcgtgctgatgtctgcggccgaagtgtggtttctgcgcgccgaagccgccttgcggggatggaccgatgaagacgccggaacgtgctaccgcgccggtgtctccatatcgtttgcccaatggcaggtgtcgggtgcggagcagtatctggaaaacgacgcttccgcggccgattaccgtgacccgatcgccccggagaacgatattgcggcccggtgccgcgtgtcgccccgctgggacgagtcggcggccgccgagatcaaactcgaacggatcatcacccaaaagtggatcgccatgtatcccgaaggctgcgaagcttgggccgagcagcggcggacgggttatccgcgtctgtttccggtgcgcttcaaccatagcaagggccagagcatcgacaccgagacgatgatccgccgcctgccctatcccgcgacgctcgaaacctcggaccccgaacaatacgaaatgcttctgaaagagcttggaggtcccgatcacggcggcacccgcctgtggtgggacacggggcgcaatttctgagacttgtccgtcggccggaaactgaaacacaccgcttttgcggtgtgtttttttttgttgtgtccggcgacgtccggccgatcgttcgtgtgcggtgaagttcggcggcgttgcccggcttctgggcttagccccggctctccatgctgtctaccgaggggttgactgccacgacgtcctgttcgatctgctgccgggagggagttccgtttgcggatgcgggggcgatggggccgtcgtcggaaatgtcgtccggcgtgatctgggtgcgcgtggtttcctgagtctgctgcggatcggcggaaggctgtcccacttgcattccgcccttgttttcccgcagagcttccttgtcgtatgcaggtcgtttcataattcgaattctttttttgttccgcgtgcaaaggtcataccatagggcggcccgctgccggatatcgtctccgacgggaatttgcacggaatttggggcgggtgcaaaggtattcaccgtaaaccggacgattatgaaaacaaggaatttgttgctgggtatggccgctgtctgcggcggttcctttcaggcggtcgcctgcacgggcatcgcgctcacggctgctgacggcagttatgtgcagtcgcgcaccatcgagtgggcccgcggcgttttgcagagcgaatacgtcgtcatcccgcgcggtcagcggctccgctccttcacacccttgggagccgacggcatgaccttcacggccaaatacggcgtcgtggggctgtccgtggtgcagaaggagttcatcgccgaggggatcaacgaagcggggctgtcggccggactcttcttctttccgcaatacggagggtatgaaccctacgaaccggcgcagaacgaccgcacgctcgccgatctgcaattcgtggcatgggtgctgacacaattttcgaccgtcgatgaggtcaaagccgccgtcggaggcgtgcgcatcgtcgcgttggaaaagacgtcggtcgtacattggcgcatcggagaaccgtccggacggcaggtcgtgttggaaatcgtcggcggagtgccgcatttttacgaaaatgaggtcggtgtgctcaccaacgcccccggtttcgagtggcagctcaccaacctgaacaattatgtgaacctctatccgggcgacgcccccgtccgccggctggacggcgtaacgctgcggcctacgggcggcaattcggggttcctcggccttccgggcgacgccacgccgccgtcgcgcttcgtgagggccgccttctaccgcgccacggctccgcagcgcgccaccgggttcgagaccgtacagcaatgcttccacctgcttaacaatttcgacattcccatcggcatcgaacatcccgaaggcgagtgtccggacattccgagcgccacacagtggacctcggccatcgacctgaccaaccgccgggtctattacaagaccgcctacaacaatacgatccgctgtatcgacctcgcggggatcgacttcgggaaaacggcctatcagtcccatccgctggacccgaaacgggaacagcccgtggaacggatcgctgttccggagtaagacggcggttgcggtccgttttcggccgcttctttgtcggcgtcgccggggctgaactcctcgtcggcgaaaaagccggttagtcccgtgagctgtttctggcgcagcagtgcgtcgcgctctgtgccgatatggcgcatggtccaccggtcggaccgccgcgtccggataggtttcccttttgcaatcggccggcagggattccctgacgaccggttggccgctggggggggccggccggcggctatcgtatccgccggacccatatattctctccctttgcatccgaagacaaaaggctgcccgcggcaaaaccggactgctttttcatgcccgtcccgaatattggtgtggaagcgttccatatcggcttggaaagcttccccggattccggacctttgccgcgcaaacgaaaaaaacggctttccgaccatgtctgtacgaccttgcgaaatactgaactgcggggatgtctatctttttcctgagacgaattcccggtgtcagggccgctcctcgctatggagcgtgatcgtcttgcggaagaggaatgtcgtgctcgaatcggatacgggggattatcggcattttgcgatgtggcggccccttgccgtcggttgccgttattgcccactggcgaaacgctccgaatttcgggattatagggtgaatctcacgtatgccgaaatgcgtaaaataggataaggataatgtcgtcctgcttaaaactttagcggttatgaaaaaggataacgagagtccctatcgttactatcgtgtcgtaagcgtcaaaaagatcgatcggtggtttttcgaccgatacgatcatcgcagaacccacgcgaaaatctatgaaacggtcatccggcccaaattcgggatgtgcgagaacacgtttctcgactaccgtcatgaaccggacgagctgctggaactgtttccgcagtcggccagcgtcgagttttcgctgtggcttccgacagtacagaccaagtacatggttcccgccgaggcgaatcgattcagcctgatgctctgggattcgatcgacaaggcttttcgctgtatccggcgacgggagccgggctgctgcatagacgccgacaagttactgacgtatatgacgctttatctggaagaaagatcatccgtcgggatgaagtgacgcaacttatgaatgaagagaggggctgtccgaataattcgggcagccccggtattttcgtgcggtcttttcgttttcggttcggggagtcggccgaagtttttgcaaaatgatgatatacagtcggttttcctctttttgcgccggacaggcaacaaaaaaggagcctcggaaaaaggctcctttgtgcggataaagggactcgaacccccacgccgtaaggcatcagatcctaagtctgacgtggctaccaattacaccatatccgctcggtatgtgcaaaggtatataaaaattcacaaatcgcaatccggggcggggattataaggcttttttatttacttttgtagataattttacccgattatgccgcagaatatcacactcgtcctgacaccccggcaggctgccgatgcgaagtattacacgtcgctcgccgcacgtcgtttgggcatgctggagcaggatatcgctttggtgcgggtcgtcaaacggtcgatcgacgcccggcagcggcagcccaaggtgaacctgtcgctggaggtctatgcagaccgcgaaccccggcctgcgcccgtgcatttcgactatccgtcggtcgcggggaggaccgaagtggtgatcgtcgggtcgggtccggctgggcttttcgccgctttgcggctgatcgagctgggcctgcggcccgtgattctggaacggggccgcgacgtctcggcccgcaaggtcgatatcgcgcagatcaaccgcaacggcgatgtcgatcccgattcgaactacgctttcggcgagggcggcgcggggaccttctccgacgggaagctctttacgcgcagcaagaagcgcggcgactataacaaggcgctgcagacgctcgtcttccacggcgcgacgcccgaaatcctttacgaggcccatccgcatatcggcaccgacaaactgccgcgtatcatgcagcgcatccggcagacgatcctcgatgccggcggcgggttcgttttcaacagccgggtgacggacctcgaaatcaaaggcggccgggtgcggggcgtatggtgcggcgcgacgctcgtcgaaggtgcggccgtggtgctggctacgggacattcggcccgtgatatttacgaactgctgcaccggaaaggcgtgcgccttgaagccaaggctttcgccatgggtgtgcgtatcgaacatccgcaggcgctgatcgattcgatccagtatcattgcgaaacccgcggcgaataccttcctgcggcggtctattcgctcgtgagtcaggagaacggccgcggcgtctattcgttctgcatgtgccccggcggattcatcgtccccgccatgaccgatgccgcccagtcggtggtaaacggcatgtcgcccagcggccgcacgtcgccctatgccaattcggggctggtgaccgaagtgcggccggcggatttcgaacacctgcgcgccgaatggggcgagctggccgggctgaaattccagcagcagttcgaggagctggcgcggcggtacggcggtgaccgtcagatcgctccggcgcagcgcgtcgccgatttcgtcgcggggcgtgcgagcgcgtcgcttgccagaacttcctatattccggggatcgtcccttcgcggctcgatcggtggatgcccggattcatcgcgcagggactgcggcagggacttgcgaccttcggccgccggatgcgcggcttcgtcaccaacgaagccgtcgtggtcggcgtggagtcgcggacctcttcgcccgtgcgcattccgcgcgatcctgcgacgctgatgcaccccgaaacggccgggcttttcccggcgggtgaaggcgccggatatgccggcggcatcatctcggcggctctcgacggcgagcggattgccgaagcggtgaagaattacatagcttgaggatatctaaaaaccatatgaccgatggaacctaaaaagtaccttttgttcgttaccctgccttatgcctactcgatcctgcggccgctggagcatgaaatccgccgccgcggcgattctgcggcgtggtttatcgaagcggattgtccggttgcgctggaggagggcgaagtgcatctgaaaacgatccgcgaagccgtcgattacaatcccgtcgcggttttcgcgccgggcaactacattccggatttctttccgggcgtgaaggtggcgcttttccacggttatgccattcagaaacgcatcgaggcggtcgacgaccatttcaccgtgcgcggctggttcgacatctactgcacgcaaggtcccagcagtacgccttatttcaaggagctggagcggcaatacgggtttttccgggtctacgagaccggctggcccaaagccgacacctatttttcacccgaaacgcagctcaggccccgcaacgaccggcccgtcattctctatccgccgacctttacgcgcaatgtatgttctgcgccccatctgatgaaggagatcgagctgctggccaaaaccaagccgtgggactggatcatcaccttccatccgaagctgaccgatcccgatatcattgccggatacaagcgcatcgccgccgaaaacgacaacgtgacctttttcgagggacccgataagatgccgctcctgcagcgagccgacgcgatgttgtgtgacagttcgtcgatcattctggagttcatgttcctcgacaaacccgtcgtcaccttccgcaattcgcatcccggcccccatctgatcgacgtggaccgtcccgaaaaggtcggtccggcactggagcgggcgctctcccggcccgaagagctgatgcgcgagattcgcgcctatacgatgcaccatgagccgcaccgcgactgccgctgttcggcgcgcgtgctggatgccgtcgacgactatatcgcccgcggccatgcgggactgaagcgcaagcccctgaatctgatccggaagtggaagcttcgccgtcagatgcgctattatccgctgctggagatgttccgccgctgattgcgtgcgaaaaacgaaacgccgcatccctcggatgcggcgtttgccgtttgtatatgttatatgtgcagtcccttgatgaccagcttgacccatagccgggagtttatcatgcagctcagccgggcgatccacagggctttcgtgtcgtagaatcccttgcggaattccgaacggacgtaggcgcggtagaacttccagttgtccagtatgccctgcgccaactcgttggccagctctgcgttccagcctttggtcctgcgcagttcgcggcgcaggcgcgaaaactgcgtccgggtcgtgaggtagagtatctcgtcgcagtagcccagcgacttgtactgttcgtggatgtagcggcgtatgcgcatcagcatcatcgggtctatctttccgcgcagcagactcgtggggacgtaccggtaatggtatgtggggttgctgttgctgacgaggtgggtgatatgggcgcagtactgggccgtgaatatctcgtcttcggcgtatcggatgctgcggtcgaagcgcaggccgtgccgttcgatcgtggcgcgcgagaacattttgttgcaggtccagccgaggcagtgtctgcgcagcagctgcgccagtacgggcatgcaggcatcccggccgcccgtgacccggcaatccggtatcgcataaatccgggtgtgtccgttggggtgcctgccgcttgcgggacgctcttcgaacaggttcgtgaaggcgactccgtcctctccgatattgctgtcggcgagttgttggaggtggtccggagtgacccggtcgtcggagtccacgaagaccacgaattcgccccgtgcgttgtccagtccgagatttcgggccgcgctgacgccgccgttggggatatggaatacgcggatgcgtttgtccttttcagcgtaacggtcgcagattgcgcccgaaccgtcggtcgatccgtcgtcgatgagcagcagctcgaaatcggtcatgctctgcgagagaatgcttccgatgcattcatcgaggtatttctctgtattgtagacgggggtgatgactgaaacaagcatatggaatctgaaaattgtcggaattcggtcagctgcctgcgcctgcggggacggcagtctcggtgttggtatatacgatccgctccgatgcgggcaggtgccggtcgagtccgcaccggcagcgggtgcggtgttcggagagactttgtttgtagcgttcctcgttggcggactgccggtcgcggtcgcatttgccgtggtagaggtggaagacgatgccgcggaatttcatgcaccgctgtctcacgccgctgttgttgagccgggttgccagttccgaatcttctccgccccagccccggaactcttcgtcgtaaccgtttacgcggatcaggtcgctgcgccagaaggccatgttgcaccccttgacgaagcgggagggacccagcgtccggtagagataggccatcagcggaatccggacgacgttgttgctgttgcggacgcccttcatcagcggggtcagcgaggtgatctcgccccgcagcacctgattggtgagcatctcggtaatgatgccgcgcgatccggtgacgaagcagccgggctgcgcgaaaatcatgtggtcctgaatgaaatgacgttgcaggatcaggtcgccgtcgatctggatgacgtattctccgcggctggccgcaatggccttgttgcggatttccgccagccggaatccgtcgtcctcgtgccagatatggcgtaccggtacgggcgaaaccgcttcgaagtggcggactacgtcgcgtgtggcgatgcccgaaccgtcgtcggcgatgatgatttccgaaggcatgacagtctgctgcattacgctgtcgaggcacagatagagggctctgggccaattgtaagtggagatgatcaacgatacagtcattacagtaacatgtttttaggatgccttaccggtacggccgcatacggcacgacgcaatatctttgccgttgtgccttcgttccgttgttccggtttccggtatgttgtataatgcctaccgctttgttcattgcgcaaaggtagtgatttattcccgtcttccatcggcgacggcccttcaatatagggagtcactatgtataaacgcgcgtttgcagcaaatactgcatggagagcggaaaaaaatattgcgagttgcaaatattttcccggattagttatatgatttagaatcaatattttactgtatttgtacgacaaattttattaaaaaatatgaaaaaattataaaaatattttaataaaaacttgcgcggaatcttttttcgccttatctttgcagtgaagttttaaggttcatttaggttagtagttttaggttggtgaggaaactctggaacccggacagcagtccgattccgtgtttcctttttttgtgcccgtttccgaaccgccggttttctcccggtcggttagtctgtcgccttttttcgccgccgcttttttcttcggtcggttagtctgtcgccttttttcgccgtcgcttttttctttgctgccgcctttttttctcccgtgtttttttctcccgtgtttttttctcccgtgtttttttctcccgtggctttttttgtttgcagaccgtcgttcctgcaactttttcctacgctgtttttgtgggacggcaggcgccgggattctctccgaacccgccctgaggggctttttcagcgctttttcgccgccaatgttaccaaattgttaaatatatttaaaatattcataaaatatttgcgtaattcaaaaacgccccgtatctttgcagtgaagttttaaggttcatttaggttagtagttttaggttggttgaggaaatcggtaggttgtaacggagattccgttactaagacttgaagggcggtgctcgtccgagagtcgaatacctccgattaaacctcgtttttggagggggtggttccccgccaaaaaaaaggtctgagtcgtgagactccggccttttttcattttacggccctgcggccgtctctttttcggaggatgttacagattctccagctcttcgcggctcatcgtcacgtcgacggctcccagcgcatagcatccgatgtcgtaagggttgtagtagaaggtgatcccttcgggcgtaatccggaaattctccgtcagggagatatattccgggaaaaatccccgttcggccagctcgtcgtcgttggcggcttcgtattgctcgcagagtttcctgcgcagcagggcctccatgccgagcagttgccgttcggagaagaggtccgccgtggagagttcgtaccctccggccagcgaataggtatggcactccgtggcgtacatgccgtgcgcccctcccgtgtagctccaccggctgatgatgtaggtgacgagcgagtccgtgacggctgcttcggcttcggccgagatttcgtaaggctccgtcatctgcggggcgctctgcggaaatgcaagctccgcggcgatctggcggaaggcggaatcggccgcctgacgcgccgtgccgccgaactcttccagttcgaagaaatagcctgcgttggcggcttcgatggagcgcagggcgggggatttctctgcgttggcgatcgtggcgaaacggtattcgatcttgcatccgtttgcgggcgtgccgatgagggtgtcgatggacagcatgccgaattggggagcgacgggcttccgcgtgcaggctgccgtcgccgcagccatgcctgcgatcagtatggcggttttgatgtatttcatggtctggacatgttttgtatttatcgtaaagatacggaaaatgcggctatatgcggggtttcccaaaaaaaaatcgtagaatttgcaggaaaattttgcagttttaaaagaaggcgttatctttgcaccacaaaactcacacggtggattcatctaagggttaggatacgtgcctctcacgcacgacataggggttcgaatcccctatccactactaagcgatcggtttccggtcgctttttttgtgtgcggctccgcgctggggcggagtcattcgccggaattccgcgcggtttcagcctccgggcgttttcgcgtgccgggtgtttgccgcttcccgcggtcgccatgtggcggatgttttcaaatgcagcggccgtccttttcggggcggccgctgcggcattgaagttaaaggttatttgattggttggtgggtttacttttccgatttgctcttgaatttgtctatctgacgcttgagggcgtcgatcgcttcgtccaccgactcctcgaaggctttggactggtggcaggccacgaggtcctcgcccggcatatggagcgtgatcgttgcgatcttgtttcctttttcatggtctttatcgagtttcagaatgacctcggcaccggtcgaacgctctgcgaagcggtcgagcttttccattttgtgctctacgaattcgatcagccgtttgtctgcgtcgaatttcacggattgaatctgtacgttcatagccttgcagtttataaaagttaatcacttccctcccttttcgcggggatgggcttttgcgtatatttcccgaagccgggcgatgctgttgtgcgtgtagacctgcgtggcctgcagcgaggcgtggcccaaaagctcctgaatctcgcgcatgtcggctccgccgttcagcaggtgcgtggcgaacgtatgccgcagcacatgggggcttttcttgccctgtactcccgcgcgggtgagttcttcctgcaccgtgcggtagacgacgctccgggatatgcgcttccctttatgtgttaaaaatagtgctttttccgaagaaatgcaaatattttgcctctctattaggccgaggtagtgcaaaatcttttcgcgcaggaattcgagaatcgggaccatgcgctgtttgtctcccttgccccggacccgcagcgaggtgtagtcggccgaaaagtcgctgcggtcgatgccgaccagctcggccagacgcagtccgcaggcgtaaaacatcaggatgatgagcgagttgcgctcggtcaggaaatcctcgctgtccggtccgcattcgctgacgatggtcgtcatgcggctttcgggaacgaatgccggcaggcggcgtgaggttttgagcgtcgaaatcatgcggaaaatatccttttcgacggctcccgtgcggtgcagccaccggaaaaaggcccggagcgaagccacttcgcggttcatcgacccggcgctgagctttccctcctccgtgcggaaaatgatccattcgcggatctgctcggtcgtgaccgaccgcgggtcgaaccgcgactcgtcgcagtccagccacgcgaggaactgctccacgtcgtgcttgtagttgcggaccgtgagcggcgagtagcgccgctcggcggagagatatcggatgaattccgtcagcatgcggcaaagatacggttttttcgtatttttgcgtattcataaatagtatgccatgaaacgaatcttcattttagcctttctgctggcgtggctgacggcgcagtttgccgccgccgctgcggtcgatacgcttgcggtgcgcagcgcttccatggaccgcgacattcccgtgatcgtgattctgcccgacggagcttcgcctgcgaatccctgcccgacggtctacctgctccacggctacggcggcaatcagacgacgtggctccggatcaaaccgtcgctgcccgccatcgccgaccgcgaaggaatcgccttcgtctgtcccgacggcgcgacgagctggtacctcgacagcaaggtgcgggcgaagagcctttacgagactttcatgacgcgggaactgcttccggccgtcgaggaacgttatcccgtttcgcgcgaccgcagcggacgcgcgatcacgggcctcagcatgggcggcttcggcgccgtgtcgctggcgatcaggcataaggagctgttcggggccgtcggcagtacgagcggcggattggacatccgtcccttccctgagaactgggagattccgcagctgctgggtacatttgccgataaccccgaagcttgggaggcagctacgccgatcaacctgatcccgcgtatcgccgacggcgatctggcgatcgttatcgactgcggttacgacgatttctttttcggggtgaacaacgacttccatgccgagctgctgcgccgcggcatcatgcacgacttctatgtgcgtcccggccgtcacaacaacgagtattggggcaattcgatcgactaccagatcgtatttttccgcaacttcttctttcgggacaaatagttgggccgatgaaagagagctggaaacccggaacgctcatctatccgctgccggcggtgctggtgagctgcggcgcgacgcccggcgagtataacctgctgaccgtggcgtggacggggacggtctgcaccgatccgccgatgtgctacgtctcggtgcggcccgaacgccactcctacgggattatccgccgcaccggcgagttcgttatcaacctcacgacccgcggtctggcccgcgccgcagactggtgcggcgtgcgttcgggccgcgattacgacaaattccgcgaaatgggccttacgcccggcaaggcgctcaaggtcgccgcaccgatcgtcgaagagtctcccgtgagcatcgagtgtcgcgtgcggcaggtgcttgagctgggtacgcacgacatgtttctggccgaggtggtcgccgtgcaggtcgatgccgattatatcgaccctgccacgggccgtttctgcctcgaacgggcctgcccgatcgtctactcccacggcgaatatttcgcgctgggcgaagcgctcggccatttcggctggtcggtgcggaaaaagcctcggccgaaaacgtcgaaatccgtggccggaacaaagcccgtgaccggaacgaaatctctgaccggaaagaaacccgtggccggaacaaagctcgtggccaaaacgaaatctctgaccggaacgaagcctgcatccggtgtagaatctgcggaccggacttcctccgcatccgcaatgactccggcatccgcctcgtctgccgcggtatcgtccttggcttcctcgtcttcctccgcatcctcctccgcatcgtcagccggccccaactcaaatcccaacccaagccgcaactcaagccgcaatccgaaacgcaacccggatcgcaggcaggggcgaaagtcgggaaccgaaaaaccgcgccgccgatgaaggcgatgttgaaggagggcgccgggctttcgaacggtttgttatgcacgctggccgtcatcgccggcgtgtcggtcgccaatctgtactacaatcagccgctgctcaacatgctccggcaggatctgggcaccactacgctcgccgccaaccacgtcgccctcttttcgcagctgggttatgcgctggggctgctgttcatcatacccctcgccgatcttttcagccgcaggcgcatcgtactggtcaacttcctgctgctggccgtttcgctgctggcgatcgccacggcttccgatatccgtgtgattcacgggttttcgctggtgacgggcgtctgctcggtcattccgcagatctttattccgctggcggcgcagtattcgcgcccggaatataaaaaccgcaatgtcgggatcgtcctttcgggcctgctgaccggaatcctcgcttcgcgcgtggtcagcggcgttgtcggcgagcttttcggctggcgcgaaatgtatttcgccgccgccggactcatggtcgtttcggcggccgtcgtgctgtatgtactgcccgatgcgcgccccaacttccggggaacctatgccgccctgatgaagtcgctccttacgatcgtccggcgttatccgacgctgcggctctattccgtgcgcgccgcgctggctttcggctcctttttgtgtttctgggcgtcgctcgccttcaagatggcgcaggcgccgttttatgccggcagcaacgtcgtcggcatgctcggcctctgcggaatcgcgggcgctttgacggcgaccttcgccgggaagtacatccggcgcgtcggcgtgcgcaggttcaactatatcggcgtcggcctgcagatcctcgcatggctgctgttcttcttcggtgcggattcctatgcggcgctcgtcgccggaatcgtcgtcgtcgatatcggcatgcagtgcatccagctcagcaatcaggccactctgttcgaactcgatccctcggcttcgaaccggatcaacacgatttttatgagcacctacttcgcgggaggttcgctcggcacgctgctgtcgggagccgcatggtcgctttacggctggacgggagtcgtcgcggcgggaatcctgctttcgtccgcctcgctgctcgtcacgctctgcacgaaaaaatagcggtccgttccgtctgcgcgcgatgtctgcctgcggcggtctttcccggaaacagcgtgtcctttgaagatacggcaatccccgtaacccatgcaggttgcggggatttgtctgaagtccggggatgcttccttttgccgcttcccgcctgtccggcggaaagctttgccggtcgagacctgccggcaggctccggtctattcgaccacctcgatccattcgccctttttgagcgcgcggaccgagttgtcgtacatggcttcgcagtagatcgacggcaggtagtagcggcccttgtatgtcgccgtcagcttgaccggtatctccttgctttcgccccgtttcaggtcgaagtagctcagcacccggtcgtcgcggatgtcctgataggtgaccgacgtgaggtcccgctccgaagtgatctcccagcccgccggaacgatatgtgtcagcgccagattggtgtatttctcatagccgctgatgttcgagacggtcaccacggcgtagaaatccgtcgaagcgcggatcgacttggggtctacggccttgccgtccatgtccgtataccggacggcgatgcggatgttgtcggccgcctccgtctcttcgcccttggcggggttgtaacgctggctgacgacggcatacagactctccttgccgttgttcgtcaccccggtctcttcggtcagcggcatgctgacgaaggatttgtcggttcggatgctctctttgcccgctttggcgtcgatgccggtctggcccgacacgatgaagttggagagggtgctgagcatccacgccgtagactgcgtgctcagccacttctccttcttgaggatgtcggacatcttcagggccgtgcggaacgcctcttcccgcttgccgagcagcgtctgcgtcatgagcaccacggccatctggcgttcgctgctgttgtaggtgtcgtcgtacggatcgaccttgccggtctggccgcttccgccctgcgcggtcagctcttcggctaccttccggttgccgtccagcgcataggccgccgccagcatccatttgacgtcgttcttcaggtcggcggctttctccctcagccggttcatggcgccccggtcggccatgttgttgagcgccagaacgtactgggcgtaagcctgtgtcaggaagctgtccgcttcgttgccgcgcaggtatttgagcgcgcggtcgagcatcgggcggtcgatggcgtagccgtatttcgcggcttcggtcaggaagtgggccgcataggccgttccccactcggagctgttcgaacctccgctccagtaggcgaacgatccgttgtagagctggtaaccgcccagacgcgacaatacgctcttgacgttgcggtcgatgtcctgaagcgtccggacgtcgcactccatgacggcgggcaggtagagctgcgggaatgcgccggaggtgatctgctcgatgcagccgtgggggtacctcaccagatattccatgcggcgcgtgaggtctgcggacgggatcgacgagagttcgagcttcgcgtttccggtatccttcaggggcctgagggcgatcgttttgcccggctccagcatgtaatcctccgacgtcgttacataggggttgggttcgcgtacgtccagttcgatctccgagacggagctgtcgccggaggaggtcgccgtgacccgaacctttccgacgcccgtctccttgttgactttcagccggaacgttacgacctcctcgccgctttgactgagggcgatcgttttgctgcgcggtccgacggccgagaagagttcgtttgcggagactttcaggtcgatcttgccgactcccttttcgagggcgaaaaccgtcaccggcagctccacctcttcgtccgtggagaccacgcgcggcagggtggcctgcaccagcagcggttttttcacttcggcgaccttctccgcggcgccggaagcccgtccgttcgaagccacgaccatcacgcgcaccgacccgaaatagggcggcagcgcgattttgtgggtgttggttttgcctgcgcccagcttctgcgcttcgaggaaccgcacgacgggtttgaaccgctgcgccttcagtgcgccggtgttctgctgctgctccgcgtcgccgccgatggcgaacaactgttcgatcctgccgccgtaggcgccgatcacgtggtcgaacatgtcccacgtccgtacgcccagcgcctccgtggcgttgaaatggaggtaggggttcggcgtcttgaaacgcgtcagccccagcaggccctcgtccaccagcgccagcacatagctcatcttcttgccgtccttttcccggacctttatcgtgatctccgactccggtctgaccgtttcgggcatgtcgatcaccggatcgagcttcgtggcggcgtcttcgacgtcgaggcggaccacgccgaacaaccttatcggcgcgtcgttgtgcgtatggttatggggctggacgagcgtcaccgaggcgtagacgttgggagccattcccgctttgatcggtatctcgaacgcggtctgtttgtcggcgcagtcgatccagaaactttcccgtacgacgctgccgctctcgacgctcaccagcgcccgcgctcccggcgaagaggggatcgtgatcttcgccttgtcgcccggcgcatatttctccttgtccttggtcacggcgagtcgggtggctgcgtccgtcaccgaggagacgtcgccccgccagtcggaggacgatacgcaaacgacctgagtcgcagcgtgttcatggcccgaaccggtcacgcggatcatataatagccgtaatcgcctgcgctccagcgcatcgcgacctgccccgcgccgtcggtcagggtcgtctgcaatgtcttgtagcaggtgttgagcgcatttttcgcataacgggcctgcgagtccgacgcggcgtcccaccaccagtaggaggtgatcttgtagaccgagacgagcacctcttccctgccgggcaggggacgtccctgcgcatcgagcatgacgatgcgcagcagatgttcttttttgctgtcgaggtattcgtcgccccagtcgctcgtctggggcgtcactccgattccgaaataggcgtcgtagggcgacacggggatgatctgctgatcgacgctgaaatcgccgctcttttcgaagaccttcaccgtgaatttgccgctcagcatgccggggctgagcccctccagcgaagcgagtccgccggtcgtcagctgcagcgttccctgctggtccgtggtgccggagacgatctcccgctcctcggtttcgaaatatttcgtcgcgtcgtcgaacgagtacttctcataacccttgaaacgcgtcggaatctgcctgagctgcgcctgaagcgtcacttttgcgccgtccgccggagcgccgtgcagccatctggccgtcaggctgcccgtgaactttcgggcgtcgatccgcctgccgtcaccgagccgcatgtcgattttcatccggttgggcttgatggcgtccacgcggatcgctttttcgaataccgcgccgcccagacttacgcgcgccagccactgtccggtaggcgccgccggcgtcgttccgagtttgaacgtgtagatgccgtccgaggagccgttgctgaccagcgtctgcaccagctgcccgttggggttgaagaactccgcggacgccggatggttttccggcagcggattgttggacgtgacgatgaaagtgaggaaaatgtcgtctccgggccgccatacgccgcgctcgccgaacagaaaacccttcgtgcctttggggttggtggtgcccccgacgtcgaaattgctcagtgacagcgccgcgccccgctccaccttgacgaaggcgagctgtccgtcggcttcggccgctacgatggagggttcctccctgcatttcagcacggcgcggccttcggaatcggtggacgcttccgccaaggtctggttctgcttgtcgtaagcccgtaccttgcagcctcctttgggccgggctgacagcagatcggtggtgtagacgacgtactcctcttcgccgctgcttttgcagatgatgccgatgtcggactgcagaaccagtttcgaccgctcccggtaagtccggtaatctccgaaatagtagtcgtaatcatactcgtcggtgggaaccagcggttcgacgcccttgatctccagcaggtacatcgacttccggccgtcggttatcaggcggctgagatccagcgaataggtgttggagaggtcgagcttggtcgatgccttggccgagagatcgacggtcgtatcgcggacgatgcgcgacacgtagtccatatccgaatagtagtcgccgccgtagtagttctgctggaagaactgcagcaggttgttggcgaatattttccgcacgcggacccgcgccttgcggtagttcaccgattcgaacagcagggacatgtcgttcgacgagggcaggacggagcctttgcccgcgaagcggatcgccggcacccgcgacggcaggttggccgtgaacgtatagctctccctgagtcgctgcccgctcttgctgagcacgttccggcttatttcgatgtcgaaatttcccgtgacgtgcgattcgggatagatgtagagccggttcttgtcgaccgaggtgcggaatttcgtgtcgaagcggatcaggtccttcaggttctggctctgtttgagcggttcggagaaggtcaccaccaccgcgagcggttccgccgcgacgctgtggtccagcaccacatactcgtccttcttgggcacttcgacggtcagggtcttgctgtcgccgtagccgaaatcgagcgtcagcgtgtaacccgctccctcgccgggggcgatgttgccgacggtatactggtgcgtggtgccgttcgcggagtgcacccacgcgacgtccggattcttcagtccgcttatcttgaggttcttctccacgtagccgctctccgcgtaatcggacgagaccacctcgccgaccagtacgtaggaggtcatgtcgtcgctttgctgcagccagtagtcgctgtaggcgaaccgcagtttcggcgtggcgaattcgaattccgcgacgcctttgagctgccgtccggtgagtttcgcggcatcgatggtcaccttgtagcgggtgtcgtatttcaggggcgaccgggggatgatccgcagcatccgcattcccgaaaggtagacgtcgaaatcgacggagggcgagatcgatacggcctcccggattctgtcctccttcggctcgacgttctccttgaacgtcacgagaatcggcattttgacgcccgtcactccgttcggcgacgattcgatgatatcggacggctgcctgccgcatgaggcgaagagcaggagagccgttgcaaacaatacgtagcggattgctttcatagtggtttttttggtaactttgtcaaagatacataaaatatgactgaaaagctcaagcggaaaacaatatatttcctgctgctgccgctccttgccgcggctgcggcggggtattgtttctgcctgccccggacgcttttcgacgagcctttctccgcgaccgtctggagccgcgacggccgtctgatgtcggccaaggtcgcttccgacggacagtggcgctttttccccacggacagtgtgccttacaaattccgtgtcgctattactacttacgaggacaaacgtttctaccgccatttcggggtcgatccgctggcgctcggccgtgccgtgcggcagaacctcgcttcgggaagggtggccagcggcgccagcacgcttacgatgcagacgatccgcctgagccgcggccggaaagcgaggaccttccgggaaaagatcgtcgaggcggtgctggcgacccggctggaattcagatgcggcaaggaggagatactcgccctgtacgcctcccacgcccccttcggcggcaatgtgatcgggttggagagcgccgcatggtactatttcggccgcagcgccggcagcctctcgtggggcgagagcgccatgctcgccgtactgccgaattcgcccgcgctcatccatatcaggcgcaaccgggagcggttgcggcgcaagcgggacgacctgctggaacggatatggcgcggcgggcatatcgactccctgacgtgcgctctggcccggcaggaaccgctgcccgacgctcccgaaccgatgccgatgcaggcgatgcacctgctggggcggatgcgcgggggatcgctccgctcgacgctcgactatgacctgcagcgcagggtcaacgagctggcgctgcggcacaaccggcgcaacaggggcaataagataaacaacctcgccgtcgtggtgatggatgtgaagagcggcgaagtgctggcctatgtgggaaatgtctacgatcccgcggaccggagcgagggcaccagcgtcgatgtcgttcgggcgccccgcagcagcggaagcgtgctcaaacccctgctttacgccgcgatgctggacaacgggacggccctgcccacgatgctgtttccggacgttccgacttattacaaggactttacgccccagaacttcaaccacgacttcagcggtgcggtgcctgccaaccgggtgatcgaacgttcgctgaacgttccttcggtgaagatgctcgacaaatacgggcgcgagaattttctgtcgctggtgcggaatctgggattcggtacgattgacaggagcgccgaccattacggcctttcgctgattctgggcggcgccgagatcacgctctgggacctgacgtcggtctatgcgatgctggccgccaagctcggcggcgggccggtccgcatcccgcactgcgatccggaggccgtaaaggcggtcagcgcggacgacattccgctgtcgaggggtgcgatatggcttatgttcaattcgataagcaatgtggcccgtcctgaggaggagggcgagtggcagtatttctcctcgtcgaagaagatcggctggaagacgggcaccagctacggcaaccgcgatgcgtgggccgtcggggcgacgcccgactatgccgtcggcgtctgggtgggcaactgttcgggcgaaggccgtccgctgatgaccggggtggggtatgccgcgccgctgctcttcgacgtattcgggctgctgtccggcggggagtggttcgcggagcctcacggcgatctggaagcggccgtggtctgccggcagagcggctgtctggcttcgcacatatgtcccgaccgcgatacgctgatgattccccgcgcggctgccgccggcgaagtttgtccctaccaccggatcgtgaatctgagccgcgacctccgctaccgggtgaccgcggactgttacgacccggcgcagatcgtccggatgccgatgtttatcctgccgcccgcgcaggagtggtattacaggaagcagcatcccgactaccgtccgctgccgcctttgcatccgggactttcgggcagcggggcgggcggcaatccgatcgacatcgtctatccccagccggggcgcgtgctggtggcgcccaagtcgctcgaaggcgaggcgcagagtctggtcttcacggccatacaccgcgaccgcaacgccgtgttatactggcatatcgacgacaattatatcggcgcgacgaccctcgaacacaagatatccgtccgtcccgctcccggcgcgcaccggctgaccgttatcgacgaacacggggcgcggcaaagcgttgccttcagctgccgctgaccgccgcctgcggcttcttgcgggtgcggaggggctttccgctgggtgccgcgcagtgctttccgggggggctgtttcgggcctatgtggggccttcccgatgggttcggacttcggcgggctgccccggttgtcggctcgtggcatcctgagtcggcgtggcgtcgccgcgggaaggcagttcgccggcagtatcgccgcgacgggggattttgggccgggaagcataaaaataccacaataatctgcaaattttcccgaagatcggttgtcaaaaaaggcggaactttgagacgaattctaatcctaaaaactgcttgatatgaattggcgatcttttcccctgaatatgctgctggcggccgtggtgctgggaaccggtccggtctcgatttcggcggccgtgccccggacccgcgagagacatgcggcggtgcagccgcagcgttatcccgttccgctgaacgacgtgcgcattacgggcggtccgtttctgcatgcgcaggagatggaccgccgctggctcgatgcgatggaccccgaccgttacctttcgggattccgctccgaggcggggctcgaacccaaggcaccccgctacggcggctgggagagcgccggatgttcgggccacgggttcgggcattttctgtcggcggccgcgatgatgtacgccgcaaccggcgatcgggcgctgctcgataagatcaattattcgatcgacggccttgccgagtgtcaggagaaggagggcacaggactgctggccgggttcgaacgcagccgcgcgctcttcgccgagctggagcggggcgatatccgctcgcagggatttgatctcaacggcggctgggtgccgttctacaccctgcataaaatgtatgccgggctggtcgatgtctgccgttatacgcccaatgccaaggctttgaccgtgctggtgcgctttgcagactggctcgacggactggtggcgaagctttcggacgaacagatggaccggattctcgtctgcgaacacggcggaatcaccgaatcgctggccgacatctatattctgaccggggagcggaaatacttggagcttgcacgacgtttcgaccaccgcgagattctgcgtccgctggccgccggggtggattcgctgcccggcaagcatgccaacacgcagatacctaagatcgtcggcgccgtccgtgagtacgagtgttccggggatgagcgttaccggcgtatcgccgactatttctggcaccgcgtggtcggattccacagctatgcgatcggcggcaacagcgaatatgagcatttcggcgcgccgggcatgttggccaaccggctttcggacggcacctgcgagacctgcaatacctacaacatgctcaagctgaccaagcacctgtatcagctcgatcccaccgtaaaacgggccgattattacgagcgggcgctgtataaccagattctcgcatcgcagaatcccgacgacggaatggtatgctatatgtcgcccatggggtcgggacaccgcaaggggttctgcctgcctttcgattcgttctggtgctgtgtcggctccggtatggagaatcacgcccgttacggcgagttcatttactttaccgacgcgcgcgaaaacctgtatgtcaatctttatatcccttcgacgctcgactggaaatcgcgcggggtgaaggtcgaacagctcaccgactttccttgttcggacgaggtgcggctgcgcgtcgaaatgtccggggcggagcggttcgtgctgaatctgcgttaccccgaatgggcggacgagggttacgaactgacggtaaacggccggccggtgaaacagaaggccaagccgggaagctatatctccgtaaaccgcaagtggcgttcgggggacgaggtgcgcttcgtgctgcgccagtcgcttcactcggagccgattccgggcgactccacgctgcgggcttatttctacggtcccgtcgtgctcagctccgtgctcgaagacaaagaggagattcccgttatcgttgccgacgacgtgaccgatgtatcggcgttggtgaaatgcaccgacaagaagcggttgcgtttcgaaacgctgaccgcgcagcccgtgcagaaggagctgattccctattacgaagtgggcgggcgccgcatgatggtttatttccagcattttccggaggcgacgtgggaagaacaactcgccgacatgcgcctgcgggagcaccgcgaggagtggctgcgcgaacgcaccgtgtcgcagtttacacccggcgagatgcagcccgaacgcgaccacaatctccggggcgagaagaccgcgccccatgaattcgaaggccgcaaataccgcgagacgctcggcggctggttctcgttcgacatggccgtggcccccgacgtgcccaacacgctctactgtacctattggggcaaccgcttctacaaccactcgttcgacatcgagatcgacggccggaaggtcggtttcgagaacatccataactgggggccgcagtacgtcgagcgcagctaccggattccggcggagctgacggcaggcaaagagcaggtgaccgtgacgctgcgcgccatccgcgacgacgccgtggccgggccgctgtttgactgccggattatgaaatagaggaggctgaacgaaagaagccggggacaatcgttccccggcttctttatgtctgcaatccccgtcagcggatcacacggtatgcgggccgtgcgctgaccgtgcggcggcgcacggcggccgagttcaggtcgggctggtccaccgttcctttggtgtggacctcgacgatctccggctcggtcgtgattctgccgtcggcggagcatccgtaggcgaagacgatgtaggccgatgcggctttcaggcttacgacgttataagccgcgtcgcccgtgtagaagcagtcgtcgtccccgatcgtctgtcccgcttccagtccctgcatgcgccagtagaggtcgtagggcggatattgccgcggcgtggcgaaattgtcgcggtaggtgtcgcgctcgtcgatgaacgtgatgtagctcgtgtttttgtccgacgggatcaccttgatggcgaggtcctgttggtcgacggttacgtcgatggtgaaggtgcacgcttcggtcggcgtgaaggctttggtatggaaaagcttgcgcgagacgcggctgttcgagaattcgccgttctcgttgcagccgaacgccacggcgtaataatcggtgtcggattccagcgggtagatatcctccgagatatagagcggatcgcgccgcacgaatcccggcgaggagaatgcgaggtcgcccgttgcggtgaagtcgctccagagcaggatgccgtcgctcagctcgccgtaatagggccagaggtagcggtcgtcgatgtaggtttgtgcgaaatcggcgtcgtcataggccgtgtcgaaagtcgatttcttgacgaacgtgcagaagtagggcaggtcgtccgaaggatggacggcgcacttcgccccgtaccacgaaatgtcggagagggtcatcagataggccgtgttgatgatttcgggggctttggtgctgaagggaacccgcatgagcggcgtgacgatgtcgagcgtcttggccgtcaggtcgtattttacgccgaccaccgagaggtcgtagctctcgccgggcgtcaggccgctgtatctgtagtcggttttggtgcctttgaagaagtaatccacatattccggtccgtcggcgatgtcggctttgaaacgcttctggagctgggtgatacacgcctcgtcgctcttggccggatcgtagggatagacgtaataggacatttcgggatctttcggcgtgatggcggccctgacgcgggtgtccccgacttcggtgatttcgagcgtgaagttgtcgccttcggttacgcccgtgtaatccttgtcgatcttgaccttcatctttaccagcgagctgcggtcgctgtcgccgaagtagatgacggcgatttcgccttctgtttcgcagacggcctcttcggcgggggctttgatcgtaagcacctcgtcggcgtacgaaacgacccagccggtgggcttggtcagcacgacgtcgttcacgcccacgctttcggtctcataggttttggtctcgccgtaggcgtaggtgccaagcgccggggccattttgacgagcaggtagaaatccgaacgcatggctacggtgatcgtcgtgccgtccatgagcgtgaaataggcgtatgcgccgtcctgcgtcacctccttgaagaacgagtcgctcacgccgccctgacccagcgccgaaaccggctggtccttgtcgtcggtgatgtagttccacgtcgcgcccttgtcgcagctgatgatccagaatcccttgtcgtcgatcttcagcaggggcacgacggcggcggccgtgacggggatctttttgccgtcggccagcagccattcaggctctccccctcccgatgtcagggtccagtagtagatctcgtccgtatccttcgcaatgccgattacgggcgccgcggcgccgtcttttccgttcgtaatcgtgattttggtgttttcgggatcggtgaagtagatcgtgtaggagccgtcggcgttggtctcgaccttcgagacgtagaccttttcgttgagtttttcgatcagcgtctgcatggccgaaacgtcggagttgagtttgtcgacggcggtttcgagcgcttcgacgcgttttttgatgtcgttcacgctgttccacagctcggtgtcgtcgtagtcgctgcatgcggcggcgaacgtcagcaggagcgcgaggctccaaagggcgaattttttcatcatgattttgaggttaggataaataagtgacggccctgcattgtcggttgcagggacgggggaattgcatgaggggcgcggcaggaatttgcagccggagaccgcagccgccgttccgcgggcggacgggattcatcgatggacgggactttcggagttaggtgacttaacaaaggtagcaaaaaatccgtacattgtacgaatcggccgatttttgatcttttttacacccgatacttttgccggatctccggtggtattgacattacgcccggccgaatttcggccgggcgtaatgaatgttccgtgactttctgccgctcgtgtctggacggcggaaattgcagggacttattggttcctgaacaggctgcggccgttgcgtatcgtttcggcttcgccgttgcaggggatgatcgtgaaccggcaggcgtagtgtttctccagcagccggtactgatccgaaggccgggccttgagactccaagtgtccgtgccgccgacaccggtctgcgtacggtcgatattgacggtcagagcatcggccaaaggttcgacttcgttgctgtggcgcgccttgtccagactctcctgcgtgcaattccataccgatacgctcagcggttcggccccgacgaactgaacgccccggccgtcggaagctgtcagcgagagccagcggacgtcgcagcggttgccgttttcctgaggggtgatgtaactgtgcatgaacttttcgggcgtgctgcggtaaagtcccagaaaggcgccgtcgcagcggtccgaatagttttcctgcggaccttttccgaaataggcgattcgctccagcgtgttgggaacgcaggtttgcagtccgacgcgcagcggctccggcatccggtcggaaatgtcgagcttgtaatccacggccaaggcccctgcgccgtcgagggtataggtcagcgtcagccggacgctgtcgggtatcgccttctcgacggtgaccgaacccgccgattcgtcgattcgtacggagacggtctgcaatctttcgggggcctccttccagcatcctgcgattttcccgacgcgccagccgcgccagtcgttgtcggtggaggcgcgccagaagttggggcgcagcggggcgcttatcagtttgcgtccgcgcaccgagtgcgaggcgacgtacccgctgcggcggtcgatctcggtgcgggagccggcggcgctcaacacgatgaactcgtcatcctgcgcgacgcttgccctgcctttgggcgcactccggaccggctctttgtaaacgggcagtgcaaactgctcctcggcggctgcgtatccggcttcggcgtacggcgtacggcgcttttcgcgggcctgcacccggagcaggtattcggcgccgggttccggtttgaagggccggaatgcgatcgcggcttcggagcggcagccggcggcggtcggcggcacctcgaaactgccgtgctggagcacgcccttgtcggtcgagatttcccatgtgaagtcatagcgttcggtcccggcgaagaaattgcggttgcggactgcgatctttccggccgcaaggtccgaagccgtgaactcgacgggctggaagacatatttgcactccagtgcggcgggcttcagcgtacggtcgggattgacgatgccgttgcagcagaaagcggcgtcgttatgttctccggccggttcgaaatcgccgccgtaggcccagtaggtgcgtccctgcgcgtcttttttcaccagtccctgttccgcccagtcccagatgtgtccgcccagcagtccggcgtgtgtccggatgagtttccagtagtcgttcagtccgccggtggagttgcccatcgaatgggcgtattcgcacatcatcacggggcggtcgagcatcgggttgagggccatctgttcgagctgcgcggcggtcggatacatgcggctgaggacatcgacataggccgggtcggtggggttgccgccgtttcgcggcttcttgacctgcccggcggcgggcttgttgtccgccgccattacgctggtaaaggctgcggccgaagtccgtttcagcggaacgtaaagcgggtgcatcggctgtccctgcgctccttcgtaatggatcaggcgggtcgggtcgtaatctttggcccagcctgccgcagccgcgtgcgccgggccgcagccggattcgttgcccagcgaccacatgatgaccgacgggtggttgcggtcgcggatgaccatccggcttacgcgttcgagaaaaggcgtaatccattgcggatcgttcgagagcaggccgcctttgccgtgcgtttcgatgttggcttcatcgacgacataaaggccgtaacggtcgcagagttcgtagaaataggggtcgttggggtagtgcgacgtgcgtacggagttgatgttgagccgtttcataaggcggacgtcctcctccatcgattcgcgcgaaacggttttgccgccatattggtcatggtcgtgccggttcacgccgcagagctttaccggtacgccgttgacgagcatttcgcggccgcgcaggcggacgtcgcggaatccgaccttgcagctgcgggcttcggcgagttttccggcggcgtcgcggagagtcagcaccagcgtgtagagtgcgggattctcggcgctccacttttcgggtgcggcgatacgctcttccagcagggcgaaatagacgttgtcgcgctggggataggcttccgcaagaatctcttcgacgggcagcgtcagttcacgcccggaaggggttccgtcgggtgcgtaaagccgtgcgccgagctgccagcctgcggcggagaccccttcgcgcaaatctattgtcggacggatttgcagcagcgcgtcgcgcatgtcggcgtcgaagatcgttctgacgccgaaatcgccgatcgcggcatcgggcttggcggagaggaagacctcccggtgaatgcccgccatgcgccagtggtcggcgtcttcgaggtagcttccgtcggtccatttgaatacttggacggccagtttgttctctcccggctgtaaaagtccggtgatgtcgaattcgctgggcaggcagctgtcttccgcatatccggccaaggcgccgtttacccagacgtagaatccggaatagactcccccgaagtgcagggtcacacggttgccgctccacgcttccggcaccgaaaaggtgcggacgtaacagcccgtgggattgtcgcgcgtgatgtagggcggcttgaattcgaagggatagacgacgttggtatagatcgggtagccgtagccctgcatctcccagcacgaagggacgggtatttcgtcccagccggtcaggtcggctccggggcgccagaaatccgcggggcttcgggagacgtcttcggcgaaacggaatttccacacgccgtcgagcgattggatgcgcgacagcgtgcggtcgcccgcaagggcgtcctgttcggagctgtaagagtaggaggtggctcgtgcgggaagccttcgcagggcgttgacgaattggtcggccggagcgttccgttcggaagcggctgcggcggtgcagagggtcgttccgcagaggagaattgccagaagtcggttcatcggtgaggttttagaatacaaatttaataagttttcgcattgcgatgatcgccgtgccggtaataaacgctccgtttgagcggaatctgcatgccgccggtcgtttcgagccagtcgtagaggtcgttggccagcgagcggatcgtatcctgcagctccggacggtcgatcaggttcaccgtctcgtaggggtcttcctgcaggtcgaagaactcgttggtgtcccagatgccgtggtaacggatgtatttgtagcggtcggtgcgcactccgaaaacggtcggagtctggggaaacgcatattcccaatagtattcgtaatagatgcgcttgcgccagtcggctgccgtgccgcccttgagcagcggcaggaacgactcgccgcacatctgcggcgctttggcgagtccgcaggcggccatgatcgtgggggcgacgtcgatgttctgcaccatctcctccaccgtgcggcccgccggaatgagttcgggacagtaggccagcatcggcacgcgtacggagggttcgtagaagttgcgtttgtcgatcagtccgtgttcgccccacgtgaagccgttgtcgcccatatagatcaccagagtcgattcgcccagcccttcggcctgcagaaaatccagcagccgcccgatggcgtcgtccatgctggtcaccgtctcgcagtaattgcggaagtcctcctcgtacggcagtgcgccgtgatactggtaatcgacgccgtgccagctttcccgctggttctttacccagtcagggagccggctctcgccgtaccagccccgtcctgcgagcggcctgccgtccgcatccttgctgggcagtcgggggattccgtactccggcacgttgaacgacggcggatagaccgctttttcgtccttgtacatccctttccgggagggcgaaggctggaatccggagtgtaccgatttgtaggagaggtagatgaagaacggaccctcttcgttgtcgcgtacgaagtcgatggcgtggtcggtcagtatgtcggtggagtaaagttccggatcgaactttacgcgctcgccgttgatgttgagcaccgtgttgtagtaggtcccctgtccgcggaatccctcccaatggtcgaatccgggctggggcatgtcgtcctgattgcccatgtgccatttgccgaagaaggcggtgcggtatccgttctgctggaggtactgcgggaaaaagaccagatcgtcgggcttcggcgcctgattgtccacgacggtatgggtgtgcgtaaacagaccggtgaggatggaggcccggctcggcgaggagagcgacgtggtcacgaacgcatttttcaggcaggcgccttcgcgggccatgcggtcgagcgccggggtctgcagccacggaacggttcccgtgaaccccatgaagtcgtagcggtggtcgtcgctgaggatgaagatgacgttgcgcggtttttcgccgttgcgggcgaccgggaccggagcggccggtctggctgccgcctgcgaaatggcgagggctgcgaagcctgcgggcagcgtgattcgtttcaggtgcatcatagctttatgattgtggtttcaggattgagtgccatacattcgatgtgtcgcaggatctctgcggcatcttccggcgccgtaagcgtgacgctccggctttcgcccggcagcaggtcgaaatagttgtcggagaagattcccgccgtacccttgtaatgcagggtgagattcttcgccagtttgtcgctgctcaccgtaatccggcaggtcgctgcgtcgggcttctcggcgcggatgcggaccgccgcggccgggagtgcggcgtttttcatcgtctcgaaatactgcaaagcccggtacgcggtcttgtcggaccggaattcgcagaccagcaccgcgttgccggggtctgcaccgtcgagataatcgcgtacgccgtaccggagcgcacgctgcgatgcggcggctccgacggtcacggggtgggagctgcttttcagctcgttgcctgaaaaatccgtcagcgtgagtttcattactccccggagcggcttccgcaggtcggagacaacgaaaatgtcgagcgtatcgccttggatgtaaggggagacgacgaccggttcgcacgctttccttacaaagtagtgcatggctttccaccggccgtaatagtcgattcccgaccagctggcgcagggccatacgtcgttgagctgccagatgagcgaccccatgcagtagggcatgttgcgccggtgcgcctccatcgccgtcttcatcccttcggcctgcatcaactggctgaggtacagcgtgcgtgcgaaatcgccgtcgcgcaggtatgaccggtcgacatattccagcatccgggcgtctccctttttttggtcgccctgatgcgacttcatggccggggaggcgaggcggcgctccccttcggggatgaaacgctcgaccgaggagtgttcggggtaggattggagcccgtattccgaggtgaaacgggcgatttgggtattgtaggccgatatggggtcgcctttgtgccagacgtcccagttgtgtacgtcgccgtagcgccagcggtccgccgtatcgagtccccagcccggcgagggcgacgagtgccagtagggtacggtgccgccgcaaaggctgtccaccacaccgggcaggatattccggaagatggtttcgtttacgcggtcgaactgttcggcctcttcttccgtatagaatttgcggaaccggctgttgcgtttgtcgtggggtttccatgctacgtctatttcgttgttgccgcaccagaggacgagcgacgggtggttgcgcagccggcgtacgttgtcttcggcttcggcccggatgtcggcgtagatctgcgccgatccgggatacatgttgcaggcgaagacgaaatcctgccacaccatgatgccgtaccggtcgcacatttcgtagaaatcgtccgactcgtacgtgccgccgccccagacgcgcagcatgttcatattggcttgggcggcgctccgcacgagaaattccgttttctcccgcgaaatccggggtaaaaacgcgtcggccggcacatagttggagcctttgcagaataccgggatgccgttgatctcgaagccgaaaccgcggccgcggccgtccgcatcgtcgcggcagcggagcgatacggttcgtacgccgcatctgacggccgtgcggtcaagctccctcccctctttttccagcaccagctccacgtcgtagaggtaaggctcgcccattccgttgggataccacaaccgcggagagggaatctcgaacggctcttcgattgaatgcgtcccggcatccagcctcttgtctgccgtgaggatgctcttgccgttcaacagtatccggatgcggtagcagccggccgcatccgtccgtaatgcggccgatgcgttcatctgcgcctttcgcggcccagtcgagcgggtgcgcacgtggaaatcctccacacgggcttcgttccacgcttcgagcgcgaccggacgccacaatccggaggtgacatagcgcggcgccaagtcccagccgtactggtagcccgacttgcgggtgaaaacgcttaccttgttggggcccagtccgcccaatgcgccgaggtcgttgttggcggtgaggcggctgccgtaggccgccatgtttttgagtccctgcatgaccggggagtgaaaaacgacgtgcaggcggttgttccgggatttcagcaatcccttgacgtcgcttttccatgtgcggaacatgttgcccgtgcggtgaagcagttcgccgttcagcctgatgtcggcatagcagtccactccttcgaagacgagccgcacgttgtcgtacgacaccaattcgggtgcgtcgaacgtgcagcagtactcccagtcggtcttgtcgatccactgcagatcgctctggctgctgccgtagaacggatcggggatctgcccgtttgccagcaggtcggtatgcacggttccggggactgcggccgggagccattcgccgagtccgtattgccggaatttccatccttggttcagttcggtgcggccggcggccgaaatccggcttcccgccgcggcggtcagaagccataggatcaggagaagtcttttcatcgtttgtctggttgggttgtcgcaaacataactcaatcggccggaaatgatggtcagcgatccgtcaaaaaataacacaccgcccggcttcggcaattttccgacgctgaaaacgcgctttcggcttttctgttagttttggatgaatccgtgcttcgtgagctgcccggaatttcgtaatattgccgtcgggacaaaacgtatgcaggtatgaaaacaacacatctttcaggacttctgaccaccgcgggactggtgttcggcggcgggaattcgtatgcgcagcaacggccgaacatattatggcttacgatcgaagacacgagtccttatgatttcggctgttacggcaacaggcatgtcgccacgcccacgatcgacagtctggccggagccggcatccaatatatgcgggcccattcggtcggcacccaaagctcgccttcccggtcgtgcatcatcaccggatgctacgcctcgactttcggcatggagtggcaccgctgccggtttgccacgccggagactgtttttctgcccgactatatgcgtgcggcgggatattactgcaccaacaaatccaaaaccgactacaatacgctgtgtgacaataaggccatgtgggacagctgcggtccggcggcgacatacaacaacccggcgcggaagaaggaccagccgttttttgccgtattcaactcgatggccacccacatggggcgcatccgttcctatcataccgaccagcggcgggatttcgccctcgaagggcttgatccggcgcggctggaactgccgccgcacgtgcccgacattccggaaatccggtctgacttcgcgtttcatatggaggggtcgcaggacatcgacgcatgggtcgggatgtttctcgacgatctcaggcggcagcggctcgatgaaaatacgatcgtctttttcttcagcgaccacggaggatgcctgccccgcggcaaggggttcgtctatgagaccgggacccacgtgccgttcatcgtctacctgcctccgaaatggcggcatctggccaacggtcagtccggccggaccgaccggctgatcgggttccccgatctggcgcccaccgtactctcgctcgccggcatcgaacctccggcctatatgcagggcaaggcgtttctgggcgaatacgaagcggctccgaagcggtacgaattcgcggtcaaggccaatcaggccagccactattgccccgaacgggccgttaccgacggccgctacaagtacatcgtccgctatattccctacaaacacgatgcgctgatgaacgcttaccagtggggtatgccgggcaatatctgttgggacgaaacctatctgggcggccgctgccggagcgcggtatgtccgatgaccttcgaacggcactgcgcggagctatttttcgacctcgcggaagatccgtacgagatagacaaccgcatggacgatccggcctgcgcggaggagataaggcggttgaggagcgagatgagccgcttcctgcgggacaccggggatctgggattttttctcaaggcgcagcgcctgaccccgacgcccctctgcgagatattgcgggacgaaggctatgattacgaacgactgtaccggctggcggagcttacctcgaaagttactccggagtcgctgccttatctcacggagtgtctcgcatccccgcggaaggagattcgctactgggccgtggtgaatatcaaccagctcgccgcgacgggacagatcgcaaaggtgccggaggcgttcgccggactgctgggcacggatgatccggaaatcgccgcagaagccgcctacgccatgtgcctgacgggacgttcggaagaggcgatggcctacctgactgcggcgggaccgaacgggcggttggattcccacaaactgaccatgctggagtcgctgacgctcgcaccggatgccggcagctattttaccgaggatgtccgcagaaccgtccgcgccgtcgttgcggccgatccccggcaaaccgccgtcagcgagaccggcgagggcgaatattttatcgcggcccggaaaattctcgtcaacctgcgggaactgcctgccgccgcgttgtggggagagcatttctatgaagaaggggtggaggtcaatagaaacagacgcaagatggtccccactccgtttgtcaaccgataaaatccgatcgtgatgttgcgtttgctgatgcttgtttcgctgttgtgcggcgctcccgcttccggtttcgcggccgacagggagtgcggcggtcgggagcgtccggaccgcccggacggcctcgccgtctccgccgaatcgccgctgtttaccttcggggtcgttaccgacgtgcattattcgaatgtcaaagagacgtgggcggcccgccgttatgccgaatccggggagaagcttcgggaggccgtcgcggcgttcaaccgcgcacatgtcgatttcgtggtgtcgctgggcgatatgatcgacggcgatatcgggagctatgcggtgatccggccgattctggagggttccgcggcccctgtttacaaaatcttggggaaccacgattatctgggtccgtacggttccgaagagcagcggcgcgtgctggaggaactcggcatttccgaaccctatttctccgtggtgcggaacgggtatcggctgctgttcctcgacagcaacgatatttcggtctacgcccgtgcaaaggagtcgccggagtacgcagaggcggccgctcttctcgactcgctgaaaaggtccggcgcggcgaacgcccggcaatacaacggtgcggtcggaaaagcgcagcgggagtggatggtccgggagctggcccgcgccgagagccggggcgagcgcgtgatctgcttcgcccatatgcccctcatgccgccggacgggcagtttacgttgtggaataatgggcagatcgccgccctgctgcagcgatacccttgcgtccgggcgttccttgcaggccatcatcacaaagggggcgcccaccgtttcggctccgttctgcatttcatctttcagggcatgatcgagggaccggacaaccattatgcgatcgtcgaggtttatcccgacaagctcgtaatccgcggatacggcgctcagcgggacgaaaccctccgctggctgtaaacggccgccgggccgtatgatcgatacgcgcatatgaataaagggaggaaaccgtttcctcccttttgttttcggattgtcgcgttggccgcattacaggttcaggaccgtgctgagcggcaggtctgcactggaacctcccgcccgcagtacgaattcgcctcgctccagtttccagccgtgggattcggtatcccagaacgaaaaactgcggcggtccagctccagcgtcaccgttttgctctcgcccggttccagcgccacctttgcgaaggctttcaactccttttcgggccgttcgacgctgcttcgggtgtcggagacatagagctggacgatctccttgccggcccggccgccgccgttcctgacccgtaccgtcaccagaacccggccttcgcgctccatccggtcctcgcaggcgatgctctcgtaggtgaacgaggtgtacgacagtccgtagccgaaggggaagacatacggaatgcggtgcttgtcataccacctgtatccgatgaaaacgccttccgaatagggaacgtcgatcgtctcgccgggacggatgtgatcggaaaagcccttcaccgggtcctttttcaatccgagccagtagtttttgtactggttgttgccgtgccaatagggcttgcctccgatgtagttgaaccgcggtgcgggcgagtccgcaaagtcccgttcgacggtgaacggaagctttcccgaaaagttttcgcggccggagagcagcgccgccagtgccgtgccgcgctcctgtccgaggaaatagcaccagacgacgccccgtacgtctttcagccagtccatcggcatcacgttgcaggcgttgatcagcacgatgacgttcttgttgagtccggccgtctcgcgcagccgttcgagctggtctgcgggttcttcataggggatgtccaaaccttcgccggccggtttgttgagacggaaaagcaccacgtcggccttgcggaccgtctcccggtcgggatcggtctggcatatgagatcgtcgccgtaaacggcccgcaatccctgttcgtaacttacgtggtcgtaacccttcacgaatccgctgcccgttccgctgtgaatctcgtcggtgccggtcagcagaatgcgctgtcccggtttgagcggcaatatgttccgctggttcttgagcagcaccatggcttccgcggcgcaccgtgccgcaagggctttgtggccctcgaaacgggcgaacagcgacgggtcgttgaaatccctgtcgtaaactcccgtttcgaagagcgcgtacagcgtggggtagatcatccgctccagcagcgcctccacttcggccctgcgctccgcggaaccggcggtttcgcgcaggacgtattcccggaacgcggcgttttcgggcatgagcagcgtttcgcccgacgtgagcaccagatgctgcagctgcggatagtagcccgtattctgccagtcggtcatggccacccccttgaagccgtactcccggcggagtatgtcggcgatgagcggcttgttcatcgggcagggcaggccgttggtcaggttgttgcccgtcatgatgccgagacagccggcttcggcgatcatccgctcccacgggagcagatagacctcgcgcaaggtccgttcgtcgatgatgctgttggcgatgtggcggcagaagtcctgatcgttgcccagaaaatgtttgggcgtggcgatgatgccgttccgctgcagccccttgacataggccgcggccatgacggaggtgagcagggggtcttcgcccatatactcgaaattccgtccgccgaccgataatcgctggatattggcgccgggtcccagcagaatgtccacgccgagggcccggcattcgtcggccagactgtgcgacatctcggccgccagcgcgggattccatgtcgatgccagcggcagcatgccggggaaggaggtgcttttgtcttttaccagcgtcgtctgcaggcggatgccctgcgacgcgtcggccatcgagacggggcgcactcccagacggggtatgccggctatcatgaagcggttccagccgcccgtcagccgcagcttctcctcgaagttcatgcggcggatcagatctgcggcacgctcggaagccgggaacgacgggtcggcgtagacggcgccgcgcacgacggagtcggcttcggaaagcggtttgagcgtcgtgatgtcaacggccaccatgccgggggaataggcgctttcgcccttcttccggtccggtgcggagtggcccggaaggccgttcaggaggaataacaagataagggaggtgaataggcgtttcatctcttaatattcgggttaagtcgttaataatcgcggcggaacctacatcgctccgttcgcctgaccgaagttgaacagcggggagggaatgcgggccgtacgcatgatctcggcaatttcccgtacgatctccgggtgctcgtccgccacgttgcggtcttcgtggatatcggtcgaaaggtcgtacagctcgatgggaccctccggatctttgccgacgttcagccggatgcccttccagttgcctgtccggactgcggtcttgccgccgttttcgtggaattcccaataaagatattcgtgttcccgctgtcctttttcgccgaacagcgtcgggagcatcgaaatgccgtccacgtttgcgggaacctccgcgcctgccatgtcggcgaaggtgggaagcacgtcccagaatgccgatacgaagtccgtccgcgtcccttcggcgatcagaccgggacaccgggcgatcatcggcacgcggattcctccttcatacatgtcgcgcttgatgccgcgcagcgggccgtagctgccgaagaagtcgggatcggcgccgccttcacggtgcggtccgttgtcgctcgtgaagacgatgatcgtccgttcgcgcagaccgaggctgtcgatcagctccgtcacctcgcccacatatcggtccagacgcgtaaccatcgccgcgaacgacgtacgcggttcgggctgcgagcagtagtgtatcggatgcttcccttcgggcgagtagtcgccgctctttgccgcatagggcttctcttcgaaacggccccggtaggcttcgatgatctcgtcttcgggaaccagcagttcggcgtggggcagcgtgtatgcgaggaacgcgaagaatttccgttccttgttccggcggatgaagtcgagcgtccgctcctgaatgatgtcgtgggaatattgcgccgtatgggccagatcgttgccgtcgagcagtatcttttcccggttgtgccagaggtgtgtggggtaatatttatgggcgagcgcctgacagttgtaaccgaagaactcgtcgaacccctgataggtggggtcgccttccgatccgggggagccgagtccccatttgccgaaggttcccgttacatagcctgcctgccggaacatcttccccagcgtataggtgtcggccggaatggggtgctggccttccacaccgtcgtcgccggtgcctcctttgtttccgcgtatgggcgtatgacccgtatgctggcccgtcatcagtgccgagcgtgacggtgcgctcaccgtgcagcccgcgtaatgctgcgtgaacagcatcccctcggcggccagccggtctatgttgggggtgtggattttggtctggccgtagcagccgagatctccgtatccgaggtcgtcggccagaatatagatgacattcaggtctttgggccggttttcctgctgcgtgcagcccgacagggcgcccaccgaggctgcggtaaggatcagttggtttttcatgggttactctttgttatgttcgttgttgtgttgtttggcgtatactttcggcgtgacgccgaatacctcccggaagcacatcgagaagtaggagcggtggttgaatcccacctcgtacatggcgtcggttaccgatatgcctttgacgcgcaggagctgggcggccttcttgagcctgatttcccggatgaaggcattgacgttcagtccggtgatggcctttaccttgcggtagaagttgacatggcttacggccagcttgtcgcacaggaacggaatgttcaggtcgggatcggccatgttttcttcgatcagggccaccaccttgcggatgaacagctcgtcgggcgactgccgctcgaccgaggcgatatcgaccgtatcgcgccgcaggctgtcacgcaggcggcatcgctgggtgaggatgttgtccacccggcgcaggagcacccgcaggttgaacggtttgccgatatattcgtcggctccggcgtcgaaaccctcgatgatgtgttcctcggccgtacgcgccgtgagcaggatcaccgagatatggttcatcacgaaatcgtccttgatcctgcggcacaactccacgccgctcatgcccgtaagcatcacgtcggagatcaccagatcgggcatggtttcgttcacgatcttcagtccgctctccgcgtcttcgacggcgacgacccggtagtttttctccagttcggccttgaggtaggagcgcatgtcttcgttgtcttcgaccagcagcaccgtgaattcgtgcccggagtaggggcgcgcttcaggttcggccggaagctgctccgcagtttcctcggtctcggattcggccggatcgtaatcggcttcgtttacgatcggcagcgtcacgatgaaagtcgtgccctgcttgtcgcggctcatgacctcgatgtgtccgcggtgcagctcgacgaactccttgacgatcatcagcccgattcccgtgccgcgggtgccgagaccggtgtgctcctcgacctgatagaaacgttcgaatatgtgcgggaggtcgccgtcgggaatgccgatgcccgtgtcggccaccatcacctcgacgtcgccggtgtccttgcgccgcaggctgacgagcacctgcccctcttcgggggtgaatttgatggcgttggagatgaggttgacgaaaattttgtcgattttgtcggtgtcgaaatccattacgagccgctcttcgcccgattcgaacaacagggagatttgctttttctgggccagttcgctgaacgaccggcagattccccgcagggtcgtgacgatatcctccgatacggggttgagcttcattttctgattctcgaccttgcggaagtcgagtatctggttcacgagccgcagcaggcgcagggcgttctgcttgatgatttgcaggttgcccgccttctccgggtcggtctcggtgtcgagcagcgtttcgaccggactgataatcaggctcagcggcgtgcggaagtcatgcgatatgttggtgaagaaccgcagtttcagctgattgacgctttcgattttttcgcgttcgagcttctctttctggagctcgtcctcggcctgcctgcgcctgcgggtaatcgagttcaggtaataggccgctgtcgcgacggcaagggcataggccagataggcccaccatgcggcccaccacggaggcatgatcgtaatgtcgaagtccagtttgttcgaggcgggcaccccgtcgctgctcacggcctcgacccggagggtgtagtgtccgggggccagtttcgtatattcgacatagggcagcgtgcccgtcacggttttccagttttcgtcgtagccttcgagcttgtaggtgtagcgggtgagcgacggcgtggaatagtcgagcatggcgaagcagatcgacagtatgttctggttgtagggcagtttcagccgtttcagctcctgcacgggacagtcgcacagcccgtattgcgcgacggtgcggttgtcgatgcggatgtcggtgatgtagagcggcgcactgtccttcttggggctgacgtcggcccagttgagccgcaggtagcagtccagtccgaagacgagcacgttgttgccgtgggagaccgagaccgggaagatcgcgttgcgccggtcgaaccagtggttcagcgaaaacattttggagctttgcgacagaacgtcgtagcaggtcacgccctgctgcgtggtaaaccacaaaagccccgaatcgtcgctgttgatggtgtagaccgcttccgaagtttcacggcccgatatgcgccggaacgtgtcggatgcggcgtcgtaacggtccagccccttgtccgttcccacccacagctgacgggtgttgggatcgacgaacaggcagagaatcacgtcggagctgagcgtcgaggagtcgtccttggccgaaagataccttttgtgttcgcccgtttgcttgtcgtagcgcaccagaccgctgcccggcgtcccgtgccagacgtaattttcatccacgaccatcgattcgatcggctcgcccatgcgtaccagactgtccgttacggtaccgaactgccgggtcgaggcgtcgaaggcgtaatcgatgacctgcatccgtcccatcgcgtcgctgacgtacattttgcctgcggagtcctgcatcacggcatagatatacttgagacggttgcgcaggcgcgactggatcggcacctcccggttccgctgggtgtcgtagcagaccagtccctcggccgtcccgatccacagaatgtcgttgccgtcgatcgaaaggcctttgacgaagttgtaggtgccgaccaccgcgttcgaaaggttgatccactgcatccggttccgctccggctcgtagaccgacagcccgaaccgcgatccgagccacagacggcccgaacggtccatctgagcggcgaataccgagatgcccacgtacggattgccgtcggcttccgagaggtcgaagctggtgaacgagggcgcgcccgcatcgtagcaggcgatgcccccttcggtgcccagccagacgatgttgctccggtccttgaagatcgaccagacgatgttgttggggagcgaatggatgtttttcgggtcgtagccgtagcttgtgaaagcgcccttgtcgaagatcatcagcccctcttcgctgccgagccacacctcgctgccgaccacgcacatcgttttgaccgtgttgttcaccatctgcctgttccgcgccttttcgtgcagcgtatagcggagcgtggacttttcgagttcgcagaatcccgtctgcgtcccgatcaggagcacgtcgggatcggccggcgacaattgcatggagagaaccagattgttgagcggcagccggatgcggtccatcttgaggttgacgctggaccattggcccgtgcgcttgttcaggcggcttacgccgtcgaacgtaccgacgaacagatagtcgtcgtcggtatagatcgcccggacgatatcgtgcgcaagaccgctgttgcgggtgttgtaacaactgatgccgccggtcgtgcggtcgagccggaacagtccgacgctggttcccacccagagcagcgaatcctcctcggtcatcgtgcggatgttctgctcgttgatcgtccgcgccggggcgtagggcgtaagaatgtccttttcaggcacgtagatgttgattcccttttcggtcccgaccagcaggctcccgtcagcggacgaaagcaggcagttgacccgcgagtcgctcagcgactgcggattgtccgggaaatgctggtaatggcggatcgtcttgccgtcgtaacggtcgagaccgttctcggtgccgaaccacatgtatccggcgcggtcctgcgtaatggcgtagacatagttgctgctcagcccgtccaccacggagagcgtctccatgttcagcggccggctctggttgccgccgctggccggagcggcggccgtcagagacaggagcaaaagagatatccattttccagacatcggatttcaacggtttatttcatccagacgggcgcggcgtaggccgtcggcgcgtccgatgaagcggtgtaaactttcagatagtaatatttctgcccgcgtggcacccgcactttccagtcgacccggtgtgcggagaacgtttccgaagcgacgacgcggttgccttcgccgacgatttcgatgcgcacgatgcggtccgacgcatcggacgtatccggatcggacgcctcgatttcgaaggtcagctcgtcggccgaggtccggatttcggagcccatgacgtggttgttgacgtaatagagcagctgcaggtttttgtcgtaagtggcgtaggtgcgtcccgccgccatcgcttcgagcagggattcgcgcgtcagtttcttggccgcgacgcccgtgcggggctgccatgcggcgatgggcttggtggcgtggttgtcgcatcctgcgacgggcgatactttccagcctttggccagcgctgcgaggaacgattcgtggtaatcgtccgtgccgttgatcagctcgatgagcctgatatgcggacgggcctgctcgttgtagcaggcgaagccgccgtactgctcttttcccggatggttcatcgagacgaccgcgccggcgttcgccgcgtcggccagccaattgtggaaatagggcatgtcgattccttcggccagcgcgttgaggtagtccgatgaattgtatacgttctggtggcctttggggccgggtccgttgttttccgaatgttcgtatccccgtatggcaacgaacgaagcgtccgtggcggcgtcggcagcggcttttatatgctcccaagcctgcggcgtataggattcgtactgcgaatgatcggtcacgcagtagaaatcgtatccgttggctttggccagccggaaatggttctcgacgctgttttcgtcggtctggaccgcatctccggagtagcggcaatgggcgtgggtgtttcccatgaagagccggtaactctctttttccgcggggtcgggtccgttgccgcccggaggtctcttgccgggtgcgggcgcatcgtccccgcacccgcagcagaggcatacggcgcccagacagcctatccattttctcagtgacatgactgcggggcattagggttcgatccataccggcgcggcgtaagccacgggcgtttccggtttggaggcgttgtagaccagaacgaaataacacttttccccggcgggcacgaccggtttccaatgcacctcgtgggaatcgaagtcggcgccggccacgaccgtgccgctgccgctgacgacctcgatccgcgctatggcttggtcggcccggtccgtatccgggtcggagacttcgatgtcgaatttatatttccgggccgccctgatgtccgagcccatgatcttgccgttcacacggtagacgacgctcagatttttgtcgagcgtggcgaacgtgcggcgcgacgccatggcttcgagtacgcctgcgggggtcagctcggtgacgagcaggccggtccgggcgttccatttggcgatcccctcccagccgtggttgtcgcagcccgcgacgggggacaccttccagcctttggcgagggcgttcaggaacgacgggtagaatttcgcccggccgccgttgatcagttcgatcagtttcatgcggccgcgcgtctcttcgttgtagcagtggaaatcgttgtaggcgtccttctggggatggttgaagcagacgatggcatcggcctgttcgggtttggcgagccagttgtggaaatattcgacgctcacgccgtcggccatcgcgttgaggtagtccgacgaattgtagacgttcatgtggccccggccgtcgggcccgtcgttctccgagtgttcgtatccccggagtgcgacgaacgaggcgtcggtggcggcttcggccgcggtttttacggcggcccatgtgtcgggcgtatagaccggatactgcgagtggtcggttacgaagtaaaagtcgtaaccgttctctttggccagttcgtagtggctttcggccgagttcttcgggtcgagggacagccccttcttggcgcggaagacggcgatgtcgcccgaatagttgcagtgggcgtgcgtatttccgaagcagaccttgtattccggcgctttggccggcgcccggaaggcgactgccagcaggacgatcgagaaaaagacggtgtattttttcatggcggtagtttttgcaaattataaataaatgaacgtcagcgaaaagggagcgagcgatacgcttccggcctttgctttgcataccggcgcatgttcgagcgacatacggtcggccgacatgcggaactgctcgacttccacgcgcttcttgcgggctgcgagcctgcctccgacggccgcttcgaccgtaaaatcgtttttgttgagcaggcacaaagccatttttccggtggcggcatcccgtacggcgagactcggaatcttctccggcgcggggcttgccgtatattcgatcagttcatttccctgaaatgtaccgaaaattttcatgatttcactcgtcggctgcagctttcccgtctttttgtcgaaaaaactccggaatccgaactcgctgtcccagaacagcggccagaatgtagccatgtcgagacctccctgcatgaactgcatcatcatttcggcttggatgagtgcgctctgatcgggcgtgaggcggggacctgcggatttttttccgggaccgacgttccattcgagactggccagctggacatgcggcacgccgttgcgggccgcgatctcgcggaaccgttcgatttcgctggcatacgaatcgcccagaaatactccgcagggcgtttttgcgagccattcgttccatgacgccgtgccccacatgcagtaccagtggacgtcgatgatgtcgatattgcggcccgccacggcaaacagctcgtcgtactggcggccgtgtttgcggaacgtggcgtgccagttggcgatgattttgatgtcgggatcgaactccttcatgcgcgggacgaaagcgttgatcatctcgccgtatctggccggagtcaccgcaccgccgttgcagtcgtgcatgtaaggttcgttgcccatgaaccagtactttaccttaaagcctttgtcccggcagtatttcatcaggcgcagcgcctcctgcacgccctcttccacccggttccagcggaatcccgaattgacgttgatgcccagaagcggttcggctcccgtccggcgtacgagcgccatgtattcgtctatgtccataaactcctccggcggacgattccgggcggtgtcgtactgcggatcccatagatcctcccagccgttcccggtcgggtgctcccagtggaaataggtgtttaccgtaccgccggggtagcgcaggaagccggggcggacatcccgtatcgccttctccagcacgcccgaacgccacagcgagtcgggattcttggcgtagacgatattgaatcccagcagccggtcgctcacggtgcgctccgagattctgtcgagccggaccgttatccgggccgcgtcgccgacggccgcctcggccggagcctgcgcagtatgctgcgcagctccgggaaggaccgccgccatgccgaggacggtccctgccaaatagctaaataacagattcttattcatgtctttttactcttcgagaccccagcccggattttgttccagcagcgggcttttgttcatctccttttcctgaatggggaacaggtaaaacttgtctttccatgtcttggttatcagcggctccacggagaaggagaacttgtcgcccgatttggtgatgatctgtttgtagatcgtgacgggcgaacgcattttccagcggttcaggtcgaagaaacgctgctcctcctgaaagaattcgatccagcgctcatggacgatgcgcttgcgcatttcggtctggccgagtcctgcgggcagcggcgagatgcttttgcctgctgccgctttgggcatgcccgcgggccatttgaagtcctgcatgttgtaattcgggaacttcgcgcgttcgcgcaccagattgaccgcctcgcgcgccgacatgggatatccggccggcaccgcgtcgggatcgccgaaggcttcgtttaccgcttcggcataattgagcaggatttcggcgtagcggaagatgatgaagttgtgatttaccttcagcatcgtgccgtacccggtgaggtttgcccatgcgtcgaggaacttgcggttgaagaagcccgtgcagtagaagcccttggatgtggcgtcgtgggtgccgccgacatacgattcgaatttgggtgtattggcggccgtcgtgccccgcgccggccacggttcgccgttgtaccagaccgactggtagaaacgcgggtcgcggttgacatagggattctggggatcgaagccgctttcgggatcggttccgttggtctcgtggagtttgagcagcttgtcgagaccgagcaggtgggtcgaaaccacgttgccttggtcgtcgagtttgacgacctcgtactcggctacggtgttcagcgtcgggaagttgttcagcacgccgaacgcgtagttgaacagctggccggggaggcagttgcgttcgagccggacggcgaactggtcctgctggtaggccagaatgatttcggggctgtagcggcgcagaaacagatcctcgtaatcgccgtaacgctccggatcggtgcttcggtgcagggcgtagccgcgggtgttttcgaggaaatatttggccgcctcggctgcggttttccacttttcggcgctgtattcaccccggcaggcgctgccggaggggttctgccggtcgttgaacagcgggctggccgccagcaggcgtacgcgggaaatcagtgcgtagcaggcgcccttggtggcgcgtccccattccgagtcggcgtattcgtccacatggggcaggtcgccggccgccagcatcgcctcggagcagatgaactccaccacctcgtcgaatccggcgcgtgctccgtgcagttctgccgcgtcgtcgggaccgagcacccgtgtgacgatgggcacgccgccgtagaatttcagcagttcgtagtagaacagcgcgcgcaggaagcgggcttcacccttcattcgcgtgcgtacgccctcgtcgatgaacggttccggcgagtcggggatttcgtcggcatgttccagaaaacggcatgccgcacggatcgccgtatagtattttttccacggatcgtagttgagcagcatgtcggtcgtcgcccacgctccgacgctcatcttgtaggcgttgtcccagttggccttccagatgccttcgtcgacggcgttgccgaggaaaccgcccgaatcgtcgcttccgaaaaccatgaagccgtcgttcatgctcttgtagatattgctcagaaaccatgtggcgttgtagggatcgctgaagaccatgttttcgtagatgtcgttcgactcctccttgtccagcaggctcgaactgtcctcgcagcccacgacacccgacaggagcgccagtgcgcatattataccgtatttgtttactttcatagccattgcgggtgtagattaaaagttaatgttgataccgaaattccacatcttcatctgcgggtagaagtaacccgtttcatcgcccatctccgggtcgaagttcttgatctcggagaaggtcagcaggttgttgccgcccacgtagatgcgtatggaattcagcccgatgaaccggagctgccgcttgttgaacgtgtagccgatctcgatgctcttgagacggagataatcgccttttttgaggtagaatgtattggtgcactggttatgtttgttcgtggcgctcgacagacgcgggtatttgatcgtctcgccgttctgccagcgctcctcggtccagcggtagaggtggatgtcttggaagcggttgcgttcgcgcaccggttcgtagagcgacttggtcatcagtttgctgttgccgccggcgccctgccacatcatgctgaaatcgaaattgcggaagttcaggccgaacgtgaagttgtagacgaaacgcggtattttggaccgtccgatgggaccttcgtcgaacgtgtcgatcacgccgtcgtcgttgcggtcccagtacatgaagtcgcccggctgtacggggtactggggctgcggcaggtcgggattcagcacgcgcacgccgtcgattgtggtgaagtcgtcgggcaggtagtagcgcaggaccgtgtgtccgaaatactggccgatcggcttgccggtctgacgcaggtattcgtatttgggttcgacttcgtccttgtagagaaccttgtttttcgaataggagaacatgcccgaaacgaaccagctgaaattccggttcacgacgtcgcggtagccggcctcgatttcgaaaccttcgttgcggaccttgccgaggttctccttggccgttccgacgccgagtatctggggcgtcgtgttgcgcgagatgaagatcttttcgcggtcttcgcggaagatgtcggcgttcagcgtcagtttgtcgaagaaggtcaggtcgatgccgatattggtttttttgccgatttcccatgtgacgttcgtgttgccgagcgcaccttcggacagtgcaggcattccgccgaaaccgttgtccttgccgaagaagtaattgccgttcttgtcgtaggtctgcagatacaggaagcggtccgaaccgatcttgtcgttgccgacctcgccgtaagaggcgcgcagcttcatgaaggtgatgaagggcagcgaccgctgcatgaagccttcgttggagaggacgtaaccgagggcgaacgaggggaagaagtcgtagcggtgtccttcgtcgaactggtcggagccgttgtaacccagattcacctcggcgaggtacttgcttttataggcgtaggtcgcacgggccgcataccccagaaaggcccgcggaagcacggcgttggtattctccttggtctgcgtgtataccgccatcgccgttacggcatggtcgccgaaggtccggttgtagttgattcccacctcgatattggtccggcggcggtgtcccttgcccgacagcgagcttatcgagggtgcggtttcctccttggcgattactttctccgtgtcgctgacatacctgtacgtaggcggacggtagctgaccttggtgccgtcgtcgtagtagctgttgaagcttaccatgccgcggacggagagacctttggtcacgaagtccagtttctggtgcagcttgaccgtgccttccagaatgttggaggcgagccgcgaatagccccagtcgctgagcatggccatcaggttttccgcttcgttatccgtgctggcgccgtaagaaccgtcgggaagccggtaagggtaggacatcgggggcgtttcgtacatcatcgagaagatcgaattgtcgttcaggccctgactgttgttctgcttctggtcgagacgtccgttgaggtcgagactcagttcggtggtcttcgtcagcgaaaagtcgaggttcgcacggaggttgatgcgtttgaaattggcgttcgaagggtatttgccgtcgaactgccggtagatgccttcctgcgagagtccgctcagcgccacgtaataacgcacgttgtccgtgccgccgcggacattgacgttgagtttgtgcatcggcgtcgttttgcgcaggaaatcctttacgtagtcgttgtcggggtgggtgtagggcgaatcgcccagccggtagtgttcgatatcctcttcggtgaacgccgggcgagcaccgtcgttggcgagcgattcgttgcgcagcacggcgtggtcgtacgatccgaggaaggtcgggagacgggtcggctgctggagcgtgaacgtatagttcatgttgaacttcggcgcgcctttcgaaccgcgtttggtcgtgatcaggatcacgccgttggcgccgcgcacgccgtataccgccgtcgccgaagcgtccttcagcacggagagctgcgcgacatcctccggatcgacctgcgagtagtcgcgttcgacgccgtccaccagcaccagcggagccgagtcgccgctcatcgtggcgacgccgcgcacatagatttcggcgtcgtcgctgcccggacggcccgaaggcacggtaaacgtcacgccggccactttgccggccagcgccgtactcaggttggggcttcccatctgcttgaggtcttcggaggtggccgaggagatggctcccaccacgctttgttttttctgtacgccgtaacctacgaccacgacctcctccacattggtcgcggagggttccatcgcaatggtcatcggttttgccgtgacttcgagaatccgggtgatataaccgatataggaggtctggatcgtgcttcgcacgttcttcaccttcatcgagaaccgcccttgggggtcggtgaccgtgccgttggcgacgttgtccgtctcgacgacgctcacacccaccatcggtctgttcagctcgtccacgaccgtacccgacaccgcgaccgtctgggcgcggagcgcgccgagcgaaatcaaaatcgttgcaaataaagctattatctttttcatgggttttatctcttagaatttaccataacgggttgttgcctctgatggcggagttgttcaccacgtcgccgttaggaatcggatagaggtagaacttgggagagaactgccggctgttcacattttccacgatctggtaggagaacgtgtcgccgttcttggtgatctgcatgccccggatgctttcgctcagcacttcgtcggctattttccagcgtttcacgtcgtaatagcggtggtcttcgaaggccagctcgatccggcgctcccggcggatggccgcgcgcatcgcgtcgctgtccccttcggcggcatccacatcgctctgcgaggggcggagtacgcggctgcgcaccgctttcagtgcgtcgcgcgccgtcaggccgcatcccagcggatcgacgtcgggaccgtaagcctcgttgacggcttcggcgtagtcgagcagcaactccgcatagcggaacagcgggaaacagtggttggtgtttgtgggcgttcccgaaatgaccacctcgctgccgcagaatttggacatgtaataccccgtccgggtcgaagtgttggtgttgttgtgcgctccgccccgaaaggtctcgatcgtcgtgccgttccagttctgcccgttgtagaagatgctggcatagaaacgcggatcgcggttttcatacggattcttccggtcgtagggactttccggatcgtcgatcggctgtccggtcaccgttccgtaggcatcgaccatctgctgcgaaggactggtcagacccttgccgttggggatgccgaccgggaaattctggatttcgacgcggttgccgactttcgacgtgcggggcaggatcagctctttgttgcccgtgatcaccgtgaaaagcttccggtagttggccgatccgctggcgatcacctgctcgtccctgtccgtctccgcgacggggttgggtttgtagatgtcgtaatcgcccagtctgatcacttcggctgcggccgcggcggcggactcccagcgtttcttgtcgtaggagccgtaacagatgaattcgttgtcgctgccgtcgtagcccttgccgttatagagcgggctggcggcataaagcagcaggcgggccttgagggcgagtgcggcgcctttcgaagcgcggccgaaattgacgttgttcggcgccggcaggtccgtatacgattcgtcgcacagccctgcgatgtaatccacgcaggcggcgaacgacgagcggggcacgttcaggtcgtccgaaagctcgtacgcccggtcgatgagcggtacgccgccgtaacgcttgaccagctcgaaatagaaaaacgccttcaggaatttcagctccgcctgaagctgaagcttcagatcgtggttggcttcgggcagtttttcgagtccgacgatgccgatattggcgtcgcggatgaatttgtagttattctcccagcagccgtcgggattgcttttccggggcgtgagcgagccgtcggtcagaaagacgatcgacgagcccggcacggttatcatggcttcgtccgaggccgaggcgagcatggccccgtctacgcggttgtagccgttctcgtcggatttgtcgaacgggagtcccagatagacgccgagtacgtatccttcggccttcttgtcgttcgagaatacaaagtcggaatcatatttgtcgaacggcatatcttcgaagtcgcaggagacagccgccgcaccgaggaaaagaagcgagatgtatttgagaatgtttttcatggctcggcaggtttaaaatgatatgttgagacccatgcagaccgtccgctgcaaaggatagacggtccccgtcgtggtcgtttccggatcgagaatgtcgatcttgtcggaggtgaagaggttcgtcgcggagacataaatgcgcaggttcttcagccagatggcctttgcggcgcgggcgggcagcgtatagcccagttcgacgcttttcagacgcaggtaggaggcgtcgcggagccagtagtcggagttcggaccccggttgttgccgtcgttgcccgtcaggctgagacgggggtacttggccgtcaggcgggtgtcgatgccgttggcgggatcgtaggcccagcggtcgagatggtgttccatcacattgcccttgccgtcgggacggaattcccagtagacgtatccgccgagttttctctgtacgttgcccacgccctgaaaagcgacgttcagatcgaagccgcggtagttcaggtcgatgccgaatccgtatacgtattcggggacgtcgccgtaaccgaggtaggtgcggtcgtcttcgttgatatagccgtctttgctcaggtccagatagcggatgtcgccgggattgtaggtgccgtaggtctgcgtcgcatgggcggcgatctggtcgtagtcgaagaagagtccgtcggatttcaggccgaacgaagagttgatcgggtagcccgtctttttgttgaaccggtaggtggcgtcggtctcctgcatctctttcacgcggttgcgggcgaaactgaagttaccgtaaaccgagtagcccagcctgccgatgcgcgacgtgtagtcggtggcgatctcgaagccgctgttggtcatgcggcctatgttgttcttgaccgaaccgcggactccgatgatattgggaatgctcgcctgtgcgatgatcaggttgtcgttgttttcgtagaaaccgtcgactgacagggaccatctgtctttgaacatgcgtatgtccactccgacgttggtcttgtgcgaacgttcggccatgatgttgtccacgccgacctgcgattcccggaagccctgcatcgaggcgagcgactgcccctgaaggtaggtgctgccgagcgagctgaagaacgaacttttctggaaatagctgatgttggtgtcgttgcccgaaactccgtaggaggccctcagcttgaggaagctgatgaaagtcttgtccttcaggaagttctcttccgaaatgatccagcctgcggagaccgaggggaagacgttgtagccgtttccgccgatctgctcgctgccctgacaggctatggtgaagtcggcgatgtagcggcgcttgaaatcgtagtgggcgtaggcgaacagtcccttatagacgtggggcatgatcttgccgttgccggattcgttgttgtagttgatgaatatccgccctgagagattgtgattgccgaacgaacgggtgtagtcgagtcccgcctgcaggtccagcgtgcggtagttgttcgaaaagctgttgtcgtttttctgcgtggcggggtttttcgttccctgctggttgctgagactgccttcgtagaccacgaacccgacgttgcggttgatgacctgctcgaaatagctgtcgaatgagaacgagccgaaaaccgagagcccttgggtgatgaagtccagatcgtggtcgagtttcagcgtggcgtagttggagcgggtctggaagatcgaatatccgctgttgttgagcaatccgtaagggttgttgaggtactgggaggtgccgctgagcgatccgtcctcgttgaagatcgggtgggcgttgggcggagtctgcgtcaatgcgttcagaatgcgggacgtgctgttcgaataggcgcccggataattccacttggccatcagcgacgcgatgtcgaggctgatgacgaacttcttggtgacgtttatatcgacgttgccccggagcgaataattctcgtagttggcgttggtcttataggtgttggcgttcttgtccacgttgtagagacccgaattgtccacgtatcctacggaggcgtagtagcgcacgcgctccgtgccgccccgcacgcttacgttgtaacgctgcacgacggaggattttttcatgaatctgtccatccagtctacgtcgggatagttgtaggggtcgtcgccgctgaggtaggagtcgagcgcatactggtcgtatttgggcgatccgccgtcgttgaccgcagcttcgttgtagagacgtgcgtagtcatacgatccgaggtatttcggcaggcgcgtcggagcctgaaaacctaccccggcgtcgatgctcaccgtcaggggctgtatgcggccgtgcttggtcgtgatcagcaccacgccgttcgctccccgcaggccgtagagggcggtcgccgcggcgtctttgaggatcgtaaccgattcgatgtcggccggggagatgcggttggcgtccttgcgcacgtaaccgtccaccagaatggcggcctgccgggagtcggacgagatgctccggagtccccggatatacatcgaattggattcgatgcccagctctccgtcgtgctggatgcccagaaatccggtcacccgcccgttgagcaggttggtccggtttattccgggcagatattccagttgccagcccccgacggaagagacggcggccgtggtcagatccttgtcggacgcatggtagggcgacaccatgacggtgttcgcttttaccgcgagcgagtcgggcacggcggcagccgcttcctgcggagcatacatcggagacagactcgccagaagcagactgacgcatgtcaaatctttgagtcgagatactctcataagaaaagtttttgggttaatatttgggttttcgttggttcgggctgcggtttgttccatacggagcgaaccgttcacaaaattcgtcaattcgatcgttagaaaaggctattttttcttcaaaaattaacacgcgggcgaaaaaactgcggagcgggctgcgcggcgggtcggatgcgggagcggcgtggtgtgcgctgtacggccgaagacggggaacgccccggttgcggctgcgctattttttggcgaatttctgctattccgctcgattcggattcaatatatttgtaaacacggaatcagcacggaaaaacaacctaaaacgatactttatgaccagaacgattacccttattttattgctgggacttttgtcctgctgctcgtcgggcaaagacgacgacgcccggaaaggcggcgggagcaaacccgatcccgatgccgtgggtctgacgctttcgcagcagagcaagacgattccggaaaatatcttcgggtacaacacccagtccatcaaaggtccgggatgggacaaggcggagttcatcagccggattgcggagcttaatccgggcaatttccgctatccgggaggaactgtcggcaatttctgggactggcgtacgggctattacaacgagatcggaaaagaggtgaacgtgatcgccccgtcgccggctggaccgcttccctacaagctggaacacgttaaaatggtgtacgaccgcacgggcgcggctcccgtctttctgataaacatgctcacctccacttacgaggagcagctggcgatgctcaaatacgcccggtcgatcggtctgccggtggagtatatcgagatgggcaacgagtattatctggacgaccatcctgaaaaatacaactacctgacgaaatttcctgagacgaccgattatacggacctgtgccgtgtgtggaccgccggattccggaaggagttccccgaagcccggattgcgctgatcggcgtcaatacgcctgcttcatggaccaaacgtccccgcgcgcgggagtggaatacggttgtgatgagcaacatgcagggaatcgaatgcgatgccgtgaccatccatatctatccgaagaatgcgttggcctcgccgaccccttacgacatgatcgggcagacgctcgccgctgtcgctcaggggaaggtgctcgacgcctcgatcgactccaaatacaaactttgggttaccgaatacaatttcgaatccggctccaatccgtttcccggccagtgggtgcacgggctggccgcaacgctcatgagcgcgcagctgatcgccacgccccgcgtggagctgatctgcttcttcaatctgacggccggcaaaagtgcgtccgcgattttcgacgcagacgtttcgatcgccggtgcgactgcgcccaaatatgcgctgagtgcgacgggcgaaggtttgaaaatgctttccaaggcgcagcggggtgccgtcacggtcaaaacggtccgcttctccgataatccgcagctcgacacgcagaaacacggaaagatcaattcgctttacggctatctgttcggcggcgatgtttcgcggcttctgctcctgaatctcggccccgaagcgaagaccgtagcgacggacggactcggattcgcagccgcttcgttcgaacagatttcggccggttcgcccgaaacccccgtgacgggtccttcgtcgctggcgcggctttcccgcaaggtggacgcctcgaagcaggtcgtgctgagaccctattccattaccgtaatccagtaaaacccatcaatcctatattaatctaatacaacccgaacagatgaaaacaggtatgaaacaaatcctctcggcgctcgtctttctatcggctctgacaggatgcaagatcgaggatcccgatttcttcgtgccggaggtggcttttgccgccgccgaaaaggaagtggtgttcgaacctgccggaggcaccgagtcgttctccgtcgaagccaactgcgactggtccgtctcctgcccggccgagtgggtgaccctttccgtggaagccggcgaccggaacggtacggtggagattgccgtcaaacccacgaaactgccgcgcaacaccaccataaccctctattcgaacgaagtcgagtcccgtacgtcggttatcgccgtcgtccagaaaggagtcgtggagatcagctccgtatcggcgccggtcgcttcgaacgtcgtttccgcatcgggaacgaccgcaacgctgagtgcgacatacagcggtatttccatctccgaaagcgatgcgataacggcaggattcgtcctgacgccccgatccggaggcgcggcggtcgaagcgccggctgccgtcgaccgtgccgccgaaaccttccgtgccgatcttacggggcttaccaaaaacgagacttacgactgcgtggcatgggcccgactcaacgacgatccgaaagtgagcggagagtcgtcggcctttactccgattctgctgccgaccgaactgaaatcggtgggcgagacggttgtctccgggctgaagtccgagacgggcacgaccgcaacgctcgaaagcagttacgtggctgtttcgctgggcagcggggatgtcgttaccgctggtttcacgctgacgcccaaggacggttcgccgttcgaggtcgcggcggtcgtcgatgccggcagcagctcgttcaaggccgaggcggcggggctggtcgccaatacggactacacctgcgtggcttgggcctgcctcaacggaggtgcgcgcgtcgaagggcttccgacgaccttctgtccgaccgtgtccgaacccgtgacgatcgtagccgatttttcgagcaacgcgttatgggggctgcccgaaagcaattcggccatggaacagaaagaagtgtccgtcacggacaacgacggatatacgtggaagattttcggcggctgcattaacggcggctgtctgtggctggcctgccagagcaaatcgaaattctgcgggtacgtcatactgccgcagctggacggcttgaccgtcaagtcgatcagcttcccgaacgacggtccgagtccgtcgggcaaggcccgcatcacgatctccgtaagcgaagacggcggaagcagtttcactccgctgcccggctgtacgcaggtggcgtgcggaaccttccagctctcggaccagaagcccggaagcatctacaaggtcgagaatgtggatgccggtggaaccaacggtttctcgaaaaccgtcaaactgacgattcaggccgaataatcggcctgcggccgatggcaagggagagcgcgaagttctcctttgccgtttatgccgcaccggagacgaagcggcatttttcccggatgccggaagctctctctgaacggaaattgctatctttacggacgcgaaaagatcttctgtcatgaaaacctttctcttgaccgtggctgcctgcggtcttctgctgaccggtacggccaaggagcctctttaccgggactcctccgcaccgctcgccgaacgggtggacgacctgctctcgcggatgaccctccgtgaaaagctgggacagctctcccagccgctctaccggtcggacgacacgacgctcgacgcacgcataacccgcggcgaggtcgggtcgctggtcgtggctcacggctctgcgctcgcccctgcggagcgcgaccggctgcagcgtattgccgtggagcgaagccggctcggaatccccgttcttttcggattcgatgtcatccacggttaccgcaccctcttccccattccgctgggcattgcggcgtcgtggaatccggagcttgccgaagcgtcggcccggatcgcggcgtcggaagcgtcggcctgcggcatcgacctcacgttcagtccgatggtggacgtcgcacgcgatccgcgctgggggcgtatctccgaaggttcgggggaggacgtgctgctcaatgccgttttcggtgcggctctcgtccgcggctatcagggcgacgatccctcgaagcagggccggatcggggcctgtgtcaagcatttcgtcggctacggcgccgcattgggcggccgggactatcagtttaccgagctgtcggagcgcgctttgcgcgaaacctatctgccgcctttcaaggcatgtgtcgatgccggtgcggtaagtgtcatgtcggccttcaacgatatctccggcacgccggcctcggccaatgcgctgacgctggaccggattctcagaaaagagtggggattcgacggcttcgtgctcagcgactggaacgccgtgaccgaattgcaggagcacggcatagcggccgacggcgccgaggcggccgtcaaggcgctgactgccggcgtggatatggagatgacgtcggacctctacctgacgaccctcgaacagtccgtccgtgaaaaacgcttgcccgcagcgcttgtcgatcgggccgtgcgggctgtcctgcgggtcaaattccggctggggctgttcgaccgtcctttccgcagccaccccgaaccggaccggatgctgctgacgcccgaagcccgccgtacggcccgtcagctggcggcggagagcatggtgctgctgaaaaatgacggtgtactccccctttcgcccgatctgcggagcatcacggtgaccggagagtgggccgtgagccgcgatctctacggctggtgggtcggcatgggagacggctgggatgccgtaaccgtctgggacggcatccgcagtcaggccggcgggaggaccgacgtgcgtctgatgtcgcagtcccgcagccgcaggagcgatgtcgcggtggtatgtgtcggcgaaaacggctatctgttcggcgaaaacaacaaccggagcgacatccggctgccgtacgggcaggagcagctgatccgcgagctgaaagaacagggcaacaaagtcgtcgtcgtggtcttcaacggacggcctctcgacctgagcgccgtcgtgccttatgccgacgcgctgctgatcgcatggcatccgggaaccgaagcgggcaatgccgttgccgacctgctcttcggtaagcgctccccttcgggcaaactccccgtctcgtttcccaaatcggtcggccagctgccccttttctacagcgaccgcaccagcggacggcccggcaacgaccgctacgtctccatggacggccaaccgctctttcctttcggttacggactcggttacacgacattcgaatattccgaattgcggctttcgaaatccgtcgccgcacccggcgagcaggtcgcggcggagatcaccgttaccaataccggtggcatgaaggccaaggagacggtgcagttgtatctgcacgacaaagccgcctcgttcacccgcccggcgcgcatgctgatcgacttccgcaaagtcgagcttgctccgggcgaaagccgcaccgtgtcgttcgacgtgacgtcccgacaactggcggttctcgacgcggcgttccgtccggtcgtcgaagagggcgagttcgaaatctcggcgggcggcacgccctccgaactgcatagccgcatattaaccctaaaacgataaacagatgaagataatgcaattgcctgttattccggtttgtgcgctgggatcggcagccgcgttgtgcgccggctgcgggaagactccggcagaacggcccaatatcgtcataatctatgccgacgacgtcggttacggcgatttttcctgcaacggttcacccacgatacagacgccgaatgtagacaggctggcttccgaaggcgtgcgtttcaccaatgcccatacgacctcttcgaccagtacgcccgcccgctacggactgctgacgggacagtatccgtggcgcaaggaagggacggggattgcggcggggaatgccggaatgatcatatcgcccgaacagtatacgctggccgacatgctgcgcggcgcgggctacgccaccggagccgtcggaaagtggcatctgggcttgggcgagacggcccggcaggattggaacggcgtcattgcgccgggcctgagcgatatagggttcgattattcgttcatcatggccgccacgggcgaccgtgtgccctgcgtatatatcgaaaaccagcgcgtcgtcgggcttgatccggccgatcccatctccgtgagctatgccgaacccttcgagggcgagccgaccggccgggacaatcccgaactgctggtaatgaccccgtcccacgggcacgaccagaccatcgtcaacgggatttcccgcatcgggtatatgaagggcggcaaggcggccttgtggaaggacgaccggatcgccgaccggatcacggacaaggccgtggagtttatcgtccgaaaccgggagcatccgttttttctgtatttcgggaccaacgatattcacgtgccgcgcgtacctcacgcccggtttgccggcaagagcggcatggggccgcgcggcgacgcgattctctctttcgactactgtctgggccgtgtgatgcgtacgctggacagtctgggcatcgcggacaatacgctgctgatcgtcagcagcgacaacggacccgtcgttgacgacggttacaacgaccgcgcggtggagctgctgggcgatcatcgtccgtggggcgatttccggggcggcaaatacagcgccttcgaagccggcacccgtgtgccgatgctggtgcgctggcgcggacatgttcccgcgggagccgtgtcggacgcgttgttgagccatatcgacatcttcgcctccttgggcgctttgtgcgggggcgaaattcccgaaggggccgcacccgacagccgcaaccacctctccgcgctgctgggcggcgggcctgaccgggagtacgtcgtcgagcagaacctgaataacacgctttccattattgtggacggctggaaatacatcgaacccagcaacaagatgcggatcaaccggcagaccgacaccgaactgggcaacgatccgatgcggcagctttacaacctgcgcgaggatgtcggcgaacggcacaatctggccggacggtatcctgcaaaggccgattcgctgcataataaactggaaaatatcaaaagacgatgaaaaagggtattctgacctgtcttctcctgctcagtgcgggattgcttcaggcggcgctgccgggagttaaaatcgaggcggggccttatctgcaggccgtcaccgaaaccgggttcacggtcgtctgggcctccgacaccgatgccgtggcttgggtggaggtcgcgccggacgacggcagcgatttctatgcggcggagcggccgcgttactatcattcggaacacggcaaacgcatcatcggccgtctgcaccgggtcccggtcacgggacttgagccgggaacccgttaccgttaccgcatcttcacgcagggaattctcgaaaacggcggcaataggggcgtgattccgggccggatcgcagccagcagggtctacaaacacgaaccctattatgcgaccacgctgaatcccgacaagaagacgatcagtttcgccgtcgtgaacgatatccacggcaacgattcgctgtttcgtcagctgttgggcggcgtgacggagaaaaataccgatttcgtggtgctgaacggcgacatgacgtcgatgatcgaatccgaacggcagctgttcgacggctatctgagatcggcctcggaactcttcgcagccaatgtgccgttctgtttcgtacggggcaatcacgaaaaccggggcgctttttcctaccgcgcttcggactattttccgacgccgaccgggcggttctactatacgttccgccatgggcctgcatttttcgtggtgctggactgcggcgaggataagcccgataacgatatcgagtattcggggctggccgatttcgaccgttaccgggaaaccgaggccgactggctgaagggagtcgtcgccagcgaggagttccggcaggcgccgctgcggatcgtgctgctgcatattccgccgctgcattacgactggcacggaggacgtgaaatacagcggctcttcatgccgcttttgcagggtgccggagtcgatctcatgctctgcggccacctgcacaaggcgttctataccgctgccggagaagataagtatgacttcccggtgctgatcaactccaaccgggagtgtgtgcgtgtaacggtcgaagggcggaagatcgaagccgaaatcagggacgccgcgggcaaaaccgtcgcccggcatacggtcagaggcggccgcgagtgaccttccggggcggagcctgcgcaagattcgccgcttccgcacattcgaggggcgcccggagcggttattcgttttgcgcggaaccgtgggtgtcgtggaactgttcgacgtactccttcggggtcatgccgtagtgctccttgaaacatttggtgaaataggagtggctgttgaaacccgatttgtagagtatttccgagatgcgcagctcgcccttgcagaggtattgcgccgcgcgtttgagcttgatcgtgcggacgaaatcgtttatcgtctcgccggtcagggcctttaccttgcggtatacgtactggtaggagctgtcgatgctctcgcacaacgtctggatgttgaaatccggattttcgagattctcctcgatgacctttatcagtttgaggatgaatttgtcgttctcggattcgatcacgatctccgaggggcttgacagaatccggtcccggtagagcttctgcagtttgatccgggattcgataagcccctcgatccgggtggtgagggtcttgacgctgaacggtttggatatgaaggcgtccgcgccgcagttgtagcttgcggctcggtcgccctcgttgcttttggccgtcagcatgatcagcggaatgtggctggtcagggggtcctgcctgatgagcgtgcacatttcgaaaccgtccatgcggggcatcatcaggtccgaaatgatcaggtcggggtagacgcgccggatctcctccagcccctgctgtccgtctgcggccgtgtagacctcgtaggcgccgccgagcgtggttttcatgaaaccgagcatctgctcgttgtcctccacgatcacgattttgcgcatacccccccccgtcgcgtctgccggaatatgttccgggtcctgattttcgccggggcggacctcatcggcggcgtccgggaaaccgttcctgcagggaagcgtcaccgtgaagcagcttccggcccccggagcgctctccacttcgatttcgccgccgtgcagccttacgtaatccttggtcagcataagtccgatgccggacccttcggcctgctcgtgggggatgttgcccgtctgatagaaccgttcgaaaatgcgtgtctgctcttcgctccggatgccgcatccggtgtcgcggaccgtaatgcggacgtagtattgcccctcctgctccgtggtctcgacgcgcagggcgatccgcccgccgtcgggcgtgaatttgaaggcgttggagagcaggttgtaaaataccttctcgattttgtcgcggtcgaagagcatgttgatgcagaaggggtgcgactcgaaggtgtagtcgatgcgtcgctgccgggcgtggtcgcagaaggtcgcgtatatctcctgcccgaaggcggcgatgtcgcccatgccgaggctgagtttcatcttgttgttgtcgatcttgcgcatgtccatgatctggttgatcaggcgcagcagccgctcggcgttctgcttcatgatcagcagcatcttgcgctggccctccgtcgccgtttcgagcagcgtctcgatcgggccgagaatcagcgtcagcggggtcttgaattcatgcgagatattggtgaagaagaccatcttggtctgattgatctccttgtaggtctcccggcgcatgatttcgagtttaagctcccgcgccagccggatgcggatgcgcaccagatagacggccagtatgcagaacgccgcgaacagcagcgtatacccgatacaggccgcggtgctgcgccaccatgcggggcggacgacgatgtcgatctgcgcaggcgcttcgctccagatgttgtccgaattcgcggcgtttacacggaaggtgtaacgccccggcggaatgtgcgaataggaggcgtagctgtgttcgccgtcggtcgtgatccactccttgtcgtatccgtcgagcttgtaggtgtatgaatttcctgcgcccgtcgcgaagttgagcagcgcgaagtcgatgcggaagaagttttcgtcgtgccgcagcctgatctggtcggagaaggtgacggagttctccaagatgactttgccgtcgatctcggcgccgggcagaaccggcgtgttgtgcagccggaacgaggtgagccgcacgggatagcggcggacgtccactttgatctcctgcgggtcgaaggcgatgaatcccccgtgcccgccgaagtagatgcgcctgccggcgctgcagacgctgttgtactcgatgtcgttcatcttcagctcctgcgagatgtcgcatgtgattttgtagctgagttcgtagtcgaacatgatcagccagctgccggtggcgatccatagccggttcgactcgtccgatacgatcgtgcgcaccgacagatgggggccgatgtcgatgcgttcgaacccgtcggtttccggcgcgtagcggcagagtcccgtgtcggtgcctatccatgtgcggttgagggcgtcggtgtggatcgaatagatgcggttgctgacgatgctggccgggtcgtccgggtcgttcttgtactggacgatggtttgggcggacttgttgtagcggaaaatgccgtcgctggtcgagccgatccatatattgccctgtttgtcgggttcgaagtagggaacgtcgctgttgtccgacgacacgaggttgtcgatgatcatgggcgtgaagcgcaggcgcgtgatttcgcccgaagcgctgcgctcggcgcggatgaagcagatgccgctgctgatattgacgacgatctcgccgtcgttgtcctccttgatgtcgtagacgtatttgaacgagaagttctcgtcgcccgtgtcgacccggcggagcgtcgtgcggtttttgtcgaggtagacaacgccgttgttcgtgccgatccacatgatgccgctgcggtcggtgagtatgcgttttatgttgttgtggggcagcaggctgttcttggtcgtgaaatggcgtttcagccgcatgtcgggcgaatagcacatcaggccgttgttcgtgccgatccatatctcgccgggcaggacggcgatgtcggtgatcgtctcccgtgtggtgtgcccttcggcatcggtgtcgttgatgtaatgcacgtcgatgggcctgcggtggctgttgcagcaggccacgccgtagttggtgccgagccagacaagcccgttgtcgtcttggaaaagacagcgtacgatctgcgtgggcagcgagacgggatcggtgatggagttggcgaagttcgtgaaaccgcccgacgggatgtcgaagaccgaaaggccgctcgacgtcgccgcgaggacgtgcttcgcgtcgtagcgcgtcacgtcccgcacgtcgttgcttgcgatgccgctgttcgcggtgtggtaatggcgctccccgccggtttcggtgtcgaatacgcgcagccctccggtcgcggcgatgtagagcgtatggggatcctcctgctggatgtgcagccccgatatcaggcagttgccctctgcgggggcttttttcagcggtacggacttgaagacgccgctttccgtctcgcggcagtaaagcccgtcgaaggtgccgatccagagccgtcccgccgaatcctcgcagaggctcctgacctcgttgtgcatcttgtcgcggtcgtagtggttgagcttgtagaagtttatcaggccgttccggcggtcgaaccggatcagtccgtcgagcgtgccgatccagagatagcccttcgagtcttcgcagaaacagcgtatgcgcaggttgcccagcaggttgcgggagtcgttttccgccgatatccgttcgaagttttccttttgcgcgttgtagacgtttacgcccttctccgtgccgatgaacaaccggccgtcccgtgtgatgtagagacagttgatccacgatgtcgagagcgaacagggatttcccggttcgtgtctgtaaacgtggaattcggtgccgtcgtaccggttcagcccctccgccgtaccgatccagatgaatccctgcggatccttgacgatggcgttgaccatctggtgcgagagtccctgctggatgccgatgcttttgaagtagagcttcagcacgtcgtcggcgctgcgcgccccggcgaacgggcagaggagcaggaacagtagtaggaggttgcgtttcgacatagtacaaatgtaaagtttttatcccggagctcaaaacgccggggcctgaaaaagcgccccggcatcctgaaatccgtcgttcgttttaacggagcgtggggtagggataggagccgccgcccgcctgccataccgtcacgaagtcccagccggaatacgacgccggattcttcatctgcgcttcgctcagcagaccgccgcccgtgatgcccgacgtcgagccgccggcgaaggcgtccccgttgtccagcgcataacaatcggttatgacggctttgccgctcgccttgccgaatgcgctgaagaggtttccggaaccgccgtccaccgtgattttgcctacggtataacaattggttatgacggcggcctgatcggccatctcgccgacgatgccgccgtagttggccttgcccttgatcgtggcgttgccggcgttgtagcagtcggtgaggcggccgggtttgttggtgtggcctacgattccgccgatgcgcaggctcgacgacgagacgctggcgccgacgatcaggtcgcccgtgttgtagcacttgctgatgaccgtcttgttggaatagatgcggctcgtgacgccgcccatgtaggccgcgccgcgccccatgccggccggttcgtccatggtgagggtgccggtgttgtagcatttttcgatgacgcacgccgcgctcgacgaggtggtgtagccgaccacgccgccgaagtaatagttggccgtgatcgcgccggtgttgcccgaaccggttaccttgccgccgttcatgccgaccacgccgccgacctgattcatggcggtgatcgaggcgtggttgacgcattggtcgacaacgcccgtggcatagttgtaggccgcgattcctccgcaggtgaattcgtcggtcttgttgcggtcggcggccgccgagatggcgcccgatgcggtgcagcgaagtacggtgccgttgttgttggcggcgatgcctccgacgttgagcggcgtggtgccggtctcgcaggctatcgtgcagtcggtgacggcgatgtcccggagggtgccgttgttggtgccggccacccatgcgaagccgttgtcggctttattgaccgaaccgccgtcgttggtgatgtagagcgagcagcggctgaagttgagcgacgccacttcggcgccttcggccacggctccgaagaacccgaagtagttgcgcttgtcggccagcggacggatttcccatccttcgatggtcttcccgttgccgtcgaagatgcccgcgaaggggtcggccggggagcagatcggttcgaagtcggcgccgggtgccggcgtgtaggtgagtttgtagtaacatccggccgctttggcgttggcggtcgatatgttgcgcaggtagctgtcccggtcgataatgaacggatcgccctgcgtgccggctcccgatgcgaagtggctgttggcgctctgcgcctcgctgttcgagaaaacttcggggtcgtccgacaatgcccggattgaaacgctgaacagaccgacgtattcgggcttggcgaatacctcctgcgccgagaggttgcaggtggtttcggcgccgttgtcgatctcggcgaccggagcgccgttactgtccgtaagcacgaccatgtatttcaccgcacccatgatggcgtcccatgcgagccggatggcgcctgcttcgtctttggccagcgtcagtacgggcgccgcgaattcaccgctctggttcaccttgaacgaataggtgacgcccggcgtatttttcgaccggaacgtgacctcggcgctgcgttcccgcttggttgaattgctggcgcataccagctgtacggtctttttgccgcttccgttgtcggagcttacgaccgaacaccagctgtcgtccgaggtcgaggcctcccacgcgtcgttggtatagagcgtcaggggcgtttcgctgcgtgtgactcctacggcaaggccttcgctctggagaccgtcgatttcgatgtagggttcgctggtctgctgggtgacggtgaattccttgcggaacgaacctttgccgtcgtcgctgacgatgaccagccgcgccgttttgggcgtggaaaggtcgtagttgcgttcggtcgcaacggtgatctcgatatcgccgaatccctccgccggcgtgatttcgagccactccccgccgccgtcgtattcgacgtgcgctttccaccagatgttggaggcgatcgagatccgtgcgctttcggtcttgccgtcgagcgtcaggctcttgtcgtcgatgccgacggcgggccgggtggtttcgctgctgtatatgtcggtgtccgaacatgcgcccgcaatgagcagcgcagcgagcatcgaacttaatattaccgtttttttcatggttctttcggttttctgaatctattttttattcgtgtagttgtagtaccagccttcgatcttgttgcttgtcctgcggttgtagctgccgtaaagcttttgcgtgaattcctgatgaatacgcttggctatctgcgaccgttcggcggggtccgccacgccgcgggtgagacgctcggtcttgtcgagcttttcgaagaacagctcccgcaggtgcgtcgcctcttcggcgctcagaccgagttcctccttggcttcggcggccatgctcgcggccttttcccgcagtgcggcctcgtccgttccggcgccggccagaaacagaatcgctgccggtaataatagggtcaggagcagcttcatcaatagccgaagttttggtccgacgccgaaatgttgtagttcgccgatatctccgcgttggggaacggcagcagcagattcttcttcacctcgttgaagccgttgggaagcacatagtcgtagggtgacagcgatgcggtctcggtgatgcgggcgttgtggatgtcgatcagcccggtgaggtacgccacgccgaagcgccgcgagtcgaaccactcgtgcagttcgcctttcagttcgcagcggcgttcgacgcgcagggcggcgcgtatctcctcctgcgacaggcctgcatcccagtcggcgggttccgtgcgctgttcgttcgaggcgttccgggcccggaagagcacttcgttgacataacccacggcttcccgcgtatgcgcgcctcccagctcgttagccgcttcggccagcgtcagcagcaggtcggcgtagcggtagacgatgaagttcacgttggcgttgcccgccgtgaaggtcggatcgacccatttgcgcaggtaggggaggtactcgtatttcgaagtagactggtcgggatagttctccttggtatagggatagatgtagtactgcttgcccctgtagttttcgttctcgaccgtcgtgttgcatttgtatttgtagtcgaggtaggtgcactcttcgcgccagtcgcccggataacggtcgttgtgctcgtcccacgcttcgcgcgaggggcggatctgtccgtagttgttcgacgagttggtcaggggcacgccttcccagtagcccggaaggtagcggtacatgaagggacagctgcccgtcacgtagttcatctccatttcgagaatcgactcttcggtgtgcttgttggtgtagacccacaagtcggcgaagttcggaacgagcgagtaggcgtgcgagtcgtagacctccttggcgttgtcgtacgccagctgccagtactccttggccgacttgtcgaacagcgccgcgtcgaacggttcgccgggatgctccttgatacatgccagcgcgacgtagaccttggccagaaatgctttggcggcccatttgtgcggacgtccgtgggcatgggcgcccttttcgggcagcatgttccaagcctgttcgaggtcgccgatgatcagaccgtaaatccggtcgatcgacgtgcggggcttgtggctctcctcgatggaggcggcgggccggtcgatatacggcagcgcgccgaagatgcgcacgaggttgaagtaggagagcgcccgcagcagccgcgcttcgccctcgatccggttgtgttcggcttccgacatgccgctgcacaatccgatgttcatcagcaggtcgttgaccgtattgatcgtctggtaggctccgtcgtagacgtagtcggccgtgctgttgtccaccgccacgttcatcgtcgccagctcgaccatgtaggtcgagttgcggttctggagctgcatggtgggcgtatgccacgacaggagcatgtgcaggtagccgccgtagccgttgctctgcgaaatgtagccgtagcaggagttcaggacggcctgcacgccgttcggggaggagtagacgtcctccggactgaattgggtcgaagggtgttccgtcaggaagtcgtcgcaggaggtgcccagacccgcgccgcagaggacgagaaacaggatgattatctttttcatggtttattcctttttatgcgtgatacggttagaaggtcatcgtgatgccgcagacataggccctcgacgacgggtacgagctccagtccacgcccactttgagggcattgttggtgaagctgctcacttcggggtcccagccgctgtacgagctccatgtgaaggcgttgcggacggtgaagctcaggccgaggttcttgacgacgctcgtgcgcttgaagttgaactggtagctgagcgtgacggccgaaaggcgcatgtagctgccgttttcgagaatccggtccgtgaagtccttggtctggccggccgtgcggttcagacggggatagcgggcgtcctgattgctctcgctccacgcgccgagataggcttcggtgcggacgttgtgcaggttgttgcccgtcggcgacgtgttcgtttcgggcagcaggttgccgttggcgatctggttgccgtatacgccgtcgaacatcatcgagagcgagaggctcttccagcggaacgacgtgctgaatccgtaggtgaacgacgggttgggatcgccgatgacctccttgtccatgtcgtccacgttgcccgatccgtcggtgtcgaggtaccagatgtcgcccggctggagctgctggccgcggtatgtcggcaccagtcccttgtcgatggcctcctgcgtcacgattccgttggtgcggaagccgtagaacaatccggcgggacgtccttcgatgaagatgttggccggcatcttgaagtagtccgacgtgttggagatctcctcgccctcgaacgccgaggcgaagatgttgccgtgcgatgccgccggaagtccgatgctgccgatcttgttgcggttgaacgagatgttggcattgacgttccacgtgaagtcggcgttgtccaccggataggcgtccaccgagaattcgacgcccctgttttcgatgttgccccggttgatccacatcgacgagaatccggtcgaagggggaatcgaaatctgctggagcaggtctttcgtgtttttgtaatagaggtcgagggtcatgttgagccggttgtccagaaggccgaggtccagacccacgttatactgctcggtggtctcccatttgagctcccggttggacatgatgctgggcttgatgccgatgacgaactggccgtcgggcgataccgaatagtccgaattggggtcggccgtatacatcgagctgtaggtggtcagcgtctggtaggggctcaggccctgattgccgaccatgccccagccggcgcgcagcttgaggttggagatgaaattcaggttcttcatgaatttctcttcggacatgcgccatgccgccgaaaacgaggggaagtagctgaagcggttctccttggagaacttgctgctgccgtcggcgcggaacgtggccgtcagcacgtagcggtccttgtagctgtagaccatgcgggcgatgtaggacatcagcgtgcttgcgtcctcggaatatcccggaacctgcgttttggcgttgctgatcgcgtcggagcggaattcgagggccgggtagtcggggaagtcctgcgcgttgatcgtcgagttgtggttttcggcgctgttgaccgagatgcccagcacggcgtcgatacggtggccgcccttgaagctcttgttgatgttgaacatgttgtccacgttgtagcggaaagccaccagttccgagaatcccgcgcggccgttcagaccgttgtcgagatactggccgtagaaacgggtgcggttcttgttgcggtagtcggtgccgaacgtggtcttgaaggagagccatttggtgagccggatatccgcgtagaggcttccgctgagacggaactcgtcgctgccgtcctcgtagctgttcagccagaggtcggtgcccttgtaatcctcttcgtcgccgaggtcctcgcccgacgtcgtgacgtagggtttcgaaccgagcatctggcggatcatgctcgtcgcgcgggtcgcgttctgcgtgccgcccggctcggtgccctgcgtcatctggttcttgcggttcgagacggtggtcttcgtgccgaccttgatgaatttggcgatgcggtggtcgaagttcgcacggaagtcgtattggcggacgttggtgttgcggatgatgccgttgttgtcgagataaccgcccgcgaggtagtagttcgacttgtcgctgcggccgcttacgctcacgcgggtgttgatgctcactgcgttgcgcatcgtatagtcctgccagtcgcgcgcttcgaggacctcgccctccttgatgtcgagacttacgcccacgtcgtcggagtaggccagaaactggtcgaggtcgagcacgtcgatgtgcttgcgcggcgtggagatgtccaccatcgtcgagaattcgatacggggcgtgtccgaggtgccctgcttggtggtgatgagcaccacgccgttggcgcccatcgagccgtagatggccgtcgccgaggcgtctttcagaatctccatgctggcgatgtcctgcgggctgatggaggccagtgcgttctgcgcttcctgtccggtgctgcccagcgggttcttcacgtcctgcgacgaggggttgagaatgatgccgtccacgacgtaaagcggttcgccggtgccgttgaaggagcttgtgccgcggatcttgacgctcacggcaccgcccggagcggcgtttccggtggtcacctgcacgccggcagcatggccctgaagcagtttgtcgaacgaggcgacctgcgcggcttcgttcttgtcgattttgaccgaggtgacggctcccgtcacgtcgctcttgcgcagcgttccgtaaccgacgaccacgacctcttcgatctgggcttcgtcgctttcgagttcgatgtcgatccgggtgcgtgtcccgacggcgatttcctgaggtttgtagcccagataacttacttggagcgtcttctcggccgcggccggaattacgattttgtagcggccttcggcgtcgctgctcgttccggtcgtcgtgcctttcacgaggatcgtggcgccgatcaccgattcgccgtttttgtcggttatgcgtccgctgacggcggtctgggcgaaaagttcgaccgtgagcagcagagcaaccgtaagacaggctatgtatttcgcgtatttcatgataatcatctttttagagaattaaaacgttgctttgatgctcaggaggaaagtccgggcgagcggataggagccgttgtccacgccgtagcggctcaggtcgtaggtgtagctgcctaccatgggcgaataacccgaatagccggtcaggacgcagaggtttttcgccgtgaatgccagatcgacgctccggagccactttctgctgatgtcgaaccggtagcttacctgcacgttcgacaaccgcaggtaggagccgtcctcgacgaagcgcgaagagacgacgtcggcgccgacggcgttcagccgcggctcgccgccggcgggataggccttgcggtagctgtcgctgcgcaggttcgagtagttgcccgtggcgaaggtcgccgtgttgagcagattgaggttcatgatgtcgaaatcggcggctccgtccatggttaccgtcaggctcaggtggcgccacgccgcgcgcgtcgagagcccgtagcggtacgacggattgggattgccgatgacggtcctgtctttttcggtgacgttgccgtcgccgtccttgtcgatgaacttgatgtcgccctcctgcagccgggtgccgttgtagggcggcgtgtagagcaggtggcgttcgcgtacgatgccctgactctggtagccgtagaacgccccgacgctttcgcctttgcggttgacgttgaccacgacgtcgcggccgaaccattcgcccgtcgagttgccgaagacgtcgccgtcgttctcagctcccgtagcgaggatccggttgcggttgtagctgaatgtcgcgccgagatcccacgaccactccttgcgctcgatcaggcgggcctgaacgccgacctcgactccgcggttcaggatgcgggcgctgttggcgtaaatctccttatagtctccggtgcgcttgtggtagtagtagcgcagtttgtcttcgcttctggaatcgtagtaattcgccgtgagccgaatccggtcgttgaacagccccgcttccagtccgacgttccattcgtcgttcaggccggtccagcgtacgtcgtaatagttggtgatgccgttctctatggtgatgtcgggggcgattcccgtaatgtagctttcgttgaagaggtagggatcgagcgcctgacgtcccgaacgtccccagccgccgcgcagcgtcagtgcagagatcgctccggcgtgctgcatgaaaggctccgccgcgatgttccacgccgccgacgcccacggatagagggccgtgtcgtccagactgttgtcgtagcggaacgtatagtctccgcggacgcccgcatggatcgtatagcggttgtcgaaggtgtagcaggccgatgcgaagagggccgtctgctgcgaccggagccggacgacgtgcgaaggctggacgttctcggccagctggattccggttgcgcgcaggtcttccttgaagaacttgtagccttcgttgatgtggttcacgctgttgctgccctcgaacgttccgccgagcatggctgtcagatggtgcttggcgccgaatgtccggtcgtaggcgaagtgtgcggagacgttgtagccgatcgcgcggatgttgctctttgcggcgcgtccctgctcttcggcgccgcgccatacgtcgcttccgacccagcgcatgcgctccttgccgcggtagtcgatgccgcccgcgacgtcgaacgtcaggccctcggtcagcgcggccttgaaatagagcgactgctgcacgaagtattggctcgcttcgtcgtcataggccgagagccagccttcggcggtgtcgtcgagctgcgatccgtatttgaccgtgttgcgcatcggcgcggcttcggtcatggccttgagcgtgctcatcgaacccagcggcgaggtgccctgcgtcatgttgttgcggacgtgtccgaagttgccacgcacgccgatcaggctattcttgttgatcgtgcgctcgaaattggcgcggaggttcaggatgccctgatcggtgcgcctgaggatgccctgatcgccgctgtaccccagcgagaggtagtggcgggtgcggtctttggcgcccgacacgctgatgtgatgactgtgggtgatcgccgtcctgacggcctgtccgctccagtcgattgcgccgccctgcgcgtcgaaacccggattggcctgcttcatcatcgcaagatagtccgacgccggaagcatctccacgtcgtgccccatcgtcgagacacctatattagaatggtagcggaccgtttcgcccttcttccccatcttcgtcgtgatgacgattacgccgttggcgccctgcgaaccgtaaattgccgtcgatgcggcgtccttgagcacttcgatcttctcgatgtcgttgggattgatcgacgccagcgtgttctgaacggcctgatagtcgctctcgtcgttctgaaacgccggggcggcatcccttgtggtgggattgaggattacgccgtccagaatgaaaagcggttcggccgttccccggaagcttttcaggccccggatcagggtgctgaatcctgcgccgggcgcaccgtcggtcggccggatgccgactcctgcggcgcctgctccggagaagaactcctcgatgcctgccgccgtcgaagtcagcggaccgggggtgagcgtcgtgtcggatacggtgttccgggcgccccggttgcctaacgatacttcgtaggtcgttcccggattttgctgtgccgaagccgtgggaatacccgcatacgataaccccagcgtcgttaagcagagtattgcggctctgcggggcgttcgggtaattgaatagtagacttgtttcattcggtttgtagtttagattaacttcagcaaagctatatcgtaatatttttactttttagaactaaattttccaaaactatcacataattatcacggcggggcaaactgccggccggtgtcggataatggctttgaaatagtcgttacggttgcgtcgatggtataaatttacggataaaatagtccgaaagggtcgtattcgcggtgaatttgcgtatttttatagttttgaaagaatcgttacaatcaatgtaaaaaaaatactaaagtcccccggagggttccgctatctttgtcggtgttaaaatacagtgcgttatgcgaaaaataattctgttcctgctgctgttcgtgtctgcggccgcttcgggttccgcccggcggcagatccgcgtcgatctgtccgcacccggaaaaccgctcgccgtccgtccggtcggggtcaatctcttcatgctgatggaccatgaccgcggggagcgccgggcgcgtccgatgtggaaggccctgcgggatctgggtgtccgctcggtgcgcttcaacgaaggcgaatacggcgactggtatattttcacgcacccggattcggtatacctgctgacccgtcccggtgcgaagctctatccccgtctgatcgacatcaagtcgcggggaatcgacggcaagctgaccgatattggggcggaaccccgctacggcggttatccgctcaattgcgagggtttccggccgaccgtcgatttcaacgatttcatccggatgtgccggaaggtgggcgtggacgatccgacgatcattattcccacgctgccggtggactggaccgcggccaaggcgttttatcccacgcgcgaagatatggtgaagctcgcggcggcgatggtgcgctacgccaatgtcgtctgcaaatgcggtttccgtttctgggagatcggcaacgaacactattgggaaaacagggatgatccgcgcgataccgtgtgggcggcccgctgcgcttcgctggcgctggagatggcgcgcgccatgaaagccgaagacccgacgatcgaaatcggcgtgaacggctttacggcgccgtggctggaaaccttgctgacctatgccgacgggaacggccggctgatcgactatgcggacaatatcgtcccgcatcagtacgccaaagccgaacttatcggcagctacgagctttataaggcctcggccgaatatccgctgcacgaggtggacgaggtcgtcggatttctggaccgcccggacgctcccgatgcgtccctgcgcgaccgcttgaagattcaggtcaccgaggcttcgtcgttcatgcccggcaagaaggcccaccgtgtggacaacgtagcgtgggtgtcgctggccaatttcgagcatctgggctatatccttgccgctccgaaggtcgaatacacccatttctgggccacgcactggaccgatgacgaaacttactggtcggccctgaagatggacaaccggctggcgccgatgggctggggcgtgaagttgtggaacgacaacttgctggataccttctggaaagccgacctgcgttcgtccgccgtgcgctgttacgcttcggccgacaactccggcgaacggctggcgctgtttctggtgaacaggctcgacagcgtgcaggagtgctgcgtggagctcgccggatacggcggcgctccggaattccgcacctccggcatctgggcggcgcatcccgacgaccgggatttccggatgcagaaatccggccggggcgttgccgaagacggtcggttctgcctgacgctgcaaccgctctccgttaccgtagtccgtttcggaaaataatgaatcgctaaaccaaactaccttaaaaccagacgtatgaaattttcaatccgcaattcgtggcttgccgtcctgctgtttgccgggactgccgcggtccacggacagactatccgcgagcaggtgctcgatccggtcgagcacagtgccggctcgtcgatgtcctaccgtttcgagcctcagacctatacaccggctccggagggatacgttcctttttacatcagccatttcggccgtcacggatcgcgttaccacacgacggagaatatttacaggaagttttacgacatctttgccgccgcggccgcgaacaatgcgctgacgccgttcggcatggaggtcaaacagcgcgtggatacgatttttgccgtgtgcgacgggcatgcgggcgtgctcacgccggccggcgagcgggaacaccgtgaaatcgccgcgcggatgtaccgcaactatcccgaagtgtttcagccgaagggcaagcggcggaaaatgcaggttttctcgcgttcgacctcggtcggtcgggtgattcagagcatgcgctcgttcgacggggcgcttaaaatgtgcgaaccggaactggatatccgcgaagagtcgggcggtgcgtataacggctatctgaaccactacaccaaagcctacaaggattattacaaggacggggcgtggcgcgccgtatacgatgcgaagcgcggctcgtggttttctccggaccgtttcgtggagtcgcttttctgcgatgcggattacgtgaagcgccacatatccagccgccgcagcttcatgatggagtttttcgccgtagcctccatcctgcaggactgcccgctcgacgtctcgctctacgacgttttcaccgacgatgagatttttgcgctctggcggcttcagaacctcagccagtaccttcgcaaaggaccttcggcgatcgccggggagctggcggcttcgatcgccaaaccgctgctgcgcgacatgctggcgtgcgccgaagaggccgtcgccggcgggagcgtcgtggccgatctgcgtttcgggcacggcgagggcctgatgccgctggccgcgctgatgaggctggagggggcgtgcggcgtcgagtccgatcccgaaaaggtggagaacgtctggaatgatttccggattacgccgatggccggcaatatacagctgatattctaccgcaacgccaaaggccgcgtgcttgtcaaattcctgctcaacgagcgggaggttacggttcccgtcgcgggcgacacggctccctattacgactggaaggccgtccgcaagtattattaccgcatagcgaaagagtaggcggacttgtgtgatatctcccggtatgcggcgggcggcggttgccgtccgccgtttttcgtcggttccggtcggtgccgtggttccggattgcgtcgttgtgccggttggtggtgtcgcgccggacagcgccggcgtgccgggcggtgccgtcgctccggacggggaagagcaggggaggagagggacggctgggacgaagcccggaggatgtgcatggcgggagggccgaatggcggcaggctcggatgccgtggcggggacggcgcgcagagagcggtgcggctggggccttgggcggaatatctccgcggacggacgggacatgaaagacttctgcacgccctacggcgtgcagaagtctcggtgtgaatactgttctatttctgttggtcgatcagcagggccttgatcagccggaagacctccgtattttcgattacgccgctgaaattgtatgccccggcgccgtaggcgtagagtatgacgggcgtgcccgaatggctggtcgtgctgtacttgtattcgatgccgctctccgccgccgtgaaatcccggtcgttggagacgaccgtcagtccgccggtctcgtggtcggcggtgacgatgaccagtgtgccgggatttttgtcggcgaagtcgaaggccttgttcacggcccggtcgaaatcccgcatctcgcccagcagttttttcgtgttgttgccgtgtccggctccgtcgatctgcgaaccttcgatcattgcgaagaaccctttcctgttgcgcgcgagcagcgaaagcgtgtgttcggtcgcgcgttcgagataatcttcgccgcgttttgccgccgactccatgtacttgtccgcgaaaagtccgatgacgggcgtgctgtcggtcgcgtagaactcttcgggggtcgaggcgtaggcgtagcctttggcctgcaacgccgccagcacgtcctgcccgtcctcctgcttttcgaaaaagcggcggccgccgcccgcggccacgtcgatgcccgacgtttcatacgccgcggctatttcggaggtgttgtgccggtcgggggtgtgggccatgaatccggcgggcgtcgcgtcggccagatgcgacgtcacgacgattccggtcgcaaggcccttcgccttggccagctccgtgatgctctgggcgggggcgccgtccggggttacgccgatgcggctgtttttggtcttgtgtcccgtggccatcgccgtcgccgcggcgccggagtcggtgacgcggttgttggccgagtaggttttgcagatggccgtgtagtgggcgcggtcgaaggccgtcgggccgtattggttttcgatcatgtaggcggcgacctgtcccagtcccatgccgtcgccgatcatcaggatcacgttgtgtactttttcgggtttcggagccgtgcgctgcgccgaagcggggacgctccatagcaggaggcctaaaatcagaatgcggaatagctttgtcatcggttatcggttttgatgttcagttcggcggagtgccatgcggtccggctgccggtccgcggatcgacggtcgtgacgcgcagccgccctccgtcgatgtcgaaaaggttgtaacggccgccgtccagcatcgagatattgaccacggagggacccggcgacgtttcctgaattttattgacgtgcaggtggcctgccagccaaagcacgatctgcgaggtgtcgcaaccgtcgaaaacggcgctgccgccggcgatcagctccggcgtatggtgggcggcgacgaccgtcggctgcgggacggcgcatcgttcggccagccaccggacctcttcgccgggcagcgtggcatggcggttcggctcgaacgggcctgtcgtgatgccgatgaagcgcaccccttcgcagtcgaagcagaaacggtcggtgccgaacgtgcggagaaaactgctgtagcgttccggacgtttggcgtcgtggttgcccgtggtcaggtagaggggtttgcggagccgggcgagcaggcgccgggccttgcggtgccccttcggggtgccgtcgtgcgagatgtcgcccagcagcagaacgaagcgcaccgagtcgtcggcgtcgatcgaccggatcgcggctttcaggttttcggccgcatgctccctgccgatgtgcgtgtcggtcaccacggcgaacctcaggcgctgggcttgggcggaaaatgctgcgcagagcaggagcagcagggcgggcagtcgtttcatgggcggtgcggatttgttgcaaaagtagcgattgtttcgcttccggggtgttctgattttatcaaaaactaacactttcttataattgccccgtgaaagatttctgttagcttttgataaaccagaatcagacggagcctgtttaattccctaattttgcggaagaaaaccaacctgaatatgactcggaacctgatcctgattctttgctgctgtttgtgcggccgtctggccgcccggaatcccgactgggaaaaccagcttgtcaatgcccgctgccggctcgatgcgcgcgcgacctcttactcctatccgtcggccgaagatgcactttcggccgaccgcagccgtgcgcgcttcctttcgctcgacggcgtttggcgcttccgcttcgccgacgacgtttcccgtgcgccgcagggcttcgaagccccggaatacgatgtctccgcatgggaccgtatcgaagtgccctcctgctgggagacggccggatacggttatgcgatttacaccaatattatttatccctatcccaacacgcccccctatatccggcgcgataatcccgccggatgttacgtccggactttcgaagtgccccgtgcgtggaacggcgaccgggttatactgcacttcggcggcgtctactcggcctgcagtgtatgggtgaacggctgtttcgccggctattccgaggacagcgcgctgcccgccgaattcgatgttacggaactgctgcgggagggcgagaaccggctggccgtcaaggtgctgaaatggtgcgacggaagttatctggaggatgcggaccattggcggctgggcggaatctaccgcgaggtctatctggccgccgaaccgcgggccgcgatcgccgattacggcgtgcggacggtgttcgatgcggagtatcgcgatgcgaagctccagctgcgtccttcggtggcgctgacgggcgccgataccgtgcgctgccggaattatgtgttgcgcgcggagttgttcgatgccgcaaaccggagggtcgatcccggcgatacgctcgaagtgaccgtcggcgaactgctcgacgaaacgtatccccagcgcgacaacgtctggtatccgctgctggaggcccggattccgtcgccgcacaaatggacttcggaaaccccttacctctatacgctcgtactctccctcgccgacgaaaacggcagggtggtcgaggcccggagcagccgcatcgggttccgggacgtacgtatcgagggcgggcgcatgctggtcaacggcgtgccggtgaagctgatcggcgtcaaccgccacgaccatagcgacacgacgggcaaaaccgtcacgcgcgagcagatgcgggaggatgcggcgctgatgaaacggctcggattcaactccgtgcgcacgtcgcattatcccaacgatccctatttctacgatctctgcgacgagtacggcctttatgtaatcgacgaagccaatatcgagacgcaccatgccggcggctgtctgagcaaccgtcccgaatggatcgttccctttatggagcgcgtgacgcgcatggtcgtccgcgaccgcaaccaccccagcgtggtcatgtggtcgatgggcaacgagtcgggctgggggccgaaccatgcggccgcggcggcgtggacgaaggagttcgatcccacgcgcatcatccattacgagggtgcgcaggggaatccccagcgccggggatacgttccgctgcgcagcgtcggaaagtggaaaacggccgaagaggatcccgccaagggggaatacgccgacttggccaatcccgacgaccgcgacgcggtggaggtcgtcagccggatgtacccgacggtggacgaactggagcggctggcctgcgatacgcttgtccggcggccggtgctgatgtgcgagtatgcgcacgcgatgggcaactccgtaggcggactgggcgactactggcgggtgatccgccgccatgacaaactgctgggcggtcatatctgggactggatcgaccaaggactgcgcaaggccgacggcaggggcggctggttctgggcctacggcggcgatttcggaagccgcgagaaccatgacgccaacttcaatatcaacggaatcatcaatcccgaccggagtctcaagccggccgctgcggaggcgaagcatgtcttccagccgctcgaaatcgcgcagccgcggcccggagaggattttttcacgatccggaaccgcaatttcttcgtttcgaccgatgagtatgttttcgaatggcgcattacgtccagcatgggcgcgacgctgggaagcgggactttcgaagtgccgcgcacggaagcgggagcctgcacggagtgccgcgtggggtacaaggcgccccgtcccgaatccggcgtcgattactggctggatatcgtttaccgcctgaaagaggataaaccctatgccctgcggggattcgaggcgggccgttaccagttcgcactgcccgctgcggcgcccgtgcgcgctgcggccgcccgcagtgccggcgtcagccgtacggaacgtgcggtgacgctgactgccgggaatgtgaccgcgacggtcgatgcggcgacgggatatctgtcgggatatgcggtgcggggccgcgagctgatgcggagtccgctcgtaccgaatttctggcgggcatccaccgacaacgaccgccggggctggcgtacgcgggagcgcatgggcgcatggcgcacgatgcctgagcggctgaaactcgaaagcctgaatgcggccgacggtgcggtgacggccgtcgtgtgcggcgggggcgtcaggctggctttgcgctatcggcttgcggcggacggggagctggccgtttcgtacgacctgcggatcgccgatacgcttcccgaaccgctgcgcatcggtctgcaggctctgtggagcggggcgctggaccgctatgtctactgcggccgcggtcccggagagaattatgccgaccggaaggaaggctccctgttcggggtttactccggcagtacggccgatttcagtcccgcctatatctatccgcaggagtgcggcaaccgctgcgacgtccgctatctccagcttgcgggcaaaggcggcggagtcgttttcgccggccggcagcctctgtgcgtctcggtctggccctgcacgcaggaggcgctggatgcggcggagcatacgcacgagatcgtgcggctggacgacgcatggctggtgaatgtcgattgtgcgcaggccggcgtgggcggcaccgactcgtggagcgtgaaatcgcgcccttcgaaggcgtaccggctcttggagaagcactacggatatgaatttgtaattgctcctgcggaaactccggccgatgcggcgcggacgagccgccgggtggcgtataaaaatgaataaacgatgagaaagtggttgatggcgttcctactgctggccggaacggccggggtgcgcgcccagcaatgcgatgtgccgcagatcggcgctcaggtttttgtagagccgggacagacgccggaggatatcgacggatttttccgcctgctgcgcgataacgggatgaaggtggcccgtatccggatgttcggagcgcacatgtaccgcggtggggagtgggatttctcgctttacgacgaggcgttccgtgcggcggacaaatacggcgtccggcttttcgccacgctgtttcccgtcaccgacgagctgaacgacgtgggcggtttcaaatttccccgttcgaaggcgcacctgcgcgaaatcgacgattatatcacggccgtggtgtcgcatttccggcagtatgaatcgctgtggacatgggtgctgcagaacgaacccggcagcggcgggacgcgcgtcgccatgaccgacctcgcaagggaggtctatgaccgctggctggcggacttcccgccggaagagcgcggggaaggttatctgaaagccgatttcacgcaggagaagttcctgacctactatacggcgtggtatctgaaccatatcgcgcagctggtcgaacggctcgatccgcagcgcgggcgacatatcaatccgcaccagattctgggcacgctgcccgattacgactttccggcctactcgaaattcctcacctcggtcggcgcatcgctgcacctgagctggcatttcggcatgttcagccagcgcgaatatccgctcggcgtctccctgatgtcggatatcatccgtcacaacgcactcggcaatccgttctggatcaccgaactgcagggcggaaacgtcaccgccagcggcaatgttccctactgtcccacggcggcgcatacggcgcagtatctctggacggcgatcgcttccggcgccgaaggggtgatcttctggtcgctcaatcagcgggcggccgtcatggaggcgggggagtgggggctgctcgacttcctgcgcaggccctcggaccgtatgctcgaagctgcgaaggtcgcatcggtattgcagcgtcacggcgaagagttgcgggggttgaagcctgcgcctgctccggtgacgctcctctataacatcgcctccctgcgcattcagcggcgcaatgccgaaacgctcgcatccggtgaggcgggacggcaggcttcggcctgcatgaagtcgctggccgccgcctatgaggccgtctcggcatggggcgttacgccccaagtggccgatatggcgaccttcgactgggacgacgcggcgggccgtacggccgtgatcccgcatatggtggcgctgccttccgaattccggccccgcatcgagtcgttcgtccgcaacggcggcaagctgatcgttacgggattgtcgggattctacgatgaaaacatgcgatgtctgtttatgaacggcttcccgctgaaatcgtgtttcggagcggaggtcagcgaattcaaagtcgccggggagtatttcacgctgggtgaggagctgcctgcgcatctgtggcgggggatattggttcctgcttcgggcgagacgatgatgacggacggcggcgatgtcgcggccgtgcgcaaccgctatggccgcggcgaggttgtgtgggtgccctccccgatcgaattgggcggctaccaccgcgatatggctccgttgacggctttctacgggcgggagtgccgcgacgccatagacgcggctccggcttcgttcagcacgcccgaaccggacgtgctgatgcgcaccatgcgcaaagagggcgttttgatgaccgtgattgtcaacaagcgtccggaaagcgcggccatacggctgcgtacggggcgatacggcgttccgcgcgtgatctacggagaggcctcggttaagggggcgcaggtcacggtcggagcggatcgctgcgccgtggtgctctggagcaggtgaggccctgaggataagcccttcggccgttcggataggaatgcgcatccccgcttgtttgtcggcggatgcgcattttttcgtgtgaatacgccgagagcggccggaacaggccgggattgttgtttcggacatattggagtccggctgccggcggggatttcacacaaacaaaaatccccgtaatcgtaagattacggggatcaccaagtgcccaggacaggaatcgaacctgcacgccttgcggcacacgcacctgaaacgtgcgcgtctacctattccgccacctgggcattattggaattgcggtgtgcaaaagtaatacttttttctgaatcgccaactatttttgtgaaaaaaatctacttgctcagaaatttgtactgaaacagaagtagatagactaccgctacggagatgtatgcgtcggccagattgaagatcgccccgaagaagtagttgttgctgtcgaccagaaagctcaggaaccgcggcacgttgttccactggaacagcgggaaatagaacatgtccacgacctttcccatcatgaagcccgcgtaatgtccgccgaaatgcgctaccgtgtacggcgtcgattccgaaaagatcagtccgtagaatgcgctgtcgatgatattgccgagcgctccggccatcaccagcgccagaccgacgatgactcccttcggcgtatcctcccggcggcgtagcagatgatgcatcagccagccgatgagacctaccatgacgatgcggaatatgccgagcagcagttttccccagtcgaatccgcctttcgaggcgatgtgcattccgaaagccgcgccgttgttctcgataaaccgtaattgaaaccagtccgggaatacgatgatcgactcgtcgaggtgcatgtgggtcttgacccagattttgagcagctgatccgcgatgagcagaatcaggatgagcagtgatatttttttgaagttcatagccgtcggattatctgccgcaaaaatagtaaaaaatctctgttttacggggtgccgtccgattttactcgtcctgcggacaattatattccccgaacgggcctttcggccggcaatgggggccggacggaatcccttgttgccgaatcgggatacggccgggaccgcatcatgcatcttgtcgggtggtattaatatatataggtaaaaagcgttattttgaagaaaattgaagatttttcaaaaaaaaatgcgaaaatgcttgcaggttcagaaaaagtcactacctttgcatccgcgttcaagaaaaacggatgttcttacaaagactgaaagtttacaataaaggagcttaaagctctgtgtaagcgcgattttccgaaacgtaaagttcttgaaaaagatttttgaaaaaagatttgcaggattaaaaaagatgacttatctttgcagtcctttcgcactacaaaatgcgagactttttcaaactggttctttgaattactggttatattttgagagaaaagaaatgtagtatttatctgtcaattttccttttaaggataaacgaatagtcaggactctaacaaaacatttataaattttatacaatggagagtttgatcctggctcaggatgaacgctagcggcaggcttaacacatgcaagtcgagg

SEQ ID NO: 12052 - DNA, 3425 bp, Unknown
  gut microbiota DNA sequence
acttgttagacagcctcttgcatatggcaaccgatgattacatcatgccgcccataccgcctgcgggcattgccggcatggcgggagcgtcggacttcttctcggccagcacgcactcggtcgtcaggaacatcgaagcgatcgaagcggcattctccagcgcgacacgcgacaccttggtcggatcgatgataccggccttcagcaggtcctcgtacttgtcgtcgcgggcgttgtaaccgaaggcgtccttgccctccttcaccttgttgacgacaaccgagccttcgccgccggcattggcgacgatctgacgcagcggctcctcgatcgcacgtttcacgatctggatacccgtcgtctggtcctcgttgtcgcccttcatgccttcgagagccgccgtagcgcggatgtatgccacaccgccgcccggaacgataccctcttcgactgcggcgcgggttgcggccagcgcgtcgtccacacggtctttcttctctttcatctccacttcggtagcggcgcccacatacagcacggcgacacctccggcgagcttggcaagacgctcctgcagcttctccttgtcgtagtccgacgtggctttctcgatcgaagcgcggatctgagccacacgggccgcgatctcctccttcttgccggcgccgtcgacgatcgtggtgttctccttgttgagcgtcaccttgtcggccgttccgagcatcgaaaggtcggcatcctcgatcttcatacccttgtcggtcgagatcacggtagcgcccgtcaggatggcgatgtcttcgagcatctccttgcggcggtcgccgaagcccggagccttgcaggccgcgattttcagcgtgccgcgcagcttgttgacaacgagcgccgaaagagcctcgccgtccacgtcctcggcgatgatcagcagcgaacggccgctctgagccaccggctccagcacgcccatcagctccttcatcgtcgaaaccttcttgtcggtaatcaggatgtaaggcttttcgagctgcgcctccatcttttcgggatcggtcatgaagtaggccgagatataaccgcggtcgaactgcatgccctcgaccacctccacgtgggtctcggtgcctttggcctcctcgacggtgatgacgccctccttgttcaccttgcccatcgcctcggcgatcagcttgccgatcgtctcgtcgttgttggccgaaatggtggcgacctgctcgatcttggcgaagtccgtgccgacctcctgactctgcttgcgcagcgactccacgaccttcagcaccgccttgtcgataccgcgcttcaggtccatcgggttggcacccgccgtcacgttcttcagacctacgccgatgatcgactgtgccagcaccgtcgcggtggtcgtaccgtcacccgcgtcgtcgttggttttcgaagctacctccttgaccatctgggcgcccatgttggcgaaagcgtcttccagctccacctccttggctaccgtcacaccgtccttggtgatctgcggcgcaccgaatttcttgtcgataatcacgttgcggcctttgggaccgagcgtgacctttacggcgttcgacagcgcatcgacaccctccttgagcagctcgcgcgcctcaacattgtatttgatatcctttgccatgatgtttttcctttattagatgatcgctaaaatatcactctgtttcatgatcaggtaatcgacgccgtcgatctgaatctcctgacctgcatacttgccgtaaagcacctgatcgccggccttgacctccatcttgacctccgaggtgccggggccagctgcgactactttacctgccagcggtttctccttcgccgtgtcggggatgatcaatccgcccgccgtcttctcctccgcaggattcggcagaatcagcacacggtccgataatggttttacattcatagcttttgttgtttttggtttataatgatgtattagttagcatttgcaatctcctttccttcaattgatgtgccaaccggtttttggcagatacggggtgacaaaggtacatgccggactgtcattttgtcacgcggcgcaatttttcgggcgatttttttgcacggaccgaaaaagtatattacatttgcatcccgatacgaccggacaacggtcacacggtggatgtagctcagtcggttagagcgtcggattgtggttccgaaggtcgtgggttcgagccccatcttccacccttagaagcagttgaaaatcactgcaataaagagtaaaaaccttgtatatcaacgatatataaggttttttcgtttttgaaacaatcgcataaaatgtattctgaagcaggtttttatgacccaattcgtgacctattttatttcggtcaaaaattggtcacgaattacacataacacactgtattgcaccgttttacgccacaatatccctatgctgcacacgtttaactatttcaaacccatgcagctatgtaccaacgcacaacattcaacgtagtctttttctgcaaaaagaccaaaatctctaaaaaaggaaaggcgcctatttatgcccgtatcaccacatccggccaaacaacagagatctatacccaatgtcaaatcgaaccggaacgatggaaccagcgcctcgaacgctccctttacaaagacgaagtggatcagcaaattaacagcatcgtcgccagttatcgggcaaatatccttgcggcttacgacctgcttctcaaagagagtaaaactccggactgcttttccatcaaacaacgactgagcaatgtatccggttcaagaatgttcctcgtcgagttttcgaaatactgcgataaacggcaacaggaggtcgggacacgtatcacacaggtaacgtgtaacaaataccatcgtttactccgatacatgaccgaatataccaaacagcaataccggaaagatgacctgccgctggatatggtttcctatgaatatatagacggcctaaataccttcatgcaaacagcccaccaatgcagaaacaatggtgccgtaaatttactttgctgtctcaaaaatttcatcttattcgcgatacggaacgaatggattgaaaaaaatccgtttcagtattacaagatgaaaatagacaaaacaaacgtcaaggttccattgacaaaagaagagctggacatattgataagcaaggaaatgcctaatgaacggctggaatgtatccgagacgtattttgcttctgtgcattaacgggactggcctttacggacgcagacaacttacgaaaacgacacattacaacggatgacagcggaacaacgtggatacataaaccacgcgaaaagacctctgtaataagtcgtgtgccacttctaccctacccgctcaaaatattacaaaaatatga

SEQ ID NO: 12053 - DNA, 69474 bp, Unknown
  gut microbiota DNA sequence
tcagcagggatttttcgttatgaacaatgttccggcgaaatccgaggaactgcaaatctcctatttggggtacaagactgctacggtagccgttgcgcctgaggtgaaggtcacgctcgagccggattctcagaccgtggagacggtcgtggttacgggtatgaccaaaacggataaacgactgtttaccggtgcatccgaccagttggtcgccgacgatgtgaaactatcgggtctggccgatatcagccgcggtctggaaggccgttcggccggtgtctcggtgcagaacgtatcgggtactttcggtaccgctcccaagatccgcgtccgcggtgcgacgtcgattcacggcagctcgaagccgctttgggttgtggacggcgtcattatggaggatgtcgccgatatttcggccgaggacctctcttcgggtgacgccacgacgctgatcggttccgccatcgcgggtctgaacgccgaggatatcgagagtttcaatatcctgaaggacggttcggccacctcgatctacggtgcgcgcgctatggccggcgtgatcgtcattacgaccaaaaagggacgtgccggcgtcagccatatcaattatacgggcgagttcacgtatcgtatgattccctcctacgccgatttcaacatcatgaactctcaggaccagatgtccgtctatcaggagctgtacaacaagggctggctgggcaattcgcgtgtcaccaatgcgtcggcgagcggtgtttacggcaagatgtattcgctgatcaatgccggactgctggaaaataccgtggagacgcgcaaccgctatctgcgcaaggccgagtaccgcaacacggactggttcaaggagcttttccagaatacggtcatgcactcgcattcggtaagtatcacgtcgggtaccgagaagtccgcctactatgcgtcgatcagcgcccttttcgatccgggatggacgaagaccagcgagatttcccgttatacggccaatctcaatgcgacgtataatatctcggacgcccttacgctcaacctgattaccaacggttcgtaccgtaagcagaaagcgcccggaacgctcggcgccacgaccgactatgtaacgggcgaggtgaagcgcgatttcgacatcaacccctattcgtatgccctgaatacttcgcgcgtgctcgatccgaaggagtattatgtccgtaactatgcggatttcaatattctccatgaactggcgaacaactatatcgacctgaacgtcgccgatgtgaaattccaaggcgaactgaagtggaaggctttcaagggattcgaggcttcggcgctggcgtcggtgcgctataccggaacttcgcaggagcataacgtacgcgaggcttccaatcaggcgaacgcctaccgggccatgggtacgacgacgattcgcgacaacaacccgttgctgtacaaggatccggatgatatttacgccgttcccgtatcgatcctgcccgccggcggtatctacacccgtacggacaaccggctgctgtcctatgacttccgtttctccgcgacctataatacgacgatcaacaatacccatatcgtcaatgcctatctgggtatggagaccaaccagagcgatcgtcagaaaacgtggttccgcggctggggcctgcagtacgattcgggtgaaattccgttctacgactatctcgtcttcaagaagggcaaggaggataactcgccctattacgaaatgggcaacacccactaccgcaacgtcgctttcttcttcaacggaacctactcctacaagggccgctatacgcttaacggcacgctgcgttacgaaggtaacaacgcgctgggcctgacgacccgttcgcgctggctgcctacgtggaacgtttcgggcgcatggaacgtccacgaggaaaatttcttcaattcgatcagcaaggccgtttcgcacctgtcgctcaaggcctcctattcgctgacggccgaccgcccctcggtgaccaatgcgctcgccgtcatccagagctattcgccgtggcgcccctcggccggcgttaccgagtcgggtctgacgatcaaggatctggagaacagcgatctgacctacgagaagaagcacgagctgaatatcggtgcggatttgggctttctggacaaccgcatcaacctgaccgttgactggtacaagcgcgacaacttcgatctgatcggtctggtgatgacgcagggtatcggcggtcagatccagaagtacggcaacgtcgcgacgatgaagtcgcggggtatcgagttctcgctttcgacgaagaacatcaagacgaaggatttcagctggaccaccgatttcatctattcgcacatgaagaatgaggtgaccaagttcaatacttccacccgtgccttcaacctcgtttccggtatcggtttctcgcgtgagggctacccggtgaattcgcttttctcctacgatttccgggggctgaacgaagacggcgttccgacattcatcaacgaagcgggcgtgctgacttcgaccgatatcaacttccaagagaccgagcgtttcgacaatctggtttattcgggtccctcggagccgacggacgtcggaagcttcggcaacatcttccagtacaaaggtctgcgtctgaacgtcttcatcacctattcgttcggcaacgtcgttcgtctcgatccggtcttctccagtatctataacgacctcgacgccatgccgcgcgagttccgcaaccgctggatgacgcccggagacgaaagatacaccgatgttccggctatcgtgtcgagccgtcaggtacggaatgacagcaagctgtcgtacgcctacaatgcctacaactattctacggcccgaatcgctaaaggcgatttcatccgcatgaaggaaatttcgctgacctacgacttcccgaagcgctggatcaagaagctgagaatgtccaacctcgcgctcaagattcaggcgacgaacctcttcctgatctatgccgacaagaagctcaacggtcaggatccggaattcttcaattcgggtggtgtggccactcccgtgccgaagcagtttaccttaacgctcaaaatcggtttataatttagtttaaagcatatgaaaacgaacaaattgatatatttcctgcttgcgggacttcttgttgcgggactctcctcctgtaacgatttcctcgacgagcagcctgacaaccggacgattatcgattcggaagagaaggctatcaagatgctggtatcggcttatgcggacagccagccgtggcttttcctcgaaatggcttccgacaataccgataaccacggcgccaattacgatggctggagccgtttctggcaggagagctatgaatggagcgatccgaccgaaaccgacaacgaagacgccgctcacacgtgggaagcccattacatggctatcgccaacgccaacgaggtgctcaaggccatcgacaagatggagatgaccgacaaactgagcgccgcaaagggcgaagcgcttatctgccgtgcctacgcccacttcgtgctggtgaacgttttctgccagcattacgatcctgcgcatcccgacgatctcggtattccctatatggagaaggccgagacggaactcgatcccaaatacgagcgcggaaccgtcgccgaggtctacgccaagatcgagaaggatatcgaagagggactgccgctgataaacgacgtcatctattcggtgcccaagtaccatttcaacaagcgtgcggccaatgcgttcgcggcccgtttttacctctactaccagaaatgggacgaggcggtaaaatacgctacggtggcgctgaccaattcgcctgccggttcgctccgcaattatgaggagctgctggaatacccgatgaacaacggcgctacactgaatacggcggctacctactatgtcagtgcggatctgacgtgcaatttcatgatggccaccgcctattcgtatgccggccgtgtattcggcggatacggtgtcggaatgcagtacaatcacggacagatgattgccgataacgagggcatagactgcacgaatactcccttcgctccctacacgtggaagtgcgaaccgcttcgctttgtcagcggaatcgacaaaatcctgctgccccgtgttccctatctgatcgagtacctcgatccggtggcgggaacaggctacaggcatactgtctatccgcttttcacggccgaagagactctgctgacccgcgccgaggcctatatcatgcagaaggactacacggcggccctgagcgacatgaatctctatctttcgaattcatgcagtaaatacaagacgctgaccgaggccaatatttcgagctgggccgcatcggttgcggattacgatcccaagaatccgactccgaagaagccgctcaacccggccttcgaaatcgatcagacgcaggagggcatgattcatacgctgctgttgctgcgccgctacgagacgctgcattacggcctgcgctggttcgacgtgaagcgcttcggcatcgagatttaccgccgcaccctgaccagcaacgatttgggaatcaagagcgtggacgatacgctggaggtccgggacaaccgccgtgccgttcagctgcccgccgatgtgctcgcggccgacatgactcctaatccgagataatgataattcgctgatctatatataaaagttgaacgttatgaaaaaaacaatattaggattattcgcattcgtctgcgctttttcgggcgtctcgtgttccgaagacgatctgagcggcacgagtgtcatcaaaccggagcagacgacggagacgcctttggacgcgtggctttacaaaaactatatcgagccttataacatcgagttccgctaccgttatgaggatatggagagcgacatgatctacgatctgactcccgcgaactacgagaagtcggttcagatggccaagctggtcaagcacctctgcctgcaggcctacgacgaggtgaccggaagccgcgacttcatcaccagttacttcccgaagatggtttttctggtcggcagtcccgcctataacaacaacggcgaggtcgtgctgggtacggccgaaggcggaaccaagattacgctctatgccgtcaacaatatggacccgaccaatgtggacctgctgaacgagtggtatttcaagacgatccaccacgaattcgctcatatcctcaaccagaagaagcccttctcgacggatttcaatcagatcaccggtttggccacgggcatccgctatgtcggcaacgcctgctgggatgtctatccttcggaggacttggcgcttaaggacggttttatcagccgttacgcttcgacttcggccgaggaggagttcgtggaggtaagctccatctacgtcaccaacacggccgccacttgggaggagatgctcgaaacggccggcgaggtgggccgtccgatgctcgaagccaaattcgagatcgtggacaaatacatgaagaacgattggggaatcgatctggacgaattgcgcaaagtcgttttacgccgccagaaagaacttccgaatctcgatttagatgccactaattaagtaaaaaaggatgtttatgaaaaaaatattgatattactggctctgcccctgcttttcaattcctgcctgaaggacgatgaggataaattctcgaaatcggcgacggaacgtattgaagaggcggtcaaggaagccatcactgtacttcagggcgcagaaaacggctggcggatggagttgtatcccgaaagcgagcgcatttacggcggctacacgcttttcctgaaattcaatgccgacaatacggtcgtcgcttccagtgagaatttcgctgcgggcaaaaccgaatcgtcctactattcggtggttgcggagagcggtcccgtactcgcgttcgacaccaataacgacatcatccacttctactcctcgccgacgacgggggctgaactcggcatcggtacgagcaacggaggtctggagggcgattccgacttcatcgtcatggaggcttccgccgatttcgtgaaactcaaggggcgcaaaaccaacaattacgcctacctctatccgatcgaggcgggggtgaactggaagaccgaattgcagagctatcaggatgcggctgccaagatggacctgatctatacccgttgcgtggtcgatggcgttgcctatccgattgactgggagatgaggctcaacaacttctcttcccgcgttttcaggatctcctacacgccggctcccggagacgacggttcggtctccgcgggcgaggtcgtcaaggctccttttgtctttaccgaaacgggtctcaaattctattcgcccctgacgatcggaaacgctacggtttcggagatgactttcaaggaggactattatttcgagaatgaagacggaagcgtcaagatctattcgcccaagcccgtccgctcgaataacaagcttacgatcaatccggcggacattaccttcagcagcgcgaccgtcaatgtgacgccgagcgtcgccaccgattattactatttcgacgtttatgaaaaggcggatctcgaaggcgagagcgacatggcgatcatcaagtcgctgatctccgagatgaactccttggtcgggacttatacggccgatttcatcgtctccgctctcggcaagaagggcgcggcgagcgagatcttcgaggacctctcttcggaaacggatcatgtggtcatcgggttcggcatcgtcgctacggagaatgtggttctggctacgacggatcttttcaggaaggaattcactacggagaaggctcccgaactcgatgaggcttatgccgcttggctcggtacgtggaccgtgacgagtacgacctcgatgaagtctgccaagccgatctccttcgacgtcactttctccacgaaggtcgccaataccaacttcgcgcttaccggatgggccatctcggcttatcgcgaccggttccccgcaattgccactttcgacaaggaaaccggttatatcatgatccagagctatcaggagatcggagctaccggagacggcaccgttcgctatgtcgctctttgccgtgacaagaatgtaagcggtaaatattattatccggtaggcggttcctatgtgggcctgatcggtgccataatgtctgacggaaagggcaaggttatcggcaatgaactcactcttacgggcgatgtggaggccgaggtggttatgatggaccagttcgtttacaatgggtccaactatctgggcaagtataatccgacggccgactccggatttacggccgacgactatccggtcggaccgtttacgctggtgaaaaaatctccggccgctgcccccgttaaggggaaagccatgctggcaggtaaatttgcagctgctgcggaccggaatatgaagccggccgttccgcaattgacttcggcgccgtcgttcgaacggcgtgccgttaatgcaaatgcagtgatgctcaagtaagatcgcttgcattattgatcaaggggagggaggagcatcgacggctcctccctttttttgtgaagccggggtagggcgtgagatgtttccgcaactgaaaaaagcagaaaaaatgcagcgggcatttgcagatttgaaaaagaatttttacctttgcaccacgataatacggaaaggagtattcctaaccacgatatcgggatggtgccatagctcagttggtagagcaaaggactgaaaatccttgtgtccccggttcgattcctggtggtaccacaatgaagcaatagccgctgcaaattcaatttgcagcggctaattttttatcgtatcttgatgggaggttcccagagaggcggttttgcaggctgtttcatgctgctcttaagcaggcggtggtattacgaatatcgaatttttgcggatagattgaaaattgaaaaaggcaggtttctcagacctgccttttcgcgtttgcgatcgtatgcttttttcgacttgtggacggcccggaaccttgccggacggccgtgccgtgcaatttcctcctcgcggctcgccttgcggtgggccttgaggtaatcctgctgggtgatcttttgttttttcatgttacactgcgtttttgacgggctgggtgcaccatccgcgggggtaaaggtagcgaattcgtccggatcggcaaaatcggcaaaaaaacttatctttgccgacgatggatttcaaccgttacatatcggccgccgaattcgcgccgcttgccgagctgttccgcagggagggtgaaagcctctccgtccccaaggacggctgtttttcgttccagcaggtccgcaaccgctgcagcggattggtcgaggagggcgctttccgctatgtgcacgccacggaagcgggcgagcgacatgtcgtcgggtacgctttcgccggggagtttgtcggtgactatatctcgatgcgcaacggcgtccccgcgtgggtgagtatcgaagcgatgtgcgacagcagagtgctgacgctgacgggcgaacggctcgaaaaattctaccggaccgacgctgcacacgagcggttgggccgcaccgtcgccgagcatatgctggccgagatttacgaacggctgctgcaatcgtacgtctcgactccgcaggagcgttacgaatcgctgctggcgcgctgtcccggcctgctcgaactggtcccgctccgggagctggcctcgtttctcggcgtgcgtcccgaaacgctgagccgcattcgccgccgggtgcggtgatttcttgattcggatcaagtgttttccgctttccgcgtcctatctttgcgcatatgaaacgagctattgtcatcggtgccacttccggcatcggccgcggccttgcggagtgctttgcggcgcagggatatgccgtggggctggtcggccgccgggaaaatctgttgaaggagatcgcgcagtccgatcctgctgcataccgctttgccgtcgccgacgtgacacggcccgccgagacagtcgccgcgctggaatgtctggtccgggagctgggcggcatggatttgtgcgtcgtcagcgccggaacgggcgatctgaatccctcgctggatttcgcgctggaagagacggccatccttaccaacgtgctgggctggacggcggtcgcagactgggcctacaaccgtttcgagcggcagggcggcggacatctggtcatcgtctcgtcggtcggcggactgcgcggcgggggagcggctccggcctataacgcctcgaaagcctatcagatcaactacgccgagggactgcggcagcgcgccgcgaaatccagactcccgctttacgtcaccgacgtccgtccgggcttcgtcgatacggcgatggccaagggtgacggtctgttctgggtgatgccggtcgaaaaagccgtccggcagatcgtgcgggcggtctgccgccgcagacgggttgcggtcgtcacccgccgctggcgcatcgcggcgtggctgctccggcatatgcccgacggaatctacctcaaaatgtaatgtgtatgaacggatggtttattgcggcggggacgctgcttaccgcggcgttcttcgtccatgtcgtttcggggaaccgcttctatacggcagcatgtcccggccggaacgccgccgcggacaaagcctacgaagcgtggctgatgggacggtgcggcgtccagatgattacggcggatctggccctcggagcggtattcctgctgctgttcggcttcggagccatttcccgcaatttccagctggaactcttcctgctgctgacttacggaggctggttcctgctttggctggtgtcgctgggctatgaacgcgcggcgaagacccgttacctgcgcctctgccattgggcgctgtttctgacggtcgccctgctggtcctgctcggcatgtagcggcggtacgcccggcgtctctccggcagactgtcccggttgggacggctgttttccgctggcccgcctatccccgaagggccgctatagagtcgtgagcgatttcacgccggcgttgtattcgccgatgatttgccggacgatttcgcctgccggcggcaggtcgcggatcagcgacgcgatctgtccgatctccagctccccgtctgcgagatcgccctcgaaaatgccccgcttcgaacgcccgcggcccagcagctccttcagttcttcggccgaggcgccccggttttcggcggtttcgactgccgtgtagaagtcgttgcggatcaggcgcgtcggcccgatctttttcagcgccagcatcgtgccgccctcttccagcccgatgcagagccgtttgaaggcgtcgctggccgaactctcttcggacagcgcgaagcgggtgcccatctgaatgccctcggctcccagcgcgaacgccgccagcatgccccggcccgtggcgatgccgcccgccgcgatcagcggaatcgtaatcgctgcgcgcacctgcggaaccagcgccatcgtcgccgtctcctcgcggccgttgtgcccgcccgcttcgaatccctcggcgacgaccgcatcgacacccgcttcctgacttttcagggcgaatttcgtgctcgacaccacgtgcgcgaccttgcagcctgcggcatgcagttgcccggtccatgtcttcgggcttcccgccgaggtgaataccgccgggacccgctcctccatgacgacctgcatgatctgctccgcgtagcggtacatcagggggacgttcacgccgaacggtttgccggtcgccgcgcggcatttgcggatgtgttcgcgcagcaggtcgggcgtcatcgagcctgcgccgatcaggcccagtccgcccgcgtcgcttacggccgccgccagccgccagccgctgcaccagatcatgccgcccgcgatgatcgggtagcgaatgccgaagagtgtggttattctgttttccatgcttacggaagtttagtcgttgcaaaagtagccaaattatcgggagtccggcagggcgtttctgctaaatacccggttttttgcttgcccggtcccggaaaaattcccatctttgccttccgttttacgcaaacaataccgaaaatgctctataccgaagaatcccggatcggcgcgctggccgtgcatatcgtgggcaacaaagcaaaagacgagccgctgatggtctcgccgtcgctctccgaccagctctccgacgcgcccctgatgcagacgctgctggcctatttcatgggcggtttcaagtccgaggagtatttcaacctctaccacgacaccgacctgacctgcaacgaggtctggaatttcacctgcaggatcttcgacgaccccgaatcgttttacgaccattcggtcagccttgccagacatctttacgaaaccggcatgcacccccagatcaagagcggggaattctatgtcgtctacttcaccgactgccgtttcggaggcgagacggtcgatgccgtcgggctgttcaagtccgagacgcgcgacacgttcctcgacgtcgaggagcaggcgtcggggctgcatatcgccgcgcatcaggggatcaacgtcaataagctggacaaggggtgcgtcgttttcaacaccgagcgcgaagcgggtttcgcggtctgcgtcgtggacaacaccaaccgcgccgaagcacgctattggatcgacgatttcctgcacgtgcgccagcgtcaggacaattaccacaatacccacaacgcgatggccatgtgcaagaagtacgtgaccaagcatctcccgaacgaattcgaggtgtcgaaagccgatcaggccgagatgctcaacgagacgatgaaatacttcaaggagcaggacagtttttcgctggacgacttttcggagaaggtgatccgccagcccgaagtcatggagagcttttcgcgctacaagcaggagtacgagcaggaccgcgacatccgcatcgaggacgaattcgccatctccgaatcggcggttaagaaacaggcccgttcctacaagagcgtcatcaagctcgaccgcaacttccacatctacgtccacggcaaccgcagtctgctcgaacagggcgaggacgagaagggcaagttctacaaggtctattacgaagaggaggagtagcggcgccttcggttctcttcggttctcttcggttctcttcggttctcttcggtcgatcggcggcccgcagcgatgcggcccgcttttttgtgtcaggaccttttgccggcgtttttcggtgttgcgcgggcggctgttccctgagtggctggcgtccccggtgtctctggcgtccccggtgtcttcggtgtttccggcgaaattcgcagcgacttctcccgtttctcccgtttctcccgtttctcccgtttccctcccgcgccccgtattatacttttttcattccccgtctgctatcctccgtccgccgtttttccgctcgccgatagccgctcctctccgtattgtcccggaaaaattgcccctccccggtccgaaaccgcaccgaaaacccggccctgcgttgattttgccccgttttgcttgctttattccattattttttgtaatatgaatttattatccgtgcgtgttgtgactgcacgcacggtaccggccgtgctgcggaaccggatgttttccgaagaatctgtattatggccgctgggggttgtgataattgtagcttgcgacgggaagtattttgccgtcgtatcgatcgttttgggatgtgacgccgcctcggctgccggattctttctatctccgatattccgaaacggcgcgattgtggcgtgaacgggtgtgagttcccggcctgcccgcgattgagcttcgaaacggggcacttcttttgtaagctacaagtgtgtagtaaaaaatcaggctattattccggtaatttacgctatgaaaaagcagaggcgaaatgacttttttattgggcaggttgttgccgggctgagagcggcccggttggaacgcaagctgactcaggagaacgtacgcttcgataccgatctgaatatcgcacggatcgaaagcgggcggcacagtatttcgctgactacgatcgccgatttatgtgactattataagatttctccggcggatttgttccggaacattgcgacgcatccctgacttcacacagaaagaaccggtcttaaggccggttctttcgcttatgcttcgaagggtttctcgaaagccagcctttcgccgcttccgtagacgattttgccgcagtaggcgaatcccagccgttcgagcatccgcagcatgtagcggttgtcgaaattggtgtccaccctgaaactgctgacgccccgttcgcgggccagcgcttcggtgcggcgcatgaactccgccgccacgccgcggcccttctccccgtcggccaccgccagccggtgcaggacgacgtagtcgcccccggtcagccacgccccgtctattgccccgtaggccggttcgccgtcgaaaaccaccgccccgtatgcgatgacggcgccggatgccctccctttgtcgcacttctgcggcgttccagcagctgcgggttcctccgccgtgccggacttctcgaacacatacccgtacccgcgcgctatgtcgttgtcgatgtcggcccgtgcggggtagccgtcctgccattgcaggttccccagcgcccgcatctgggcctgcgcctgccggatgatctccatgatgcgctccgcatcggcaggctcggccttccggtatttcagatcttcgttcatggcggcaaatataggataattgccggaattggaaaagactttttttcagtccgaaggggtgtgccgccgtacggtgaatatattttcgtatttttgccggaaacagaatcatgccgatatgaagagattcgttatagcctgcgtctgcctgctcgccgcctgcgcggttcccaagggattcaccgataaggaatgtgaagtgattgcctcgcagagcggggcggtcatgcgcttgtgccggatcggcgaccgtgccgattcgctgtttctgcggcggaaggccgcgccgctgggggctgaggagttgaagtcggaatatttccgccggctgaagcagggcatgctgctcaccgtgcgggatactgccgacgaaggtgtcggaatcgccgcgccgcaggtcggcgtttcgcgccggctgatcgccgtgcagcgtttcgacaagcccggcgaaccgttcgaatgctatgtcaatcccgaaatcgtcggtcgctcggcggcccgtaccgccggcagggaggggtgtttctccgtccccgaaacgtcggggacggtcctgcgtgctgaccgcatcgtgctccgctatctggatgaaacgaccatgcgaccggtgacggataccgtcgagggatttaccgccgtgattttccagcacgaaatcgaccacctcgacggggtgctgttcatcgacaggatgcagcgcgggaattagtccattccgacgcggaaagcgggaaaaccctaccgaaggttttcccgctttaccttatgcgaatgcgaagcgtctgctgcgcagcagatagacgagcagcagtgtttcgagcgcttccgcgacgggtaccgcgagccagatgcccgtcacgcccgccatgtgcggcatgaccagaaagcagaacgtcatcagcacgatgccgcgcagaacggtgagtcccgttgcgagccgtccccgttcgatgctctggtagtagccgatcgtcacgacgttgatcccgaagaagggatagcccgccgcgaaccacggcagtccctgcacggcgatggcgtacgccggggcgtcgggcgtcaggaacagcccgacgatccacggactgcatagccacgtgaatccgaacgccgccgcgccgcacagcgccgccgtgccgagcgccattcgcagcgctttccggccgcgccgcatcagccctgcgccgtagttgtagctgatgatcggctgcgccgactggatgatgccgttgtagaccatgaagatgatcgggaagatgtagcaggcgatgctgtacgccgccacgccgtccttgccgacgtaatggataaaggtgtagttgccgacgatcatcaggcacgaaatggccagctcgctcagcagcgccgggaatccgatatagctcatgtaccagaggttgcgcaccgtgagccgcatgcttttgccgcttatcttgagcttcacgaaccggagcgtccggctgcggcggaacatgtaccaaagcatcacgcccgaaccgacgacgtaaccgatgcccgtggcgacggcggcgcccgccagtccccattcgaatacgaaaatgaagaggtagtcgagtacgatgttgatgcacgccgccatgatgttgcaggccatggcgaatcccggcgccccgtcgagccgcacgatgaacatcaggatgttgaagacggccagcggcgccaaaaacagcgtgaaccatacgaggtattcgcgcgccgggaccatcagttcgccgggggtgcccagcagcaggagcagcggttcgtgccaatggatcagcagggcgctgagcagggcgatcagcagcgccggaagcaccagcgactgcgtgatgttgatctccgccacgcgtcgtttgccctgcgcgaggttgatcgacgccacgaccgagccgcccatgccgaacatcagtcccagccccgtgccgagcgtgaagagcggcgcgacgatattgaccgaggcgagggcgtcgctgccgatgccccgcccaacgaagatgccgtcggtgatgacgaacacggccgagaagaccatgcccatgaccgtgggaaagaggaagcgccggaaaagttttccgacgtccgaactgctgaaatcgatactgtctcgttgcatattccttacttttttcgaagtggtgcaaaagtaaggctttcggcgcggggaaaagttaccttatgataatttcgtcatttgatttcggcccggatgcggctcaggctttggggcgtgacgaagaggtaggccgcgaggtctttcagcgcgatgcgctgcaataattggggatattcgcgcagtacgcgcttgtactgctcgctcttgtcgcgccatgcgaagtcggcgaaatactcctcgtgccggcgcagctgctcttcggccatgcggcggccccagtcggccagttcggcgtccgccgcgaagagcctgtcgatctcctcgcgcggcaggcgcacgagcgtcgtcggctccatggtctcgatcgtgtggcccgaaatgccgccgggccatgctccgagcgtcgatgaggtcggatcgccctcgaacgcaaaggagaggatcacgcacttgtcctcgcgcatgacgtaggagcgcgccgaaccttccgtcacgaagcggatctcctgatcgcgctgtccctcctcgacgatgatctccttgcgggcgtggacgctttgcgacgcatgccgcatcagcactccggcggcccgctccgaaagcccgtaacggccgcgcagtatttcggtgaattccatgccgcgaagttacgtatttttcccgtacttatgaaatgcgccgtccgctcccggcctgccggtctgtcatgtcgtatttgcaggttttgtgacaattcgtgacatttttgcatttattcggcgctggcacaggatttgaccctctacggatgaaaccgctccgagagggggcgataaaaaggaaaacagttaaaccgaataaaaccaaggaggacaaaattatgacacctgcaagaacgaatcagaactggctgccgggaattttcaacgagattctgggcgacaactggctggccgagcgccgcagcaccacggctcccgccgtcaacatcatcgacggtgaaaacgaatacaaggtcgaggtcgccgctccgggtatgaccaaggaggacttcaaggtccacatcaacgaagacaacgagctggtgatctcgctggagaagaagaccgagaacaaggaggaggacgccaagcgcaaaggcacctacctgcgccgcgaattctcctacacgcagttccagcagagcctgctgctgcccgacaatatcgagcgcgagaatatttcggccaaggtcgaaaacggtgtgatgaccatcgacattcccaagaagaagatcgaggagactgccgccgccacgcgccagatcgaggttaaataggggcttgcgcagcctgacgataagcagagcgtccgtaagggcgctctgctttcgttttgccgtcggcgttcggctttgcagtggatgtccggctttgcggtgtgcgtccggttttacggcgtgcgtccggctttgcggcgtgcggccgaaccgtcggctctccggctggggagatggtttttgccggaacgtatgaacggttccgttccgtttttttgcaactgttctgcggtgctccgggacttgcatttccgtcgccgtttttttatctttgccgtatgacgaccgaactttgtgcctattccattgaagcgtgcgagaccgcccgccgtgcgggtgtcgcccgcgtcgaactctgcgcctcaccctacgagggcggcacgaccccttcggccgcggccatccgtatggcgcgccgcatcgaaggcttgcagctcagtgtgatgatccgtccccgcggcggagatttcctctatgacgacgccgaattccggcagatgctcgaagaggtgcgcttcacccgcgaatgcggcgccgacggcgtggtcttcggcttgctgacgcccgacggacgggtcgatacggcgcgtacggcggccctcgtggccgaagccgggccgatgcagaccaccttccaccgggcgttcgacatgacgtgcgacctttccgatgcgctggaggaggtcgtccgcgccggatgcacccgcatcctgacctccggcggccgcaatacggcgtccgaaggcatcggcgacctccgcgcgctcgtcgtacgggctgcgggccgcatcgagatcatggccggcagcggcgtgaatccgtcgaacgtgcggcaactggccgcgacgggtgtcgatgccctccatttcagcgcgcgcggcatgcggccgagcggcatggcataccgcaatccgcagatttcgatgggcggctgtcccggcgtgccggagtacgcttcgccctgcgccgacgaacggaccatccgacaaatcctgaacgaattaaaccgatgaaacgcattttcctcctgcttctgggactttccctctgcgcctgcggccgttacggctgcggcgttcccgccgaatacgaacctctgctcgacgcagcgctggccgactgtccgcgcgccgacagcctgcggcagctgctgtgcgaaactccgcgtgaccggcgcgcggggatggctttccttgtagcctatatgccgcagggcgaccgcgatacgatgcggctcgacctgctgcgcgaaaatgtcgagtacgcctaccgtgcgcgggaaacctacccgtggacgcgcgcattgcccgactcggtctttctgaacgacgtgcttccctacgccgtcgtggacgaagtgcgcgacagctggcggcccgacttttacgcccgcttcgcccgccgtgcggccggagccgcggacgtccgcgccgccatcgactcgatcaaccggcatattgccgccgatgtcgccgtagaatacaacaccgcccgcgaaaagaccaatcagagtccctccgagtcgatgcgtcagcatatggcctcctgcacgggcctttcggtcctgctggtcgatgccctgcgcgccgcgggcattcccgcgcgcttcgccggaactcccgcatggcacgacgatcggggcaaccacagctgggtcgaggtgtggatcgacggccgctggcatttcacggagtattattttccgggaagactcgattacgcatggtttttcgccgatgcgggacaggcctcgcccgacgaccgtgcgcacggcattttcgccgtttcgttccggcctgcgggcgactggtttccgatggtgtggagcgaggattcgcgcgaggtccacggcgtgaacgtcacgcagcgttaccgcgacctctatgccgcctatgccgatgacctcgccgagcggggacggcatgcgaccgtgaccttcatgatgtacgacaaggcggcgcatgccgggcgttccgatgcgcgcgtggcggccaacgtcgatgttttctgcggttcggagcagatgggcggcggccgtacggccggtccccggcaggacatgaacgacgccctgcgcttcctgctcgaaaagggaagaacctataccttccgttatgaaaactcccgcggcgaagcggcgcaggtgaccgccgaagtgggcgacgctccgctgaccgttaccggctatatggaatagcggccggaagcggggcgtgtgccggggccgggcgccaaccgatatgtttccaacacaacaagacggcagagattttcgctctgccgtcttgttattatacccggtgtttccgcggaagcgcccctcggcagctgcgtttcggcccgcatccgctgggcactacccgccggctccggttattttccttcgtccccggttggctctggttcgaaatcgacatcgacccggtcggtctgcaggtttgggatcggcacgatccgctgcggcgtttcgcccagcgacagatggaggatagggtagggcctgcccgacggatcggtcgcgtcgcgccccgtgacgcggaatcccagccgggcgtaaaatcccgccgcctgcgcgttctgctcgttgacatcgacccgtcttatgccgcattcgcggacgagatattccaccagttgccggcccactcctttgccgcgcgcttggggcgcgacgaagagcatttcgagcatatcgccgtcgatacctgcgaacgcggcgaatcctccgaacatcccgttctcgtccaagccctccggtcggcgggattctcctgtcttgccggatgtccgggactcgtgccggctctcctgtcctgcggatgttccggtttcaggcgccttgctgcccggcttccggatgacgtgtaattccacaccccggagcgcttcctgccggaccatttgccggaaaaacacgatatcctccggcgcgagaaagtcgtgcgtcgcccgcaccgaggcttcccaaaggtcggtcagggcgtccagttctcctgcggacgggtttttcagtcgttctattgtcatattacataattgttacgggtggtttgcgccgggcgaagttgcgcgacagaacggcggcgaaaggtgtttcgaacgtgcgtgcgccgaacgcgcagcctttgacgcatgcacagcagcggatgcagcgcgccgggtcggtgtgcagttcgtcgccgcgcgcgatcgcctgcgtgggacagagcgcgacgcagcggccgcattgggtgcaccgtgcggcgtcgcccgcggggagcagtacggccggagtgcgtttctgccgcctgcggtaccccagcacgaaacggatgaaccgcagttttgacaacagcggcgtatgcggctcgcggagttttgcggcgtcgatcgggccggtctctccgtgcgcaagctttcggccgatgcgcgctccgaaagcggccgcttcggcgaggtcctgcgtatcgggacgtccttcggcgatcggcgtgccgggcgtgctgtacgagtgttcgcccacgaaagccccggccgccacgggaacgaatccccgctcggcgacgaacgccgccagttgtgcgaccgccgttccgaaagcccggttgccgtagaccgccagcactacggccggcgttccctcgccgcgaatctcccgcagtctttccaatgccgcaggcgccacgcggcccccgtataccggcacggcgaataccgccgcggcatcggccggcagcacgggcggttttcccgccgcatgcgtcaggtcgattgtggtgaacgcctttgccgcgctgcctgcggcggcatttgtaccggcgtccggaacggccgccgcatttgccgctgcattgcagctctcgccgtgccgggccactccctgcgcaaccgccgcggcgatttttctcgaagttcccgtcggtgaaaagacgacggtgtagactgctgtcggattcataggctccatgttgtgtgttgcgcaaaggtacgaaaaatcgccagcccgcaggtatccggcagcggaattgcattcctgattttggaaaatattttttatatttgcatgtaaacctctaaatttcagaaacgatgactgtgaagattattacctgtgcggctctgctgctcgcggcatgcggcggcgcgcagccggccaaggaggagaccaagacccccgaaaccgtgaccgaagtgaagcacggcgcggagatcgcccttctcaaacccgattccaaggcgggcatgaccgtaaacgaagcgcttgaaaaccgccgttcatggcgtgaatacgctcctgaggcgctttcgctcgaagagctttcgggcgtcatgtgggccgcagggggcgtcaaccgtcctgccgacggccgtctgacggctccttcggcgctggcgctctatccggtccgcgtctatgcctttttcgccgaaggcgtctacagctacgacgccaaggcgcggaaactcgtgcgcgtcgccgaaggcgacctgcgcaggctggccggcgcacaggatttcgtctatgccgcaccgctgaatctggtctatatcgccgatatgtcggcctacgaaggaaagaatattccggccgaacatgtccgctacctctgcgggcaggacgccgccggatatgccgagaatgtgaacctctatacggcaggtcacgggctgaagtcgatcacgcgcggcagcgcccccgaagccgaactgctcaaggcactcggtctcgatcccggacgctattttatggcgttggcgcagacggtcggcaaataggccgggcggcgaaccccgaatcggaggagcggctttgaaccgctcctttttcatccccgtacggccggaacagccggatttctaccgggagagggcttgagaccgcttttgactgaatatcccgccgctaattgcaaccgggattatttctcaggccggcggggacgtgccaatatacggccctgccggcagttttttaccggatggagtgtcgggctgcggatttccgggttttttgttacctttgtttgcgaaatcaaaaccgcctgatttttatgacgaaacttcaatcccgaaaccacggtctcgacctgttgcgtgtgctggcctgttacatggtgcttcaggtgcacgccggagaattctactatattgccgatggcggtttggtcgccgcgggcggcgagcctgtctgggcctgctggctcaactcgttgtgccgcaccgccgtaccgctgttcgtcatgttgtcgggatttttcctgcttccggtgcgggagcgcacgcgcgactttttcgcccggcgtttcgtgcgcgtggtggtgccgtttctggtgtggtgcgtgctctacgcaatctaccagttcctgacgggacggaccgatgccgccggagcgttgctcggcgtctgccgcatcccggtcaatttcggcgtcgagatcggacacctctggttcgtctacatgctgctgggactctacctgttcgccccggttgtctcgccgtggatcgagacggcttcgcgccgcgccatggagggttatctcgcgctttgggccttcactttgtgcatcccctatgttcacctcgttttcccggagctgctcggcgaatgtttctggaacgacacgccgatgctctactatttttcgggattcctcggctacatggtgctggccgcctacctgcgccgctaccacgccgcgccgcgcgcatggcataagtggggcggtgcgctgctggtcgtcgcggggtatttcgcgacggcatggattttcgacgcacggctggcgacgcagcggctcgtcgcggacctcgaactttcgtggggcttcgggacgatcaacgtggccgcgatgtcggtcgggctgttcctgctgctgaaagacgtcaggccgggggcgggccgctttacgggcgtcgttaccgacatttcgagactcagctacggtatctacctgatacacatcatgctgctcaacttcttccacggctggctcgatccgctgatcgtttcggccgggatcaagatccccgtgctggcgctctgcaccttcgtctcgtcctatgcggtcgtaaagctgatttcgctgctgcccggcagcaaatacgtcgtagggtagctacaacccgtactccgcggcgtaacgccatagcggcgcggccatcagcgcctgccggatgccgccggtcgtgagcagttcgcgcacctcggcggccgtgaacagatgcacgcggatatcctccgtggcgtcgagatgctgggcgccgaggcgctccacacccgtcgccaagtagcagtacgtcaggttgctctgcgtggcgggattcggggccacgaccagcagttcgcgccattcgccgccgccgtaaccggtctcctcggccagttcgcgctgcgccgcggccagcatcgacgcatcgtccggttcggctacgcccgccgggatttcgtaattcgtttcgcccagcccgtgacggtactggtcgatgaatacgaatttaccctctttggttatggcgatcacgttcacccagtcggggtactcgaagacgtaatagtcgggtatgctgcgcccgtcgggcagttcgatactttcgtggcgtacggtgaaccacggtttgcgggcgaggtactcgctcttcacgactttccatgcgcggcttttcggattttccatatcggcgtctgttttgatgccgcaaaaatagcgaaaaatagttatctttgtatgatctctaaaaacgagccaatatgttttccccgaacgaacgagcgaaaatcatcgcccttatcaaccgcgaagttgtgcccgccatcggctgtaccgaaccgatcgccgtggctttgtgtacggcgcgcgccgccgaactgctcgacgcgcagcccgaaaagatcgaggtgcgcctgagcgccaatatcctcaagaatgcgatgggcgtgggcattcccggcacgggaatgatcggcctgccgatcgccgtggcgctgggtgcgctggtcggccgttcggaatatcaactggaggtcctgcgcgacgtgacgcccgaagccgtcgggcggggcgcccgttatatcgacgaaaagcgcgtctgcatctcgctgaaggaggatatctccgaaaaactctatatcgaggtcgaagcctcggccggagaacgccgcgccgtggcggtgatcgcgggcggacataccgctttcgtttatctcgaacgcgacggcgaggtgctgctcgacaaacgcacggcatccgtcgccgaagaggaggcgggcgaggtgcccctgaccctgcgccgcgtctgggatttcgccatgacggcgccgctcgatgaactgcgcttcatcctcgaaacccgccgcgtgaacaaagccgccgccgagcgggccttcgccggggagttcgggcactgcgtcggccgcacgctgcgctgcgagcgggagcggcaggtgatgggcgacagcatcttctcgcgcatcctctcctacacctccgcggcctgcgacgcccgcatggccggggccatgatccccgtgatgagcaattcgggcagcggcaatcagggcatcgccgcgacgctccccgtggtggtctatgccgacgaaaccgcggccgacgaggaacatacgatccgtgcgctggtgctgagccacctcacggtgatctatatcaaacagagcctcggccgtctgtctgccttgtgcggctgcgtcgtggcggcgacgggatcgagctgcggcatcacctacctgatgggcggcgcctacgagcaggtcgccgcggcggtcaagaacatgatcgccaacctcaccggcatgatctgcgacggtgccaagcccagttgttcgatgaaactcacgagcggcgtctcgaccgccgtgctctcggccatgatggcgatggacggtcactgcgtgacgcccgtcgagggaattatcgaggaggacgtcgacaagtgcatccgcaacctgacggccatcggccgcgacggcatgaacgagaccgaccggctcgtgctgggaattatgacacataaatgttaaaataccgaccaatgaacagacttgcattgaaactgaggttctgcgcggcgttcctgctgctcggcttgtggggagcggacgcccagacggcccgcgaacagattgcggccgttcccgaacgcgcgggcggaatctaccattcatacgaataccgacccgctgcggcggctccggcgcccgacgggtacacgccgttctacatcagccattacggccgtcacggcagccgctggcatgcctccgaaagcgtctatgccgggccgctgaaaatcctgcgcaaagccgccgaagccggtgcgctgacaccgctgggtcgtgatgtgctgggccgcgtcgagatcatcgcggccgacgccgacaaacgttacggcgacctttcgccgcgcggcgtcgccgaacaccggggcatcgccgagcgcatgtacaaggcttatcccgaagttttctctacggccgacggtcgcgaatgccgtatcgagagccgttcgactctcgtgccgcgctgcatcctcagcatggcggctttcaacgagcggctcaaggagctgaatcccgcgatccggaccacgcgtgagtcgagcgcccgttacatgccttatatgggcaacaacaagggactcgacgcccagcgcgaccggaccctgaaaacggccgacagcgtgcgcgccgcgcgcctgattcccgaccggctgatgaagtcgcttttctccgatcccgaattcgtcaaacgcgaggtcaaaaagccccgcaaactgatggagcagctgcttttgcaggccgcgatcatgcaggacgtcgattatctgggtatttcgctgtacgacctcttcaccggggaggagatatatgccgcatgggaggacgagaacttccgccgttatgtgatgttcggtccttcgaagcgtttcggcgatccgattatcgccgatgccaaacccctgctgcgcaacatcgtcgagacggccgaagaggtgataggcggtggaaaggagctggccgcgtcgctgcgcttcggccacgacgtgaacgtcatcccgctgttggcgctgttgggcgtcgagggcgcttcagcccgcgtttcgacgcccgaagaggccgccgaagtgtggcaggtacaccgcgtttcacccatggcggccaacgtgcagttcatcttcttccgcaaccctgcgggcgacgttctggtgcgcatcctgcacaacgagcgcgacgccggactgcccctcggcggcggtccctattaccgctgggaaaccttccgggattactgcaaatcgctgtacgaataacgcccggcttgccgccggccggagcggcgtcaacgaaaatgcgcggacttcgcaagagtccgcgcattttattttgttgttcacctgcttgggggctgacttttcacggcctaacccgtttttcttggttctgtccgcaggcgttccctgccggtccggctttcgcgtatggcggccgggctttgtccttgtccttgtctttcggttacccgatttctttttcggggaaattaatccgggtggggattttttccgggagactttcccgcccccccccggagactttccgggagacttttttcggacttttccgggccgggaccgttccgcttaattgaaaatcgttctgacgatgatacccgtcgcgccctgatgccgtgtggtgtagtccttggcgatgcggctggttttctggaggaactcctcgttgtcgcgcagcggaacgaaccatgcccgcagttcgtcgtaatcattgatcgaccgggccgcgccgagcgtcaccagatcgcgcgcctccttgaatttctggtaattgggaccgaacgccaccggaagtccgaacgtcgcggcctccagcgtgttgtggatgcccacgccgaatccgccgccgatgtagctccacgtcgcatagctgtataccgacgacagaatacctaccgtgtcgaggatcagcagctgtttcggaccgtagttcgtgtgcggggtgcactgggtatagcgcagcgtgccgcctttggtctcggccgcaagacgtgccatgcggctttcgtccatttcgtgcggcgcgacgatgaatttgatgtcgggattgtcgtttatcaggcggatcagcagttcttcgtcaggaccccacgtcgagccggccacgaagacccgcttgccgcccttgaaccgctcgatcacgtcgatatgcttggcggccttggcgatctcggcgacacggtcgaagcgcgtgtcgcccgctacgatcacgttgtcgaagcccagtcccgccagcagtcttttcgactcctcgttctgtacgaacatcacgtcgaacgactccagcgcctgccgccacatgccgccgtaggggcggaagaagatcgagttgcggcggaagatggccgagacgatataggtgcgcaccttgcggcggcgcagttcgtagagcaggttgagccagaattcgtatttcacgaagacggcgatttcgggatgcgccgcgtcgaggaaccggcgcgcgttgcgcggcgtgtcgatcggcaggtagaagatgtaatccacgccctgatagttcttgcggatctcgtaacccgaaggcgagaagaacgtgagcaggatcttgtattcgggatgctccttgcggatgcgttcgatgatgggccgtccctgttcgaattcgccgagcgaagccacgtgtatccagacgatacgggccgtggggtcgatggtttcggccatccgtttatagaggtccttgcggccgttgatccatagccgggccttcggatgccttggggcgactaaccggatgatccagacgtagcatgtcaggccgaaattatataaccacatcggtatttacggtttgcggtgttgaagtattttacggtttatctgttgccggacaaaccggcttcgtttcgggctttggtccggaacattggtttttcagtccgacaaaggtagtataatttgtcggaaatgcaaaattaccaattgtattccattgcctgcggaatcaggcgcacctccgtctctccgccgggcattacctccacggcgatcaggtcgaactgcgcttcgcgctcctcgcccgtgcaggccatgtaacgcagtgcggcccgtgtcagcgcccggaatttctgtggcgttacggccgcttcgggcggcgtgagtccgtccgcacgtcgggtcttgacctccacgaagtgcacgaaatcccccttgcgggccacgatgtccagctcgtagcggccgctccgccagttgagcgcgcaaatttcgtaccccgcgcgccggagaaactccgccgccgcgcgttcgcccatgcgccccgtctcggccgtcgtgcccattgcggtcagtggatgatgcgctggatcgaattggccttgccgaaagcgctggtcagcccctcggcgtcgtcgcgttcgatcatcctgcgcatgatctgcaattggtggatatgctcgcgcaggacgtccagcacgttgtatttgttgcgcagcaggatcggcacccatgttgcggcggcgctcttggccagccgtacggtgctctcgaaaccgccgcccgcaaggtcgaagatgtgccgctcctcgcgctctttttcgagcaccgtgagcgccagcgcgaacgaggtcacgtgggagatgtgcgacacgtaagccgcgtgcagatcgtgttcctcggctcccatgtagactacggggacgtccagcgtgcggaagatgcgctcgaccgtcgccagtgcgtcggcgtcgctgcgctccgcttcgcacagtacggcgttgcggcccgtgaaggccccgtgctgcgcggcccgaggcccgctgtactcggtgccccacatcggatgcgccgccacgaaacggccgcgccgcgcgtgcatcgagatcacctcgcacagctcggccttgatcgaccccatgtccatcaccacctgcctgtcagtcacatggttgagcgcttttacggccatcagcggaatcgtgtcgacgggtgtcgccagcaccacgagatcggcctgcggaacgccctcttcgagcgtcacgatgcggtcggccaatccgagccggagggcttcggcggcgttttcgtccgacttctcgacgcctaatatttcgtccgctattccgcggtcgcgcaatgcgagggcaaaggagcctccgatgagtcccagacccgcgatcagaattttcatacctatatataatatattcatttaccgcccgcagcgcactccgggcggggaaatcagagcaggaacgacagatcgccgcccggttcgatttcgaaagtttccgtgcctttgcggaacatgcgcatcgggcgttttccgatcagttccagtttgccctcctcgtagcggagcatgcagccttcgcgcagtccggccacccagcggcgcgggttggcttcgatgtattcgagtatgcgctgttcacgcgtctcgcccgcatgtccttcgggattggcgtcgaggtagtgggggttgatctggaatttcacggcaccgacggccttgaacgattcaggctccacgatgggcatgtcgtttgttgtgcagatggtcggacaggcgacgttgctgcctgcggaccatccgacatagggcgttccggctttgattttacgcagaatggccctcataagcccctgctcctgcattttttttgccagcgcgaaggtgttgccgccgcccacacatatggcttcggcctcgcggatcatgcgcaccgggtccttggtgcggtggaccgaacgcacgcggatgcccagctccgaaaaacgcgcctgcaccttcttttcgtattccgcgtacgaaaaagtcacggcggcatagggaacgaagactatttcgcgcacgccctgaagaaaccggcctatttccggcagcggataacggagatattcctccccggcattggtcgaattagagatcagaagcagtttcataaggatatggttttgaatcggttaattgtaaaaatgtgctaaatgtcgaaaaagttgtgaataaaaaaaaggttcgttttgtcaaaagtaataaaaaaagtgttacttttgcgcaaaattacctcggaaataagaaagaactatttccaaataattgtttaactaaaaaattaaaattatgtcagaagttcaatcaaaagttgtcgaaatcattgtcgacaaactgggtgttaaggagtcggaggtagtgcccgaagcaagctttaccaaccacttgggcgcagactcgctcgacaccgtggagctgatcatggaattcgagaaggctttcgatatccagattccggacgaggacgctgagaagatcgctaccgtcggtgacgcgatcaactatatcgaggagcacaagaaataattttaccaaaggttttcacagcctcttatagccttaaatttatgacagaaagaagagtagttgttacgggcatcggtacgatcaacccgctcggtaataatattgaagagtatttttcgaatttggagaagggagtcagcggtgccgcaccgattactcatttcgatgctgaaaagtttaagacgaagtttgcttgtgaagtaaagaattacgattcgagcctctatttcgaccgtaaggaagtacgcaagtacgacctttttacacaatacgctctgatcgcggccacgcaggccgtcgaggattcgggtctcgatctggagaccgtggacaaggagcaggtgggcgtaatatggagttcgggcatcggaggaatcaaatctttcttcgatgagtgtctgggctgggccgcaggggatggaaccccgcggtttagcccgttctttattcctcgcatgatttccgacatcgcggccggtttcatctccatgaagtacggcttcatggggccgaactactgcacggtgtcggcctgcgcatcttcgaaccacggcatgatggacgccatgaacgccatccgttacggcaaggccgacgtgatggtgacgggcggctcggaagctgcggtcaacgagccgagtgtcggcggtttcaactccatgcaggcgctttccacgcgcaacgacgatcccacgcacgcttcgcgtcctttcgacaaggaccgcgacggattcgtgatcggcgaaggcgccggcgccctgattttcgaggagtacgagcatgccaaggcgcgcggtgcgaggatttactgcgaagtcgtcggcagcggctgttcggccgacgcctaccacttcaccgctccccatcccgaaggaaagggggccatgaagtcgatgcgcgacgccatcaaggacgccggcatcaaacccgaagatattgactacgtgaacgttcacggtacttcgactcccgcgggcgacatccccgaactgaaggcagtcgccggcgtgctgggcgatcacgtctacaacatcaatatctcttccaccaagtcgatgacgggacacctgctgggtgccgccggagccgccgaggcgctggcctgcatcttcgccattacgcacggcgtggttcccccgaccatcaactgcgagaatctcgatccggagatcgacccgaacctgaacctgacgctgaacaaggcgcagaagcgcgacgtgaaatgcgcgctgagcaacacgttcggtttcggcgggcacaactcctcgatcattttccgtaaactctaacgttttaaaccgtccgggccgtgtttgatttcatactgcgcccccttagaaggaacttcgggcgggataaggcgtattacagaattatcgatgacatgttcgggttcatcccgaacaacatcgaactctacaagctggctttgattcacaagtcagcttctttggttttggaggacggccgcgctatcaacaacgaacggctcgaatttctgggcgacgccgtcatcgaggcggtcacctccgactacctttttatcgagtatcccgaccgggacgagggtttcctgacgcagctgcggtcgaaaatcgtctcccgccagtcgctcaacgtgctggccgtgaatatcgggctggaccgccacgtcatttcgaacggcagcaccagcgttacgcagaaacatatctacggcgacgctttcgaggccatgatcggcgcggtctacctcgatcaaggctatgaattcgtgaaccggctgctcatcaaccggatttatttcagacacctgagtctcgacgagctgaccgaatcggagaccgatttcaagagccggctgatcgagtggtgccagaaaaaccggcataagatcgttttccgcaccggttacgacaaggagtactcggcgaaccatccggttttctactccacggtgctggtcgacggcatggaggtcggtcacgggtccggcgattcgaagaaggaggccgagcaacatgcggctttctcggtggcgcagtacatgagcgacgagcagtgcgccacgctgctggaccgggtggacaagctgacgcaataacttttggttatttcccgtgcgcctgtattgcgtgcggtctctgccggaggccgccggacgcatggcgggatagcttccctataacatttccgaatgaagacgatagccgataagatggcggcgcgtggcgtcgatgcgctgaccgaccgggaactgctctccctgcttaccgaggatgaacagagcgccgaagcgctgcttgccgcttacggcggatcgcttgcgcgtgtcggctcggaggaggccgcccgtctgaggatgatcggcgggctgggactccggcgcgcccgcatgctgctcgccgcggccgaactcggccgtcgcatcaccgctgcgcgcgccgccgaaaccgacgtcgtctcgtcgagcgacgacgtggtgcggctcttccgcccgcagctcgaaacgctctcgcatgaagagtgctgggccgtttacctcacctcttcgaaccggatcatcgaacgccagcgggtaagtcagggcggcgtgcagggcacggtcgtcgatcaccggctgattatcaaacgggctttggaactgcttgccacacaacttatcctgattcacaaccacccctccggcgccgccgaagccagtccgcaggacaaggtgctgaccgaaaggatcgcgcaggcggccgcgctgttcgacatccggctgctggatcatatcatcatcgcccgtgaaggagatttctcgttcctgcgcgaggggctgatttcgtgacgcattatttgtctcttccgatactgccgcacaacgctattatggcgacggcaatgagcgcaatcagaagttttacgattcccgtcattggttgatttgggtcttttcacctgttgccggacacaaaagcgcggacctgtttccacatccgcaagtggggtattggacgacccgtaaggtagaatgatggaatatgcccgcgccgaaaaacagcgagagcatcaacctttgttccttaccttatgcgaaagtgtccaattttcacctgcaagaaaaaagccgatgcgctttttatgtctcgtatgtcggccgtcctcgcagaccgccgcgacaaatatagaaataaaatcgcaacagaacagcttaatttccatttattttgtacttttgtaattcggaaaataatttaaaaaccaaatacgatgacacaggaagaactcttcaaaaagctgatcgcccactgcaaggaatacggattcgtattcccgtcgagcgaaatctatgacggtctggctgcggtgtacgactacggacagaacggcgtggagctgaaaaacaacatcaagcgctactggtgggattcgatggtcaagctgcatgagaatatcgtgggcatcgacgccgcgatcttcatgcacccccgtacgtgggaggcttcgggtcatgtcggcgcgttcaacgacccgctgatcgacaacaaggactcgaagaagcgttaccgtgccgacgtgctgatcgaagactggctcgccaagcaggacgagaagatcgagaaggaggtggagaaggcccgcaagcgtttcggagagactttcgacgaagccaagtaccgcgagacttcgccccgtgtcgccgagacggccgcccggcgcgacgagatgcacaagcgtttcgtcgaggcgcagaacagcggcgatctgggcgagctgcgccagatcatcgtggactgcgaaatcgtctgcccgatttcgggtacgcgcaactggaccgaggtgcggcagttcaacctgatgttctcgacccagatgggctccacggccgatggcgccaatacgatctacctccgtcccgaaacggcgcagggcatcttcgtgaatttcctgaacgtgcagaaaaccggacgcatgaaactgccgttcggtatcgcgcagatcggcaaggcgttccgcaacgagatcgtcgcccgtcagttcatcttccgcatgcgcgagttcgagcagatggagatgcagttcttcgtgcgccccggcgaggagatgaagtggtggcaggcatggaaggagacccgtatggcatggcaccgcgcgctgggcttcggcgacgaccgctaccgtttccacgaccatgagaagctggcgcactatgctaacgccgcgaccgatatcgagtacaacttcccgttcggcttcaaggaggtcgaaggcattcactcccgcacggacttcgacttgggcaaccaccagaagttctcaggccgcaagatccagtacttcgatcccgaaacgggcgagagctatgtaccctacgtggtcgagacgtcgatcggcgtggaccgcatgttcctgcaggtgatgtctgcggcctataccgaggagcagctcgaaggcggcgactcgcgcgtcgtgctgcgtctgcctgcggcgctggcccccgtgaaggtcgccgttctgccgctggtgaagaaggacggcatgcccgaagtggcgcagaagatcgtggacctcttgaaatacgattacaacgtcgtttacgacgagaaggattccgtcggcaagcgttaccgccgtcaggacgccgtcggcacgccgttctgcgtgaccgtggacggtcagacgctcgaagacaacaccgtgacggtgcgtcaccgcgacaccatgcagcaggagcgcgttgcgatcgacaagctgcccgcgctggtcgaggaggagtgctcctaccgcaagctcttccggaagctgaatctgtaatcgctgatccgtgggccgcatcctcgccatagattacggtacgaagcgcacgggaatcgccgtgagcgatcccctgcggctgatcgccggggggctagaaaccgtcgagacgaagggactcgaagcgtggctggcaaaatatttcgccgcggaggacgttactacgatagtggtgggcaagccgacgcagatggacggcacgccctccgaaacgtggcgtttcgtcgagccgctggcagcccggctgcgcagggcctatcccgataaggaggtggtctttcacgacgagcgttttacctcggtgctggcgcaccgcacgatgctcgaaagcggtatcggcaagatggcccggcgcaacaaggcgttggtggacaagatttccgccacgattattttacaaagttatatggagtttaacaaatgatttatccgattgtcatatacgggaacgaggtgcttcgcaaacagtgcgaggagattgcgcccgactatcccgaagtgaaaaaacttgtcgaggacatgttcctgacgctcggcgaagccgaaggcgtcggactggctgcgccgcagatcggcaaggccattcgtctgttcatcgtcgattgcacgccgtggggcgaggacgatcccgaatgcgccgactacaagcgtgcctttatcaaccccgaaatctacgctttttcggaggagaagaagacctacaacgagggatgtctctcgtttccgggcatccatgccgatgtgcctcgttcgctggccatcaggatgcgttatctcgacgaaaacttcgtcgagcacgacgaggagttccacggcctgaaggcgtgggtcatccagcacgaatacgaccatatcgaaggcgtggtcttcacggaccgcatctcgccgctgcgccgcaacctgctgaaaggcaagctgctgaaccttgccaagggaaagtaccgcgcggcctacaagaccagatgatctccggcgttgtgccgtaccgcatgaaaaagcggatcccgacatcgggatccgctttttgcatgtgttatgcaggtgcgtttgtcagaatctgtacgcggcgccgacgtataccaccaacgggttcgaacggtcgctgtcaaacataggctcgtacttgagacctgcggagatgttccagcggtgggcgacgttgaagtcgaaacctgcgccgacactcatgccgaccgcccagtccttgatgtcattggccacgatacctacctgcgggaatacgccccaccagtcggcgatctggaatacgtagtgtgcgtcgaagttgatgtctacggagctgtctttttccgtcagtacatagatcgacggctcgatgcgccagtgcgaattgaagctgtagcggtagtaggcgccgataccgaccgaggcgtcgtccgtgttggtgtagaagttgacacgcggacccaccgcactgcggtaattggagggcgtaccgcggtaattgccggcctgagccgcattgttgttgtaggtctgagccgcgttgcggtagttgtttgtctgagctgcattgcggtaggtgttggtctgtgtgttgcggtaggtgttgtcctgagcggacgctgcccaagcaaacaatgccgcaaccgagatgagaagaatttttttcataattttcagttaaattttatgtattaataagtggttgtcagtcatttaattcatatctccggattcggaaagcttcccgaaccgcctttcttccattgccttgacggcgtgcaacactcgtgccgcgatcggttgccgccggaatttgtgcgcgaccggaggaggaaaaaacgtcccgtgccggagggctgcgaagttctccggaagggttttcaggtcgcggaatccggccggtttgctgtgttttacggcggacggtccgtgcgtgcggttctgtttgggggactttgggccgggtgttgaaaaatgtacggctctccgccgctgcagctcgtcgtcttcgctgccgtcttcaccgccgtcgcagcagtcaccgtcgcttgccgcatcgttgtgcgttggctttcgtggcgggcggcagcaggttgcggcgttcgcggccggacatgaaaaatcccggagacctcgtcgaggtctccgggatacgttttccgggttgcgccggattagaacttgtaggttgcgccgatattgatgagaatcggattcttgtggtactcagcggtctggatcatccacttgaagcctgccgagaggtcccagttgcgggctaccgagaagtcggcgccgccgcccagattgatgccgcacgaccatccgccgatatcgttggcgctcagacccgcctgcggatagatatgccagtccggggcgatattgaagaggtactgcacgtcggcgctgatgtccaccgagcagaatttcttgcagatggccatgatgcccgactccatgcgccagttgtcggtgaagctgtagcgtccgctggctccgatgccgaagatggcgccgtcggcgcctgtattggtatatacgccgattttgggtcctactgcccaattgcccggagtttgtgctgatacggttgtcactgcgaataatgcgacgattgccgcaaaaaacatcttcttcatgttctgttattttaattcaacaaaaaagttgcgtgttatactgtttgccgatagcaaatatacaaaacttatccgctttcgccaaacatattcaacgaaccggactttttttccgctgaaaacgaaagcctgcggctttcatgccgcaggctttcgttttcggatattccggtcgtaaccggaggaatgctacttctcgttgagcgcggcgtgtgcggccgccagacgtgcgatgggcacgcggaacggcgagcagctcacgtagttcagccctgcgtagtggcagaactcgaccgacgaaggttcgccgccgtgttcgccgcagatgccgcacttgagtttttcgcgggtagaacggcccttgaaaacggcttcgcggatcagctggcccacgccgttgcggtcgaggatctggaacgggtcgttcttgaggatgcccttttcgaggtaaacgggcaggaacttgccgatgtcgtcgcgcgagaagcccagcgtcatctgcgtcaggtcgttggtgccgaacgagaagaactcggcaacctcggcgatctggttggccgtcacggcggcgcgcggaacctcgatcatcgtgccgaccatgtagtcgatcttgtcgttacgctcggagaacacctgctcggccgtcgcgtcgatgatgcctttctggtagcgcagctccttgtggttgcctacgagcggaaccatgatctcgacgtgtaccggaatgccctgcgccttgacgttcatggcggcctcgatgatggcgcgcgcctgcatctcggtgatttcggggtaggtgttgcccagacggcagccgcggtgtcccagcatcgggttgaactcggccagcgactcgactttggcgacgattttctggaggggtacgttcatctccttggccatctcctgctgtcccttctcgtcgtgcggcacgaactcgtgcaggggcgggtcgagaagacgtacggtcacggggaatccgttcatggccttgaacagaccctcgaagtcgccgcgctggatcggcagcagcttggccagcgccacgcggcgtccggcttcgtcgtcggccagaatcatctcgcggatggccttgatgcggtcgccttcgaagaacatgtgctccgtgcggcagagaccgataccctcggcgccgaatgcgaatgcctgcagggcgtccttgggggtgtcggcgttggcgcgcaccttcagcacggcgtatttgcccgcaagctccatcagctggccgaaatcgccgctcaggtcggcggccatcgtggctacctgacccagataaacctctcccgtcgagccgttgagcgaaatccagtcgccctccttcacggtgaagccgttcacgcggatcgtgcgggttttatagtcgatctccagctcgccggcgcccgatacgcagcatttgcccatgccgcgtgcgacgacggccgcgtgcgacgtcatgccgccgcgtgcggtcaggatacctgccgcgtcgagcatgcccttgaggtcctcaggcgaagtctcgatgcggacgaggatcgctttctggcccgactctgcgaggatcttctcggcgtcttcggcgaagaacaccaccggacccgtagcggctcccggcgatgcgggcagacccttggtgatgacctgcgcattggcgatggccttcttgtcgaatacggggtgcagcagctcgtcgagtttggccggctcgcagcgcagcacggcggtgcgctcgtcgatcagcccttcgcggagcatgtccatcgcgatcttgaccatggcggcgccggtgcgcttgccgttgcggcactgcagcatccacaacttgccgtcctgaatcgtgaattcgatgtcctgcatgtccttgaagtactgctccaagtggcgctgaatctcgtccagctccttgtaaaccgtcggcatgacctcttcgagcgaagggtatttcgtgcggcgctcctcctcggagacgttctgggccacggcccagcgcttcgagccttcgatggtgatctgctgcggggtgcggatgccggccacgacgtcctcgccctgcgcgttgatcaggtactcgccgttgaagaggttttcacccgtcgcggcgtcgcgcgagaaggctacgcccgtcgccgagttggcgcccatgttgccgaataccatggcctgcacggtaacggccgttccccactctgcggggatgttgttgagcttgcggtagaggatggcgcgctcgttcatccacgagccgaacacggcgcatacggctccccagagctgatcccaagggcatgccgggaaatcctcgccggtctgcttcttgacggcggccttgaagttctgcaccagctccttcaggtcgtcggtcgtcaggtcggtgtcgttcttgacgccgcgcttctccttctgctcctcgatgatgacctcgaacgggtcgtggtcctccttcgattcgggcttcatgcccagcaccacgtcgccgtacatctgtacgaaacggcggtacgagtcccatgcgaagcgggggttgcccgtacgcttggcgacggcttccacggcctgatcgttcatacccagattgaggatcgtgtccatcatgccgggcatcgaggcgcgtgcgcccgaacggaccgaaaccagcagcggcatctccttgtcgccgaacttcatgccggtcagtttctcgatattctgcatcgcccgctcgacttcgggacggagcatcttgatgaccgcctccttgccgtgggcataatattccgcacatacttcggtggtgatggtgaatcccggaggaacgggaatgccgatgaggttcatctccgctaggttggcacctttgccgccgagcagctcacgcattttgccgttgccttcggcttccttgttgccgaaggtatagactcgttttacgtctgccataatttttttcttggttaatttaatgatatgtaaatttataaaaatttttagctaatctcttcccctacagacgaaaattgcggtgacatcgctgttaccgcctcgtcgaagaatcctatttgccgttgggaatgcgaatataggaaaacttttctgaaattccaaaaaattctactccaagtaaacgaataccggcagggcgtagccgaagccgccccggtaacgccgtctctcgtaggtcggctgcgggttacccgtcttgggatcaagcagatagcggcgggcgaaaacgtcgccgcccgaacatatcagcgcggtgtcggtcagaatgcggtcgcgcatgagccagcctccgcggcggcggacgttgccccggcccagccgggccggccgttcgagggcgtcgcgcagtccgtatgccgccgcgtcgagcgacgcggtgcgccccagaacgatcagcttcacgccggggcgttcttcgcgcaggtcgcggacgacccattcggccatgcgcgtgtcgctgcacaacaccagtcccacggtgtcggtgcgcgccgggcggaccgggcggccggttgtgcggcgggtgcgcggggcagggaagcgcagggtgccttcgatgtagaggtagcggcgccccggctcctcgtagtggggatcgaagaggtcgccgtagtagagcagtgcgaaatccatgccgtcgagcgagttgagcgtttggtgcaggtagctgtagtcaccccggcaggccgccgcgatgtcgcgcacgaccgcttcgttttcgacgctccacagcgcgacgagcggcatgcgcatcgagtcgatgacggcggccgtacgggctatcttgcggcggtagcgttccgtgtcccacgcgagacggccgccgggcgtgtagtcgctgtcgtcgtaaaagagcgccggtatggtgtcgtagaggtggtcgaggtcgcagtaggcgatgccgatgcggggctgggcgagggcgcagcggatgccggagaggaggagcgcggcgaggagaagcgtgcggagcagaagggccggacgtttcccggatcggttttccggcccggtccgggggcggagcttggtggctgatgccgtgcggtgcgggaacatgggccgaaggtcagatcggttcttcgggcaggaacttgcgcggcgaacaacccagaaatttggcgatctcgttgatgtgattcagattgtacttcgtgcggtatttgggactttccacctgcccgatgtagccgtgcgagacgcctatgccgtaagccagcattgcctgagacactttttgggccatgcgctctttgcgcacggcttctatcacatagttgtcgaaggctgttttcacggtggcttgttttcgagtgtaaaactaaaaaacgtgccacgtcgaattccgcgtcatgtataagtattacctatctatgtctaagtaacccttccggctttcgtcggggcataaaaaagacggaggtttttccctccgttgccgtatatctccctgatgccgttccccgatgccgattacggggtctgcaaagccgctctttcctttttcggcagggaagccgcgacaagatcgtacgattgcttcacgaggtcttcgatcgttctgtcgggtacgtctttgtcgaaatgtacgcttatccagtgttttttattcatatggtatgccggcgtcactccttcgtaacgctcctgcaaatccacgatccggtcgggagcgcatttgatattgcagaaatcgaatgtctcgacgtttacgaagcaaaaccatttttccgcgacgcagaagacgagcaggttccggtcgtatgcggaagccgctttctcgaacggcatcttttcataggcctccttgaacgaaaggcagtaggtcctgaaatcttcgatattcataggctgaacgtttgcttggagtcggaattatcccgatgtttttccggtgtgcggcacgcagtggcgttttgcagctgcggggacgcggtcattcggagattacgcccgaacccaccagctcgtcgccatcgtaccatgcggcgaactgtccgggcgtgatgccccgctggggttggtcgaagaggatgtaggcgccttggtcgcgcatgaagagcgttgcgtcctgaaggggctggcggtagcggatgcggacgctgaagcgggcgctctgtccgggtgagagggtgcgtgcgggattgacccagtgtatctcgccgggagcgatgtgcagcgccggacgccacaaaccggggtgggcgtcgccctcgccgacgtagatgacgttctgcgcggtgtcggtcgcaaggatgaaaagcgactcccggcggccgccgatgcccagccccttgcgctggccgatggtgtagaaatgcgcgccgttgtgctcgccgatcttcttgccgtcgcgtacggtgtagtgccacggggcggcgagggcggtaaggcgttcggtcgaaagttcgccgtcggttcgggcgacttcggcatccgctgcagcaggtatagcccggctttcggtcgaaagcgcgctgttcgtccgggcgtctgacgtatcggggccagcggcgttttcggctttggccggggctgcggccaaaacccggttgtatttcggccacgaggggagtatttcgtggacgttgccctttttcgaagccagtttctgctggaggaaagcaggcaggtccaccttgcccacgaagcagatgccctgcgagtccttgcgcttggcggtggcgagtccctgctcggcggcgatgcgccgcacttcgggtttcagcagatcgccgatcgggaacagggcgtagcgcagctgctcctgcgaaagctggcagagaaaatagctctggtccttgttggggtcggcgccggcaagcagcttgaagaccgtccgtccgtcgggaagaacctcttcggccttgcggcagtagtggcccgtggcgacgaagtccgcgcccagcttgagggcttcgcgcagaaagacgtcgaatttgatttcgcggttgcacagcacgtcggggttgggcgtgcggcccttttcgtactcggcgaacatgtaatcgaccacgcgcgtacggtagtcggccgagaggtctacgacgtgcagcggaatgtcgagccgtttggcgaccagctcggcgaaaacccggtcgtcgtgccacgggcagtcgccttcgagcgtgcccgtggtgtcgtgccagttgatcatgaaaagccccgtgacgtcgtgcccctgccgtttgaggagatacgccgcgacggacgaatccacgccgcccgataatccgattactacatgtgccatattgtcttgaaaatcttataggtcgatcagcccttcgggcaggatcatcttcatcgtccgcccctcgaagtcgatatgggcgatgaactcctcggcggcggggaccagcacccggcggccgccgatttccagctcgaagagcggattggcttcgctgtcataatagtccgcgactctgcctgcgaattgtccggcagggggcatgctgtcgccggcgtcgctgccgtcgttgttggcgttggcattatcgttgctgctgcctctgctgccgtcgtcgttgcaggtgtcgttgtttgcgttgttgccatcgtcatttccgccgtttccgccgttttccgtgccgccgtgccgcatctcgaagcccgtaacggcgaatccgatcaggtcctccatgtagaattcgtcgtcatcctcctcgtcgaaccggatgcggaattcgaggccgagcagctcctgcgcccggcgttcggtgtcgaagtcggcgaatgcggcgacggcgcctgaggctccgcggcgttcgaaacgttcgcaccagagcggcacttcgagggcgtcgatggtgaccagcagcggggtgtcggtgtcgaaatccgcgggaaaatcggcgtaaagtgacagcatcactccgccgtcggtgccgaaaagcttgttgattctgcctgcgggtatggaaacgctcatgtcggttcggtttacggtgttttatcttccgcatcgcgtggagcgtgcgattctcgctcgttctgcggtgcggcagggggactttccatgcgtggcgtggcgctgcgtggcgtgccgcccggccggaaagagtttacaaaagtaatgaaaaaaaccggtaaatctcccgtgctgggaaatttaccgggattccggaaagaagcgttctgcgcttattctgcggcgggtgcttcggcttcgccttcagcgggtgcttctgcgccctctgcggcagcggcctgctcggcctccttggcggcagcttcggctgcggccttcttctcggcgatggcctttgcgcgctcctccttgactttggcttcggcggccagacgggccttttcggccgacttggcatccgcttcgagcttgttgcccttagcttcgatcttaccggccttctcggtcatccatttgttgaaacgagcttcggcttcggtctccgagaatgcgcccttggcgataccgcccagcaggtgcttcttgtataatacgcccttgtacgagagaattgcccgacaggtatccgtaggttgtgcgcctttctgcaaccagcccagtgctttctcgaagtccaggtcgatcgtagcaggattcgtgttggggttgtaggtacccagcttctcgataaatctaccatcacgtggcgccctgctatctgcggcaacgatgtgatagaaggcgtaacccttcttaccatgacgtgccagacgaattttaacagccattttgctataaaattttgttgtaattaataaaaaacgctcacccactttgggcttttaagcctgcaaatgtaggcaaaatattctgcccggcaaaataaattgcggaaaaatgcgcgcggaaggctgttttatggcgttttcgatacggatgaaaaaatgccgggccgcatttgcggcccggcgtcgagtgatcccggcgggattcgaacccacgaccgacagcttagaaggctgttgctctatccaactgagctacgagaccatgtcgattttcgggtgcaaaagtacgaaattccgaagtatctacaaatttatttcgtgttttcttgccctttatcgcagggaatggggcgtcgggtccgcggcgcggcgggataattcggtttttgcaatgaaaaaaatcggctgtaatgtattaaaaatagtctgaattgcttatatttgcaaatacgttaccggaggatgcccggacgctgccgtcggctgcacccgtatggcttcggagcctctccggtgtcgtaacttgcgtttttattaattccgccggaatggttccggcacaattcccatctttaaccctatgaaaaattttttgcttcctgtgacgatgttgctcacatcggtattttgcgtgtcgttatgcgtcggctgcggcgacgatgacaacggggaaaaatccggacctgctccgaaaatctcgctgacagcaggtgaaaccgcgccgttttcggtgagtttcacggctcttgtcgaaaatgcgtccaagtgcgcttatgtcgtgctgaccgagaggaacgacgccctcacggcaagggagattctttcggactccggaatcgaactcccccccccggcatggaccgagccggtagtcattccggagctggcgccgtcgaccgattactatgtttatgcggcggccgccggtgaaaacgaccggctgagtgaggtcgcatcgctcgttctgacgacgctcgaagatccggcgaatgacctgacgcaacaattcgaatcgctgcatactccgggcgtggccgagcagaacggggataatttctatttcggactgagcagcggcgagaccgagattcagggcggtctgaccgtcaccaagcaggccggatacgccgtgttgttcgatctgtacggcgccgcgtcggccgatgccgttattcccgacgggacttatgaattggcgcaggggcacgttccgccgtcggccgatccgcgtcacacctatgcgacgcggcgtctggaggacggaacttgggaagtgctgaccttcgcggctggcgaagtgacggtttcgcgcgagggagcgaattacctgcttgcggcgaatgtcgaaaccccagcgggcgaacgcctgagtttccgctacgccgggccgatcgaaatgaagccgatcgatatgacgggcagccggctcaaacatgccgtcaatgttgcactcgaagaggtgacggccgtgtgctacaaggaatacaacgaccccggcgtggactggacgcagcttaagttctggacgggagaggtcgataagcggggcggacttgtcaagggaacgcttttcggcgtggagctgaatatgccgacgaccgacgatcgcggcgatctgaaactggtgccgggcgaatatgaggtgaatgcttcccgcgaggcgtttacgatggtgccgggcgcgatcatggactacatgccgggaatgctgatggcctacggcacctactgcatgcagagcgatgcgaacggcaagatcctgtctggtgcggcgcaggactacggccgggtgacggtcggttacgaaaacggcgtttatcatatcgacattgcgctgatcagcgtcgagggtatcaccatgcgcggaacttacgacggtcttattcccgtgacggacaagtaatctgacggcggttatgaaacggaaaagcgttgagtctctcaacgctttttttgtgctgtttttgcggcagcgcggcgggacggcgtgccgcgccgtcccgcgcagggagcggtcgggaggagcacggtgcggaacggacagatgccgcaggcggtgttcggacagggcgggcggcccggtggccgtcggataccgctccggtgcattccattccggtctgaaggggcgtatcccgaagcgtcggcgggcgggcgaaaaaacaagccggacggtctgtccggcttgttttgagtcttgtgcggggtgcctgttttcgggcgccggccgctggagacggtgtgggtgtgaggcggatttgcgacggctgttcccggaccttctctgttatttgttcaggtatttgtccagatacattttcagttcgcgcggcatgacgggtttggtgatgaatccgttgcatccggcttcctcggcagtgcggcggtcggtgtcgaaggcataggccgtttgcatgatcacgggcagttcggccgtgtagcggcgaatctccttcagcgcttcaatgccgtccatgacgggcattttgatgtccatcagtattgcgtcgggcttgtgctccatggcaaaatcgacagcctccctgccattcttggcccatagcagatcgtactcttttttgagtattatttccagaagcttgtagttgctctcgacatcttccgctatcagaatcaagggtttccgtacgtcgggattgttgtctgtcattgtgtttgttgttgggatgtgtgcaaatatagaaaataattcctgaatttaagagtttaccgccaaaatgttccctcccagcgggctgtattgccgcatctgtccgtcaccgtgagctgcacgctgcggcgtttttttgcggcgggtaggtcgaacgcatgtacgagtgtaccctgcatcgggaaacggtcgcagggcacccagcggccgtcgatgagcagcgtgcaggaggcgatgcctgagaaattgtcgctcacgcggaagcggatgctgcggacgccgccgaggtcggccccttcgctgaagagcggccggatgcgcggcggtatggtgtcggcggcgacgaagatgtcgcccgtggtgcgggtcgtcgccgtcacggcgccgtcggcgtatctgcctccgatgcaggcgatgcgtcctttggccgtacgggtcgcgagaaccgtacgggactgcatgtcgtcgggcacgaaggcgtgtacggagaccgtcatcgggcggcgcaggggcgtctctgcgtcgaggatgcggtaggcgggcgagaggaccgccgccgtggagtcggatgcgggggcttgacgctgttccgggcggcagaaaatgggttcgtagaccgctcctgcggggatgcgggccgtcagatcgcggcccgcacggactaaagccgccttttcgggccgcaggacgacggccgtgctgtcagcttcggcgcggagcgtttccgtgcggccgagaatgtcgaattcgagctgcgagcggttgccgcagtcgtcttcggcttcgatgcggatgcgccgtttctcgccctcggcggtgcggacgaggccgcgctcccgcatgacgggatagaagcagtcgggcgattcggccagctgcgccagccggatcacctcgttgcgcgaggtgagctgcatggggtagtggctcacggcgtcgcagcagcgcgaaaggtcgtgcgtgaagccgtccatgcggtattcgaaccggggatcgccgtccacggacatgctcgccctccatagtccgaaggtgttgtgcaccccgttgcggcggtcgctggcttcgaggacgaaatagcctttgcgtcccgtgccgacaggctcttcgcgcgtcagccggtagcggccttccgcttcgcggacgacggagtagctctccggcctgccgtggacgggaacgccctgcacgctgtccacctcgatgtagtggatgcgcatgatgcggggcggcaggtcgtcgtcggggcggacgacgccttcgcgcacgacgttgtagagccgctgggtcggggtgtcgcgcagttcgaaatgcagatggggacccagcgacgaaccgctgttgcccgaaaatccgatcgtgtcgccctgtgcgacgggccatgcgccggggccgaaccagagatcgacgctgttcgcgcggcggcggaagcgttcgtcgcggacgtgtttttcgatgtcgccgcggaaccgctgcaggtggccgtatacggccgtcgtgccgttgccgagcgtgaggtatatcgcccgtccgtagcccgacgggctgacgctcacgcgcgagacgtaaccgtcggccacggccacgaggggtttgccctcgccgccgtcggtcttgatgtctatgccgccgtggaagtgtccgggacgcatttcgccgaagttggccgagtaaagccccgcgacgccgcggatcggatatatgtaatctccggggttgagccgctggccctgcgccccggagcagatcgtcgtgaaaagcagtaatgtcagaattcgtcgcatgtctccgtgtccgtcacgagcgcggcggcgctgtcgagcaccgtctcgtagtcgtatcccagcgaaagtccgtaacgtatcagtttggttttgagttcgtattgtgtcgtatgtctggtcgtccgcatcttgcgttccagctgctgccgcagccggccggccatatcctgacggtcggcctgcgccagcgccgcgtcgatcagctccctgtcgatacgcttgcgctgcagggccgtgcggatcttgtattcgccccagccgctcagccgcagtttgtcgcgcacgaaagcttcggcgtaacggccgtcgtcgatgaagcggtcgcggacgagccgcgccagcacctgctcgccctcgcgctcagcaagcccccagccgcgcatcagccgccgggcgtcgtcctgcgatttctcggcgcgtgcgcagagccgcatgagtgcggcgagggcctgttcgggcgttttggcgcgtttcccggtcttttttacttcaggcggctgcatgtcatgcggggtttgccgttgaggtcttcgcggacctcggtgtccgtatatccctcttcgccgagcatgcggcgcatggcctcggcgaagcgttcgtaaatttcgaagtagagcctgccgccggggcggagcgtccgccgtccggcgcgggcgatggcgcggtagaagcgcagcgggtcgtcgtcggggaccagcagcgcttcgtgcggctcgtattcccgcacattgacgtgcatcgcaggcaggtcgctctgcggcacgtagggcgggttggagacgatgacgtcgaacggtcccggaaagacatcggccagatcgctcagggcgtcggccttgcgcaggatgaccccggcgccgagcgcccggcagttgcgggcagcggtttccagcgccgtgtcggagatgtccgcggcatatacctgcgcgccgggcagcgccagcgcgagggtggccgcgatgcagccgcttccggtgcccacgtcgagcagcgcggcggcttcggtttcggcctgcgcgatccatgccgccagctcttcggtttcgggccggggaatcagcaccccttcgcgcacggcgaacgtgcggccgcagaactccgtgcgccccacgacatactgcaccggacggcctgcggccagctggccgaggatgtcgtccagttccgcgatttcgagcggcgcgccgggatcggtcagcagggccgacgcgctcagcccagacagctccgagacggcgacgagggcgatgctccgtgcttcacgcgccccgtagaggggcgcgaggcgtgccgaaatacggccgagtatgtcgcggcgcgtggtcatcagcggatgaagttggccagcgcgatggctacggcggcttcgacgaccacagcgccccgcagggcgacgcagacgtcgtggcggccgcggatcgtcagcggctcgaccttgttcgtggccagattgtaggtcatctgttcgcggccgatgctcggcgtgggcttgacggcggcgcggacgacgagttcgttgccgttggtcagtccgccgttgatgccgcccgcgttgttggtcgcggtcgtgccttcgacgtcgaggaacgggtcgttgttctcggagccgcgcatgcgcgccccggcgaagccgctgccgaattccacgcccttgacggcgggaaccgagaagagcaggtgggcgatcatgctttcggccgagtcgaagaagggctgtcccagccccagcggaacgccctgcacgcggcattcgatgatgccgcctacggagtcctgctcggcggccgcggcgcgcagcacctcgtcgaagccctccgggtcggtgcagccgccgatctccgcgatgcgggtgtcgaaggtcacgcccggcggcagtatcttcttggcgaccacgcctgcggccgtgagcgccacggtcaggcgggccgagaagtggccgccgccgcgcgggtcgttgaagccgttgaatttgtggtaggccaccatgtcggcgtgcgagggccggtagtggcgcatcacgttggcgtagtcctgcgagtgggtgtcgcggttggcgaactcgatggtcagcggggcgcccgtggtcatgccgttgtagagtcccgacacgatctgcgggatgtcgggttcgcggcgcggcgtggtgccgcgcgcgccgctgcgccgccgtgcgaggtcggtttcgaaatcctccgccgaaagcgggacgccagccggaatgccgtcgatcgagatgccgatctgctggccgtgcgactcgccccagatggcgagtctgaaattgtgaccgaaaatgttcatggctttaaactctgattttttcaaggtcttcgaagaagccggggtagctcttggccacgcactcggcgttttcgatcgttatctgcccgtcgcagcgcagcgccgagaccgccatcgacatggccatgcggtggtcgttgtggctcgaaacgcgcgccgggcggattttgccgccgcggatgcgcatgacgtcctcttccgagatgtccacttcgatacccgtcttggcgtattcttcgcggatcgcctcggcgcggttgctctccttgtgcagcagccgcgaagtgccgcggatcgtgctgacgccgtcggccgccgcggcgagggcggcgagggcggggaagaggtcggggcagttggtggcgtcgaattcgaagccgtgcagcggacggctgatcgccgtcaccgaatcggcttcgttgatgacggcggcgccggcccggaccagcgccgtgcagacggccgtgtcggcctgcttcgagagcatcgagatattccgtaccgtaacctccccggcgacggcgccggccaccagcagcatggctgccgcactccagtcgccctcgatgctcaggcaggccgagctgtaacgctggccgccttcgatgtagaactcttcgtaatcgttatggcagatttccacgccgaaacgggccgcggtgtctatggtcatgtccagataaggggtcgaaaccgcgctccgcacatggatcgtggtgtcgtgtcgggccagcggcagcgccagcatgagtcccgtgatgaactgcgacgagaccgagccgtccacgtcgacctcgccgccgcggatcggtccgcggacttcgaagggcaggaatccgccgttgtcgcgcacccggacgcccagcgtgcgcaacggtcctatcatcatctccatggggcggcggagcagcgtgccctcgccttcgatggtgatcggcgtgccacagagcgaagcgatgggggtgaaaaggcgtgtcgaaagacccgactcgccgacgcggagcgtgtgcccctgcgggcgcagtccgccttcgatcgaaagcgtctcttcgccgatccgggtcacgcgggcgccgagcgtctcgatgcactgcagcgccgagcgcgtgtcgctgcagaactcgatgttgcgcagcacggaggtctcttcgcagagaagcgatgccgccaaggcgcgctgtgcgtagcttttcgagcagggcggcgtcagcgtgcctttgacgcggcccgatggaaccgtcttatccattatggggtgatatatggttatgcggggatgccggcgcaagagcgccgcatccctgatttcgtgtttcggccgttattcctgcggagttttgcggtttttcatctcctgcgtcagctggtggctctttttcagctcgaagtgctggcccagatagaccttgcggaccatcgggtcggcggccagctcctcggcagtgccggttttgaggatcttgccttcgtagagcaggtaggtgcggtcggtgatggccagcgtctcgtcgacgttgtggtcggtgatgatcacgccgatgttcttgtgcttgagcgtcgccacgatcgactggatgtcctcgacggcgatcgggtccacgcccgcgaagggttcgtcgagcaggatgaacgccgggttgatggccacggcgcgcgcgatctccgtgcggcggcgttcaccgcccgaaagctggatgccgaggctcttgcggaccttctgcaggcggaactcctcgatcagcgattcgacgcgctcggcctgatactccttcgaatattcggtcatttcgagcacggcgcgaaggttgtcctcgaccgacaggcggcggaaaaccgacgcttcctgcgccagatagcccacgcccatctgcgcgcgcttgtagaccggttcgttggtcagctcggcgacctgtccctcgtcgttttccagaaaaatgcgtccttcgttgggcttgatgagtcccacgatcatatagaaggtcgtggtcttgcccgctccgttggggccgagcagtccgacgatctcgccctgattgacgtcgatcgagacatgatcgacgaccgtgcgggctttatatttcttgacaagttcgcttgtgtataggcgcatgttgctgcatggttaagtttgcagccccttcatcccgaagcggttccgtattcgggccgatgagccggaacgggaaggctgcgggccggggccgtcgcaacaaaggtatataaagtaggtaaaaactccaaaccgcggggccataattctctctggaaagggggcgaagtccggaaattgtccgcagcggcggcaaaaagtttccgaacggccgcggaaatgttccccggcggccgcgggcgtgcgggccggagcgtgcggcgatgttgtcccggcaactgcggggacaatcgggccgggcgtcagaagaatccgatcagcgccacttcgaagccgttgccgttcttggctcccgctgccgagtatttcgaaagcgtccatgcggcctgcgccttcagccgcggaatgggcatgtagaggaagcccaccagaaagtcctgctgcttgccgaccgagccgggcaggtaggtgttgcgtttgccgttgaagacgtcgtagcggattacgggcatgtatttgcccttgaatttgtagcctgcgatgaggtagtacatctgttcgtcgaccttgccgcgtgtcttttcccccgtcgtcttgtctgtgtaggccgcggaggagccggtgtgcgcgtattcggcccggacgaggatgtgttcgctgtcgtaccagaagccggcggcgtagcgcgtcatggggatatagtccttcgaaaccgtgttgttggtgtattcgccccagttcaccgagcctgaaatgcgcagctccctgagagggaagaatgtgaggcgcgccacgatgtctttcgacttgttgtcgtccgggcggttcatctgcgagccgttgaagagggcgaggttgtaggtgagcatgtcccagccgtcgcggtgcaggaacgcgcccgtggcttgcaggccgcagtcgcgtccgtaggtgttgtagcccgacacggcgttgcggcagaccattttgagaatggcgtgcgagaagttggggacttcgagcgtgccgggcgagatgtcgtaattctcgatggtcagcggaacggggaactgaccggcccagatgtgtatctgggggcggattttggcccgcaggtacatgtcctgcacggtgatgagcgccttgccctgctggtcggccgagctggagaagccctcgaactgcatcttgtagtcgaacgtgcgggagatgtcgcccgtgaggatcagacgcatgcgcttgacgttgaacgacgacgaatttttgccgtccgttcccccgacgttggtctggtaggtgtagccgatctgtgcatagcccgaaaatttgggcagcgcggcgagaatcttctcgaaccgggtgatcttcttcgagacctcttccggcgaagcggcgtcgttggcgtcgtcgatctcggcggcgcttgttcggggtgccggtcgtgtgccggagccttccggggcgggttgtgcggggagcgtctgcgcggccgccgggagactcagtgcggcggtgaacagcagtgcggatagtaagcgttttttcatggctgactggttatgtcggttaataagcgtcggacagcaaactgtttgcagggaatcggggagttcttttgcatagaatatgccatttttccggggcgcccgttcttgtgtccgtaccggaaagaaacgaaaccatttcgttgagccgggcgcggccgggcttgctccaatcgccgggacgctgaatttttatcggtagatggtgcggaattccgaattttttgctaactttacctaagaatttgtgaataaagagtagaatcggcgaaatgaaacaaaatgaatcgtccctgctgcacgacaagctgaaggaatacttcggcttttcgtcgttcaaagggaatcaggaggctgtgatccgcaatgtgctggagggaaacgatacgttcgtgcttatgccgacgggcggcggaaagtccctgtgctaccaactgcccgccctgatcatggacggcgtggcgatcgtcatttcaccgcttatcgcgctgatgaagaatcaggtggacgccatgcgcaccttctcggccgattcggggatcgcccatttcctcaactcgtcgctcaacaagaccgccgtggcgcaggtgcgcgccgacgtgctgtcgggaaagaccaagctgctctatttcgcccctgagtctctgaccaaggaggacaacgtggctttcctgcataagataaaggtgtcgttctacgccatcgacgaggcgcactgcatctcggagtgggggcacgacttccggccggagtaccgccgcatccgtccgatcatcaacgaaatcggtcctgcgccgctgatcgccctgacggcgaccgccacgcccaaggtccagctggacattcagaagaatctgggcatgtccgacgcttcggtcttcaagtcgtcgttcaaccgcccgaacctctattacgaaatccggcccaagcacaacgtggaccgcgacatcatccgcttcatcaagcagaacgagggcaagagcggcatcatctactgcctgagccgcaagaaggtcgaggagctgaccgaactgctcgtggccaacggcatcaaggcgctggcctaccacgccggcatggacgccgcgacgcgcgccgccaatcaggaccatttcctgatggagcgcgccgacgtgatcgtcgccacgatcgcattcggcatgggcatcgacaagcccgacgtgcgttatgtgatccattacgacatacccaagtcgctcgaaggctattatcaggagacgggccgcgccggccgtgacggcggcgaaggctactgcctgaccttctacagttacaaggatattcagaaactcgaaaagttcatgcagggcaagcccatcgccgaacaggagatcggcaaactgctgctgctggagacggtgtcgtacgccgagagttcgatgtgccgccgcaagacgctgctgcactacttcggcgaggagtatacggaggagaactgcggcaactgcgacaactgccgcaatccgcggcccaagatcgacgccaaggccgcgctgaagatgctgctggaggctctgcgcgacatcggcgacaagttcaagggcgactatctggtgaatgtgctgacgggcaagaccacggcgctgataaagagctacggacacaacaagagcaagtggttcggcgcaggcgccgagcacgacgccagcttctggggcgccgtcctgcgtcaggcgctcatcctcggactggtggacaagaatatcgagaattacggactgatctcggtgaaccgcaagggcgagaatttcatcgccatgccgttccccgtgaccgtgacgctcgaccacaattacgacgaggaggagcgggaggccgaggccgtggccccgatgggcaagggcggcgcggcggacgaggagctgttctcgatgctcaaggacctgcgcaagaaggtcgccaagcagcacgggctgccgccgttcgtcatctttcaggacccgtcgctcgaagatatggccgtgcagtaccccatcaccctcgaagagatgcagaacattaccggcgtcggcgtgggcaaggcccgcaagttcggcgaggagttcatcaagctgatcaaggcctacgtcgaggagaaggagatcatccgtccgcaggacatgatcgtcaaatcggtcggcaacaagtcgggcaacaagatcttcatcatccagtcgatcgaccggaagatggatttcgaggacatcgcccgtgccaaggatctcgatttcgacgagctgctgaccgagatcgagggaatcgtcaattcgggcacgaagctcgacatctcctattacctccgggagtttatggacgaggacaagatcgaggacatatacctctatttcaaggaggacgccgagagcgactcgctcgatgcggccatcgacgaactgggggccgactataccgaggaggagatacgtctggtgcgtatcaaattcatgtgcgagcagggtaactgacgccctgtaccgacctgctgtcccgcggctgttgcgtcactgttccgagcaatggactaacttaacaaatatgcctatgaacaaaaagacttttactgttgccgtgattttcctgattgtgacgctcgtgtggctcggtgtcaatatattctgggctttgtcgaacaagaactgtattttcgacctgatcgtggcggtgctgttcgcactggccggcgcgggtatggtgtataacgaatgccacaagcgcaagtgcaggcacctcgacgaggtgaacaggcaccagattccttgacggggcgctttacagttgtttcagagcgtggagaccgtgttttccggcagggcgacgcagccgttttgtggcgtatggcgcgcggggaagaggacgatcggtgcgcgcgggtccgtgcagcggttttgcgtgcggttttgtatgccggtccgtgcggcgcggcggttgcggcggccggcgcccggagtcggaaacgtgtaaaataaggagtgatatgaggaaaacgaatgttatgcagatcgtccgtctcgtgatgatgatcgcggcggtcgcgggcgtgatttacgcgctggagtatatggaacggggcattgccgtctggttctggattacgctgctgggcgtgggtttcgtgggcttgctctacacgttccgcctgacgcagcgccgcgtgcggctcgaacgccgggccaaggagcggcaggagaagaagaaatcgcgcagacagaagcgctgagagttatccgccggacattggcccggcggattttttttgagagggctggggcgaaggggacgccttcatcgcgcaggccgcggccaaatcccggccggaggatttcgccgtagtgatcggcggcaaagccgtgggcggcatcgggtttgcgccggagacggatgtcgggcggttcaacgccggaatcggctgttggatcggggcttcgtaccggggacgggcgttatgaccgccgccgtggcgcgggccgcggagcaggttttcgcaaataccccgataattcgtatctttgccgccgcatacgcctcgaatcccgcttcgcagcgggtgctggccgaagccggattccgtttcggggggggggcaccgcgcttttgtcgtgaacggagcgtgcgtgaacggctgttattatgaattgctgaaatagaatgagtgaagtaagggctaaaaaggcgctgggccagcattttctggtcgatctgaatatcgcgcgcaaaatctgcgactcgctttcgggcggagagatccggctgcggacagctcctgctgttgccgctctttccggagcggacgggcaggctgcggctgggaggggaccggaggagccggagacggccgtaatcgtcgcagcgaaaagagggaccggaaacgctgccgagacgggtgcagcggccgcaaccggggatgccgcagtcgcagtcgatggccggacggcggaaattgctgccgggcggggtgtcgcggcgggtgccggaccggatatcgtgcagagtacggaaccgggtgtcgcggcgggtgccgggcgggatgttgcgcaggagacagggccggagggtgtgtcgggtatagagccggatgttacgccggatgccgggcagggggcgaaagccgccgggtgctgcgacgtgctggaggtcgggtgcggcatgggcgtgctgacgcagtttctgctcaggcgcgacgacatcgtcacctacggggccgaaatcgacccggaaagcgtcgaatacctgcatgcgcattaccccgaattcacgccgcgcctgatggaaggcgacttcctgaagatgaacctgcgcgaactgtttcccggagggctgaagatcatcggcaattttccctacaatatctcttcgcagatattcttcaaggtgctggagaaccgcgatctggtgcctgaatgcgtcggcatgatccagaaggaggtcgccgtgcggctggccgaacctcccggctcgaaggagtacggcatcctttcggtgcttttgcaggcgtggtacgatatcgaatatctttttacggtcaatgagacggttttcaatccgccgcccaaggtcaagagcgcggtgatccgcctgcgccgcaacggcgtcgagcggctcgcctgcgacgaaacgctgttcgtgaaggtcgtgaaagcctccttcggacagcggcgcaagatgatccgcaactcgctgcggtcggtattcggcaatttcggcggcgcggagcatcctttcttcacgcagcgcgccgaacagctttcggtcgccgacttcgtggagctgaccgactgggtcgcggcgaacagaacgtagccgttcggagtccgtgcgccgtgcaccgtgcatgatgcgtctgcggtcgtacgcctgcgaccatgtgtcatgtgtctgcattgaaaccaaaagcatcccgtcgagggatgcttttttgttgccggttccgtatggccggggtttccgcttactgttctgtctatgcgctgttgcggccgccggggtgaaattccgctgcgcgtcactggcgatccgccttttcttccgcggcctgccgctcctccggggcggggtcgcctgcgatgacggtcaccagatcctcgcgcgcgaggtatttctgcgccagacgctgtacgtcggcgggcgtcatggcctgtatgcggcggatgttctcgccgatgacggtgtggtcccggccgcagaggatgttttcgatcgtgacgtcggcgatgccgaacgggccgtcgagaatgcgcatcatctcgccgatcatgatgttcttgaccagcaaaagctcctcgtcgggcatcggttccgtgcgcagccgttcgatttcggcgtagatctccctcagggcgtcgcgtgtgacgtcggtgccgacctgcgttgcgacggcgaagtagcccgcctgctcgaaattgaccatggcggccaccacgccgtaggtgtagccgcgttcttcgcgcaggttctgcatcaggcgcgatccgaagtagccgcccagcgccgacgccacgacctgcatgcccaagaagtcgggatgctggcgcggaaagagcatgcgtccgatgcggatcgaagactgcacggcgccggggtgttcgacgaaggcttcgtgccgggttacgggcgccggaaacggcgtcccggtttcggactccgaccgcggcagccgttccgcgagggcggccacggcttcccgttcctgctcgccgatgcgtccgctgcacaccacgaagccgttggcggccgtgtaatggcgggcgtagaattccgcgacgtcggcccgcgtcaggcggtcgtaatcgttttcgtcggccgaaatgccgtaggggtgttcgggaccgaacatcgtccgggcgaacgcttcgcgggcttcgacgtccactttcgtgcgctcgatggccagccgctgtttgcgcttggcgcagtaggtgcgcaactcctcctccggaaatgtcggatgcaggagcacctgctcggccacggccagcgtctgtccgaagaatttggagagcgtgcagaagctgatataggcgtagtcccggtcgatgttgacgtcgaaataggagccgtaatagtcgagctgttcggcgatctgctgcgccgtcatgtcgcgcgtgccttccgcgagcatgttcgccgcggccgatgccgagaagggaacccgctgcacggccgatccggcgcggaacacgaaggtgatgcgcagcacttcgaagtcgtccgaggcgagcgtgtagagcgtggcgccgttggagagcgtcgtcttttcggcctgcgggacctcgacggtcgcgggtattacgagaggcggttgtgtcatttgcttgctttgtaaatgagggtggaacagttttcgggccggaacgtgcggcggctgaagtcgatgatgtcgtcggtagtgacggcccggtaggccgcaacctcgcggttgacgagcggcaggtcgcccagcatctcgtagaagccgaggttcatcgccttgttcattacgttcagttcgccgaagagcgtgttggcttcgaacttgtttttgaccttctcgacctcgtaatccgtcgcaggccgggtccggagcgcttcgatttcggcgcggaaggccgcttcggcctgttcgggtgtcgtctccggcaggagctggcccgtgaagacgaagagtccgggatcgacgtcgcccgaaatgtaggcgttcaccgacgagaacagccgctgctccttgaccagatgcgtgtagagccgcgccgagtcgccgccggccagcaggtccgatacgaggtcggcgatgtagaagtcgggcgaggtgcgtccgcccatgtggaaggccagcgaaaccgtcgtggcggggacgtcgcgctcggcgacctcgcggcgcggtgcggtctggaccggttcctgacggatgtggtccggggccgcaggccggttggcgagcggctcgaaccacttttcggccagatcgagcatcttctcttcgtcgatgtcggccgagatcgaaagaatggcgttcgaagggcggtagtgggcgcggtagaaggcctgcacctcgtcgagcgtcgcttgggcgatatgttcgggcgtcagcccgatggtggcccagcggtaggggtggaccttgtaggccagcgcccgcagcagcatcggctggtcgccgtagggctggttgaggtagcgctggcggaactcctcgatcaccacgcgcttctcggtttcgagtttttcgggcgtgatgtcaagcccctccatgcggtcgctttcaagccacagggccgtctcgacgttgtctttcggcagggtgatgtagaaatcggtatagtcgttgttggtgaaggcgttgttgtcgccgcaggccatctgcaccggcaggtcgaagttgggtatgcggcgcgtgccgcggaacatgaggtgttcgaacagatgcgcgaaccccgtgcgttcgggattttcgttgcgtgcacctactttatagaggatgtttaccgcggcgagcttcgagaccgggtcgcggttgacgacgaccgtgagtccgttcgccagtattttctttttgtattcgatcatatggctgcaaagatagtaaaaaagcggcggcaggaatagtagtgacgcctcatttgtttgatggattctgtgactatgaagtttggggattgtgaatccataaatcctgccgccgcatatggcccggtgtgctgcggcaggaaaacgggaagagtgctgccgaatctgtggaccctacggctctggtaagccttcaatcccacaaattacagcacgcacccttcggggtacgacggatattgcgggattgcaaaaaatttaccagattttagggtcccaatacatcgttgacatatgacgatatgtaaagaacgaattcggggaacaaaagtagaaaaattttcccgatctgcaattgcactgcccgaacaacccatccgttaaacccgaatttgctcaatgcaggctgttttgcgttattttggcacggcatggaatgtgcgtctgttcaggagccgggagacgctccccggaggaggcgcggcggagcgccggaaagtgtgccgccgtggtaacgcgctatgggtaaaccggttttgcaactccgtgatttccgcaggtttgtgttaaaaaattaacaaccttgagtgttattccgctaacacccccgaatggtaaaaattcctgattttttgttctgaaatcggactgttttttccgccggatttgctatctttgcaacgcattctgtcctgaattcagaaaacacacacaatatcatctaaaattttaacaaaatggcagaaaagaaatttatcacgtgtgacggtaattacgctgcggcgcatgttgcatacatgttctcggaagttgcggcgatttaccccatcacgccctcctcgaccatggccgagctcgtggacgagtgggctgcacaaggtcgtaaaaatattttcggcgaaacggtgaaagtcgtggagatgcagtccgaggcgggcgccgcaggcgccgtgcacggttcgctccagagcggcgccctcacttcgacgtttaccgcgtcgcagggcctgctgctgatgattccgaatatgtacaagatttccggcgagctgcttcccggcgtgttccacgtgtcggcgcgcgcgctggccgcgcagtcgctgtctattttcggcgaccatcaggacgtcatggcgacccgtcagaccggattcgcgatgatcgccacctcgtccgtacaggaggtgatggacctcgcgggcgtggcgcacatcgtggcgctcaagtcgcgcgtgccgttcctgcacttcttcgacggattccgcacctcgcatgagatccagaagatcgagctgatcgacgaagccgccctgacggcgatgctcgaccgcgacgcgctgaaggccttccgccagcgtgcgctcaaccccgaacaccccgtgacgcgcggtacggcccagaaccccgacatctatttccagacccgcgaagcctccaaccccttctacgacgccgtgcccgacatggtcgccgacgcgatgcgcgagatttcgaagatcaccggccgcgagtacaagccgttcgtatattacggagccgcggatgccgagaacatcgtgatcgcgatgggttcggtgaccgagaccctcaaggagacggtcgattacctgaacgccgaaggcgggaaggtgggcgtggtaaccgttcacctctaccgtcccttctcggtgaaacatatgatggaggtgctgcccgcaagcgtgaagcgcatctgcgtgctggaccgcaccaaggagccgggagccaacggcgatccgctctacctcgacgtggtggaggctttcgccacctgcccgtgcaagaacaagccgctcatcatcggcggccgttacggtctttcgtcgaaggacaccacgccggcgcagatgctggccgtgttcacgaacctcgcggccaacgaacccaagaaccagttcacggtgggtatcgtggacgacgtgacgttccgttcgctgcccgtgggcgaggagatctcgctggccaaacccggcacgttcgaagcgctcttcttcggtctgggcgccgacggtacggtgggcgccaacaagaactcgatcaagatcatcggcggcacgacgaacaaatactgtcaggcatacttctcctacgactcgaagaaatcgggcggttacacctcgtcgcacctgcgtttcggcgacctgcccatcacttcgccctatctggtcaccacgcccgacttcgtggcctgccacgtgccttcgtacgtggacaagtacgacgtgctcaagggactgaaggccggcggctcgttcctgctcaactcggtgcacgacgccgctacgacctgcgagacgctgcccgcgcacatgaaggcttacctcgccaagaacaagatcaacttctatatcatcaacgctacgaagatcgccgccgagctggggctgggttcgcgcaccaacacgatcatgcagtcggcgttcttcaagatcgccaacgtcattccgttcgacaaggccgtcgagcagatgaagaaggcgatccagaagtcctacggcaagaaaggcgaggatatcgtcaacatgaactatgcggccgtggacgctggcggcgatgccgtcgttaaggtcgagattcctgccgagtgggcttcgatcgaggacaagggcttcgtgcatgtttcggatgcttcgtgtcccgaattcgtgcgcaagatcgtcgagccgatcaacggcctgaagggcgacgacctgcccgtatcggcctttacgggccgtgaggacggtacgtgggagaacggtacggccgcctacgagaagcgcggcatcgccgtgaacgtgcccgaatggaagatcgagaactgtatccagtgcaaccagtgcgcctatgtctgcccgcacgccgtgatccgtccgttcctcgcaacggaggccgaagctgccgcttcgggcgtagagtggaagcagggtctgggcgagacgaaggactacaagttccgcatccagatttcgccgctcgactgtacgggctgcagcaactgcgtggacgtctgccccgccaaggagaaggcgctggtgatgaaaccgctcgaatcgcagctgccccagcagaagaattgggattatatcgtaaagaacatcggctacaagcaggtcgtggacaagaccaagagcgtcaagaacctgcagttcgcgcaaccgctcttcgagttctcaggcgcctgcgcaggctgcggcgagactccctatatcaaggctatttcgcagctgttcggcgagaagatgatggtggccaacgccacgggctgtacctcgatttattcgggttcggctccttcgacgccgtactgcaccaatgacaagggacagggtcctgcatgggccaactcgctcttcgaggacaacgccgagttcggtctgggtatgcacgtgggcgtcgagaaactccgcgaccgtattcaggagtcgatggagcaggcgatcgccaactgcacgaagtgctcggacgagctgaagggcgtcatgcaggagtggattgccgcgcgcggttcgtcggccaagtcggccgaggtttcggcccgcctgatcccgatgatggaggcctgcggctgcgactactgcaaggacattctcgaaatgaaggactggctggtgaagaagtcgcagtggatcatcggcggcgacggctggggttacgacatcggcttcggcggcgtggaccacgtgctggcttcgggtctggatgtgaatattctggtcgtggataccgaggtttactcgaataccggcggtcagtcgtcgaaatcgacgcccgtgggcgccgtcgccaagttcgcgtcggccggtaagcgtatccgcaagaaggacctcggcgctattgccatgacctacggttacgtatacgtggcgcaggtttcgatcggcgcgtcgcagatgcagctcttcaacgtgctgaaggaggccgaggcttatcccggaccgtcgctcgtgatcgcttacgcgccgtgtatcaaccacggcatcaagggcggcatgacgcgcacgcagaccgtgggcaaggaggccgtagcctgcggctactggcacctgtggcactataatccgcagctcgaagagcagggcaagaatccgttcgtgatggactcgaaggaacccgactggtcgaagttccgcgacttcctgatgaaggaggtgcgttacacttcgctcaagaagtcgttcccggccgaggccgaggagctgttcgctgccgctgaggagaacgccaagtggcgttacaacagctaccagcgtcttgccaagatggagtactgatctgtatgacagctatgtgaaaggccgcggcattgtgccgcggccttttttttgttgtcgagccggatcgcatccggcgtcgtatcgcttgcatggataggataaagcataaaaagaaatgattgtaattgctttttattgcttatttaatatctattctttatatttgtttcgaaatcaccttaaaactaattcgaaatgaaaaaactatccgtatgtctgctgacggccgtgctcagctgttggtgcgcgacggcgttcggctgggggaaaatcggccacgatgcgatcgcctacatcgccgaatgcaacctgacgcccaaagccaagaaaaacatcgaaaagtatctcggcggccgttcgatcgtctattatgcctcgtggatggatcaggtccgccacacgccggcctacaggcacaccaacacgtggcacaccaacaaggtcgatgccgggggaaactacgtgcccgatcccgaaggcgacgcgatgacttttctggacgactgcattgcgaaagtggaagattaccgcaatcaaaacgattcgacggtgacggtctcgatccgctttatcgtacatctcgtcggcgacatgcactgtccgggacacgtgaaatatccgtggtacaagagtttcaaattcacgctcagcggcaaggagtacggcctgcataattactgggacgagtgggcgcttacgctgagcaacaagtggcattatctggaatacgggcaccagctcgaccgctgttcgaagcgggaaaaacgcgatatcgccgaaggcacgccccgcgactggctggccgacagcgcccgcgagtgccgcgtgatctacgactggaccaaggccggtcagacgctttcgtacgaggagtcgcgcgacttcatcattttctcgcacgagttcgccgaggcgcaggtgctgaaagccggatacaggttggcggcgctgctgaaccgcttgttcgggtaaggcggttgcggccgtacgttgcgccgccgggaatgccgcccgctttgcggtgcgatttccggggcggcgatgcgtccgagttgtggttcgtacaggcggcccggaatccgtccggcgacctgaaatctgtccgggatgacggcctgaaattcctccgggaagcggtccgggatttgtccggacggtggggcggaatccctccgaatggcagtctgaaacaccttcgggaaggcgcccgaaataggtccggacgacagtccggaatctgtccgagcggatggttcgaaaaccgttcggtcggcgggctgtcaggaggttcgttcgaaaaccgttcggggagtcgttcgaaatccgtccgggcggcgaaacggcttcggccgcggcatcagtgccgcggctttttttgtgttccggcgattcggttcgtgatgaaaaatttgctgtccgtttgaaaaatcccccccccgaatgaatttatttgttcataatcggccccggagataactttgccgcacatttgaattaacactatctaatctcgcttatgaaaaat

SEQ ID NO: 12054 - DNA, 60764 bp, Unknown
  gut microbiota DNA sequence
ttgcacaaaattgcgtccgtgtttgtcgtgtgcgctgccttggctgcctttacggcttgtaacgatgacgacggaaaggtgaagaaaccgcaggtatcgtccgaattggtcggcagctatacgccgcactactttaaagaagtgcccgacgagtggggcggtgagccttcgaggctttatctggaagtagccgctgcatggacggatccggataatattcccggtatcgatctctcggagagcatggggatgcctgccggttcgttcgtaatgccgttcaataccatcttggatttggtgtcggccatcggttcgcaattcgtgtcgagcggtctggttcagctcgatctgcatagcgacggcttgtttgccgccaaataccatgacgtggtggtcgaggagggggccgacatcatgacgacgatcttctcgccgacgttcgccgaggccgtatcggtatttccgagtgccgagaccgccgctgtcctgcccgaaggcgcgctgagtttctatacggagtcgaacctgttcttcgctgccgtcagcaaggatttcatccgggcgatcgagaagcaggaggggatggagattctttccgagatcgacaagatgctcggcgcttataaggggctgagtgtcgtttcgaccgacagccattacgccattccgttcaagtacacctttgagggcggcgtgttccgcctgtatgtggaccgcgccatgatgctgccctatgtcaagctgctcaaggacgtgctcggcgggctgggactcgatccgtcgcagatgatgggactcgatcccgctgtcattctcgacgatctgttcaacgcaacgacggaactgcagatcgcggtttatctgaaaaaaatgtaattcctgaaaaatgtaattcggggttttgcccgatttgcggccatccggagcgatttgttccggatggctttttttcgggagccgcccaaaaactgcctatgtgagaacctgcctgtgttttttgtcgccggggttgcgtatccggccgggaattgctaactttggggcgcgtaagagtcgacgccgtcaggttttgtgcggtttttgcacgcggcgttctgttattaacttatatgtatttatgatgaaaaagtattttgcagccgcagcgctgctcgttacgatggctgcgtgcggaagcgccgcgcaggacaagacgctcgaaggtacgacttggaaactcgcccaaatggggtcgattccggcgacggcgatcaatcaggagacggatttcttcacgctggagttcaatgccgccgacacgatggtcgccggacgcaccaactgcaaccgtttcttcggccgctatgagctgaagggcaagaaactcgaattcgagaatatgggcatgacccggatggcctgccccgacatgcagtacgaagatgcgttcgtcaagatgctcgacgacgtggaccgtttcgaaatcaagggttcggagctgaccttcttcgacgacgacaagtcgctggccgtattcaaggccgtcgaaaaagagcctgcgaagaagtagtttcgccggcgcggataatttgcggcactccttctctgaggggctgccgttttttttgtgttatgcggcggaactgctcggtcggccggatgtgcggaatatgttgcggacggagaaagtaaaaaagaacggcggcaggaaaaaagtgacgcaactctcttttgtaggaagaatccgattatcggaaagcatcctgccgtcgcatatgattcgattgcattggcaggagtgcggacaaatggactgatttgtgccaaaaaagaaagggctgcgccgaattccgactgctctgggttctggtaaacctgcgacaccgaaaaacaacgcatacccttccgggtgaggttgtacaaggtgtcttcaaaaaatttaccagattcagagcagacaaatacaatcgtttatatattcgatatgttaagaacgcatgcaatacggtgtaccgcataacaaaggtaatcaattttccgcaatctgcaactacctgtctgtattggggtcgggccgcggagtcgattgccgaaaaacggctttggggcgtgtggtcgccgtatgatctttggtgtgtgtgccctatgatcttcggaccgtgtgtcttgcgcttccggggttcacaaaacaagcggcctcccgtcgggaagccgcctgtcttgtgttgcttatggaacgcttactcgctcaggggagttacgctcacgtacgatttgcctgcgcctttcttgcagaattcgacggtgccgtctacaagggcgaagagcgtgtgatctttaccgatacccacgttttcaccggggttgtgaaccgtgccgcgctgacgaacgataatgttgcccgcctttgcgaactggccaccgaacagtttgacgccgagtcgcttgctttccgactcacgtccgttcttcgaactacctacacctttcttgtgtgccatttctcttccgttttaaagggttatgcaacaatttcctctacaaggacctgtgtcagatactgacggtggccgttgcatttctgatatcctgtgcggcgctttttcttgaacaccagaaccttgtcgtccttgaggtgtttcaggatcttgcacttcaccgaggcgccttttactacaggtgcacctactttgacctgaccgtcgttgtctgtgagcaggactttgtcgaaacttacggacgaattttcttcgccctgaagacggtgaacataaagtttccgacctttttcagctttaaattgctgacctgcaatctctactataacgtacatttattcgatggttatgtatttgaacataattcggagtgcaaatatacgcatatttatcttataaacaacatatccggcaaatttttttggccccgtgcggctctggcatggttttgggccggggcagggcaccggcacacgccggacggggtttttatgaacaggatactgattgtttcggacgatatttttctgcgcgacatggtgcgtctgtcgctgatcgacatgcgcaccgaggtgcgttgtgcggccgatgcggacgagatggaagggctttgccgccgcgtattgttcgatctggtgatcgtgctgcatgtggcccctttcttgtgcggccgcgacgtcgtgcgcggcgtgcgtcccgcgggactgagacggccgctgttttacgtggtttcgtggctccagtccgaacaggccgtcctgagtctgctggagtgcggcgtggaccagtatatggcttttccgctgagcctgcagcggctgcggggcaaggtgtccaacgatttgaaccggcttttatgaccgaaacgcttttcatgatatattccgcggcggccgccgccgtgacgctctggctgctcggcgggatggcggtcgggcggatgcgccgcagacgcaggcgcggcagggacgccgtgctgcagcgcaaatacctgcatatcgtcatgctcgccttgttttcgggcggcgaagagacgccgcgctttccgcttctgcgccgtgcgggcgcccgccgcctgctgatcgaaaccgtcggcaggctggtggcggcgacctacgggcttgacccggcgccgctgcgccgcatcgtcgtgcaatacgggctggacgggtggctgctgcgccggatacgcttcgcgcaggggtaccgccgtgcgcgctacctgatgctgctctcccggctgcccgccggagacggcatcggcgccgaagccgcccgctatatgcgcagccgcaaccgttacgtgcgcttctacgccctgatgacgcagctggcagccgaacctgcgacctcgctgcgccggatggcggagtacgactatcccttttcggcctgcgaagtgtcggagatcatggccatgctgcgccgcggtctgttgccgatcgcttacgaaccgctcgtcggctctccgaaccgcaacctgcggatggtggggctgggcatcgtgcggcagttcggcattgaggaggcggagaggcttctgctggcgatggtggcccgcgaaagggtgccggagctgggccgcgaagcgctctatacgctctgctcgatgcgctgttcgctcaggcggcgcgaggtggcgggccgcatcgcctcgatgagccgcgccgaacgcaaggcgctgatgcgttacatggcgcgggagggctatgcgcctgccgtgctgcggcggttgttcgacgaccgggagcgtccctactacgaatcgcttatacattcctataaacggagtctggtatgctgatcgtgctgttactgctgcttgccgctgtcgccgctgcggccctcgcgctgctctggcttgtcgtgcggggacataacaaacggctgctgctggcaggttcccacgccgtggcgagcgacacgcccgacggcatcgggatatcggtgttgtgcagcggcgtccgtgcgcaggagcaggtcgaaaacctgctttcggccgaatatgcccactatgaagtgatcgtggtgctcgattccctgcgttatcccgtcgagtttgcggcctttacggcccgctaccgcatgatccgcgtcgaatacgtgctgtcggaggagctgcccgtgacgggcgtgcgggcgctggggcgttcgcgcaagcgccgtttccgcaggctggtgctggtggaccgtgcgcaggatactcccgccggcgatttcgatgcggcggccgaagtggccgcctacgattacgtgctgccggtgcgggaggggcagtttctgctgccggacgctgtcgcgcggctggtggccgaagtgggggagcggggcgtcggagggtgcgattgcgtgcgttcgcggatcggagagcctgccgcgctgctgagccgcgaagccgtcattgcagcaggcggtttcgcgcaccgtccgggcaaatccgtaccgcggcgccggcgccggaacctttgggagccggttttctatgcgccgcagtctgggcgcaagccgtgtcgcgggcggcagtccgtgctgcgcgtcgtggcggctgcgtcgttgggcggcgcaatcgccgccgccgtatggacgggccggtggccggcggccgccgtactgctcaccgcagccctcgtgtggtgcgtcgccggatgtgtttcgctggccctcagcgatattgcctacgggcgtacgggcggcggagaaaaggggctgcggcgccgctgtaaaataggagtgaaaaattttaccatatcataaattcttgttacctttaccatggcaatcgaaattaccgaactcaaaaaacgagctacgatgataaacgacaaggtgaggatgtatctgctgccgccgctgttcaatgcggcagtcagggccggagcctcgataatgaatatttacaagaatttagacgattacgatataagcctcaaagacgacaagacgccgatcaccctcgccgaccgtctcgcacacaaaaccatccgcgaatatctgggccgcacgcgcatcccgatcctgagtgaggagggccgcgagatgcgctacgacgaacgccgcaactgggagttgtactggctggtcgatccgctcgacggaacggtcgagttcatcaagggaaacaacgaatttaccgtgaatatcgccctgatggagaacaacgtctgcatgggggctgtcatttatgtcccctatttcgaaaagatgtacgtcgccgggcgcgattcgggttcctacgtcaaggagcatattgcgccggatgccgccgccgaatacacctacgaccagatcgtcacgggctggcggcagctgccgctcgaagagggggcggagcatccccgcctgcgggtggccgtgtcgcggtcgcaccagacgcccgaaacggcggagcatatcgcccgcctgcgcgaagcgcatcccgatctggagatcgtcgagcaggggagttcctacaaattctgcctgctggccgaggggaaggtcgattattatgtccgcacgacgcatacgtacgagtgggacaccgccgcgggcgagctgattctcgccgaagcgggcggccgcacccgcacgctgcccgacgaccgggagctgctctacaacgaggaggacctgcgcaatccgtggttcgtctgccggtcgaaacactgcaagatttgacggaagcggttccgaaccgttgccgagatatacgaagaagaggtcgtccgcgcgtcgggcaacctcattttttattcgccggcgaatcggcctcagccggtttcggccagcttctgtccgccaacctcagcttgccaacctcagcctgctacagcccgccaacctcattcagccccggctactactgccggcttccgccactcgatcacatccggtggactccggttttgcccgacggccgccgcgttactccgcctgcgccgcgccgaggaatcccatgacgctgagcagtacgattacggccacaagtacgatggagagcaccgtgacgtatctttttccggatttgtgccagaaggcgaggatgcccgcgaagagcgcggtgtataagacggcttcagggattccgcccagatgatactgcacgggcaggatcgtgtagatgtagccgtcgaacgagccgggtgtgggacctatggtcgagatgaaactcaggcccagaaccagccacgccagtttgaggaatccgtttttgccgtacaggaatccgcgtacgggcagcagcgccagcgcgatcagcactccgcggaaaatctgcagtccggggccgagcgcgacccacggcgagcttacgggccgcatcagcagagccagcgactcggacgagaagtgggttctgtaatcgaggaagagcagggcgaaaacgccggcggtgaagtaggcgatcacatgcgccgagcatatgcgccagacgaatgtcttcggggattcgggttgtcggatcatgttcggcgggtttgcaggggtttcagtccgttcgctctgggactatttcttgtgcccggcctcttcgatgtcgcaggccgagcagttgcccgaacatcccgcggccgtatgcgtgtcggagcagccggcgctgccgtccgcttcgcgcgtttcgtgtacggcgcacttgatgcccagtcgctgcatgttcttgttggtcgagatctcggagtcgatgttatgtcccttgatcatcagcgtcagcgacatgcccacgacgaaaagggccacggcccccagcgcgaacagaaaaacgattaaccatgtcggcatatcaataaggtatttttacgtcccgaaattttggctttcggtcacaaatgtatacatttgtaagataaattgcaaaaacgctgccttctcttcggcggcggatgcaaaaagacaacgacgcaatactatgaaaatcgtaatagcgggagcgggagagatggggagccatctggcgaagatgttgagcggcaacggccacgacatcaccattatcgacagcgaccagaaactgctttccgacgtggggagtctggccgacgtgattaccgtcgagggggattcgacgactttcgccgtgctccgcaaggcttcggtgcgcaagtgcgaccttttcatcgccgtgaaccacgaggagaacgacaacgtcgtggcggcgatgctggccaagaagctgggcgcccggaagtccatcgcccgcatcgacaacaacgagtacctcgaacccaacaacaaggagatgttcatcgacatgggcatcgactacctgttctatcccgaaaaggtggcggcccgcgaggtcatcaacctgctggggcacacctcgactacggagtatgtcgatttttcgagcggcaaactctcgctggtggtgttccgtctggaaccggcctcgccgctggtgggacggcagatcgagggcttcgacgacgacgagacgccgctgagctaccgcacggtggccatcacgcggggcggcgagacgatcatcccccggcagggcgagatcttcaccgagggcgacgtgatctacgtcatcgcgcgtcaggacgccgtgaagcaggtcatggagttctccggacagtccaatatcgagatcaagaacatgatgatcctcggcggttcgcgcatcggcatccgcatcgccaccgaattgcaggaggaggtgaatatcaagctggtcgattacaacgccgagaaggcctaccggctggcggagctgctcgacaagacgctgataatcaacgaggatggtcgcaacactgaggccatgatggaggaggggctttccaatatggacgccttcgtggccgtgacgggccgcagcgagaccaacatcctcgcggcgatgctcgccaagcgcatgggtgtcaagaaggtgatcgccgaggtcgagaacctcaattacatcaacctcgccgagtcgatcggcatcgacacgatcatcaacaagaagctggtgacggcgtcgaacatcttccgcttcacgatgtccaccgacgtgcaggccatcaagtgcctgacgggcagcgatgccgaggtgctggagttcatcgtcaagcccaatgctccggccgtcaagacccggatcaaggatctggggctgcccgaagatacgatcatcggcggcatcgtgcgcggcgacaaggtgttcatcgccgtggacaatatggaaatcaacccctacgaccgcgtggtggtcttcgccatgcccgcgtccgtaggcaaagtaggatacttttttaactgacggcgcgtgccgcgaggcccggcgcacggcgcagggcagcgcacgccgccggcaacgaaaccgaacagacacgtgtcattcagaagcatattactcaaagcatggttttcgcagcgcgagcgggccatcgatcgtttccggcgccggccggccgagacgcaggaacgcgtcttcaggcagctgctgcgccgcggacggcggaccgaattcggctggcgttacgatctggggcatgtccgcacggtcgagcagttccagacgatggtcgaaacgttcgattacgagacgttcaagccctacatcgagaagatgctggccggcgagaaaaacgtcgcctcgccgggccgcgtgaagctcttcgcccgttcgtcgggcaccacgtcggaccggagcaaatacatcccggtcacggaggagtcgctctggtggaaccatacgctgggcatgcgcgacgtggcgacggtcttttcgggcaacaatccgaagaccggggttttcgaaggcaagacgctgacgctgggcgggtcgtgcagccgcgaagggcgcaatctggtgggcgacctgtcggccatactgatacacgagacgacgttctggagcggctggttccgtgcgccgcgtatggccacggcgctcattcccgacttcgaccgcaaggtcgaggcgatctgccgcgagtgcgtcggcgaaaacatcacggcctttgcgggcgtgccgtcgtggaatttggcgatgatgcgccgcgtgttggaatatacggggcggcagaacctgctcgaagtgtggcccaacctctgcatgttcgcccacgggggcgtggaattcggtccttaccgccgctcgttcgaggcgctgataccctcggagcggatgcagtacatggagacctacaacgcttcggagggcttcttcgcgctggccgacgatccgtcgcgcgacgacatgctgctgatgctcgactacggcaacttcttcgagttccgcagcggcgggacgatcgtcccgctggagggcgtggagtgcggccgtgtgtacgccatgctgatcacctcgaacaacggtttgtggcgttacgaaatcggcgatacggtggagttcacctcgacgaatccctaccggataaggttcgcgggccgcacacggcagtatatcaacgtcttcggcgaggagctgatcgtcgacaacgccgaccgcgccctgatcgccgccagcagcgagaccggggccgtcgtcggggagtataccgtggcgccgtgctacatgtcgctccgggagcggggcgcccacgagtggatcgtggagttcgagcgtgagcctgacagccgcgagcatttcgccgaagcgctcgaccgggagctgcgggccgtgaattcggattacgacgccaagcgccggaccacgctcgaacggcagcggctgacggtcgtggaccgcgggcttttcctcgcatggctgcgcgcccgcggcaagaacaaggtgccgcggctggtcaacgaccgccatgtggccgaggagatactggcattcggcggggagaagaagtgacggcggacgtttttgcggcgcgacgccatgatgacagggcaccggaacgctccggcaggacaaaaatgtaaaacaaatatcgtataatatgtatatagcaattgcaggcaacatcggaagcggaaagacgacgctgacccagattctgaccaagcgctacaatgccaagtcgtatctcgaagagtgcaacaacccctatatcggcgacttctatgaagatatgaaccgctggtcgttcaatctgcagatgtactttctgggaagccgcatccagcagacgatggacatgctttccgacggcggttcgggcgtgatttttcaggaccgcacggtttacgaggatgcgcatatctttgccggcaacctccatgaaatggggctgatgcctacgcgcgacatcgaaacctacatgaagattttcaggctggtgaccgagctgattcccaagcccgacctgctgatttatctcaaggcgagcgtcccgacgctgatttcgcagatccgcaagcgcggccgcgagtacgagatgaatatcgacgagctgtacctcaagcggctgaacgacaagtacaacaactggatagacaacatatacgaaggcgacgtgctcgtggtagacaaggaccatgaggatttcatttcggaccctgccgtgctggataaaatctgcgcgcggctggatgcgcttaatacccggaagtaacgcatgacgctgcctgcgaagtttgccgagcgcgttttgcgcgatctgggcgatagcgagggcgcggcgctctgcgcggcgctcgacaccgagccgcccgtgtcggtgcgcctgaacccggccaagtgcggcggtacggagaacggcggagccgggcgggaggagtatgcggacaaggcggccggccgttcggacggagtgccgcctgccgtgctggccgacgccgacggccgggtgccgtggtgcggcgacggatattacctcgcggcgcggccgcagttcaccttcgacagcgatttccatgcgggagcctactatgtgcaggaggccgcgtcgcagttcgtgggacatttgttgcagggtgtcgaagtcgccggcaggcggattctcgacctttgcgccgctccgggcggcaagacgacgctctatgcgtcgctcgcgggacctgacgggctggtcgtcgccaacgagatcgaccgccgccgcgctcaggtgctggcggacaacgtccgcaagtggggcacgggcaacgttgcggtgacgacgtgcgaagcccggcagctgggcggtttcgaagcgtggttcgacgtggtggcggtggatgctccctgctccggcgaggggatgttccgcaaggaccgcgacgcccgcggcgaatggagcgaaggcaatgtaaagctttgtgccgcaaggcaggacgagctgttgcgtgaagcgtggcgtgcgctcaaacccggcgggaccctgatatacagcacctgcacgttcaaccgcgacgaggacgaaggcgcgctcgaacggatgctcggctgggcggaggacgaagcggcgcaggccggggaggtcgccgtcgatgcgtcgtgggggattgtctgcgggcgcgtgggcgcgttccggaccttccggttttatccccaccgggcgcgcggcgagggattttttgccgccgtggtccgcaaggctttcgatgcgggcggccgctgccgcacgccgaaggcgcggcgcacggtcttcgcttcggtggacagagctgcggcagccgaactgcgccgctgggtgaacagccccgaacggatgtgcttcgcgacggtcgccgagacctgctacggctattatgtcgcgcaggcggaagccgtaaaagcgctggccgaagcgcttccggtgatatattcgggcgtggcgatggggcagctcttcaaggggcgtctgcgtcccgatcccgcgctggcgttcttctgcggactgaaccgggatgcggttcccgccgcggagctggacgaagagcagacgctccgcttcctgcgcaggcaggagatcggggccggaccttttgccgaagggatcaatctggtgtgcgcgcggggccgtgcgctcggattcgcgaagcgcataggaaaccgggtaaacaacatgtatcccaattcattgcgaattattaaacaatagatatggccgagaaacttttttattcgatgggcgaagtggccgagatgttcgacgtcaatgcgtcgctgatccgtcactgggagtcgcagttcagcgtcatccgccccaaacgcaacaagaaaggaaaccgcctcttctcgccgcaggatgtcgagaatctcaaactgatctatcatctggtcaaggagcggggaatgaccctcgaaggggcgaagaaagcactccggcagcagcctgccgagggcggaatggaacgcgatgcggagctgatggagcgtctgcagcgtatccgcgcgctgctggtcgaggtgcgcgaggacctgaaggccggcgagggggaaatccttgccgacgctgacgccgatactgacgccggtgccgtgccggatgcgccggacgccgaagccgccgcaccccgccgcaggggcaaacccgtggtgaagatcgctgcggaaggtgaggaagctgccgatgcgggacactcggtggcgaagcgtacccgcaaaccccgccgcaagaaggaggaggtcgaaaacaaggagctgttcgccttttacgagcagtcgctgttttaggcggggcctctattaatacagttaacgatataaattatgcttatccgggaaataaccgacgtcatcgagcgttttgcgccgctggcgtggcaggagtcgtacgacaacgccgggctgatcgtgggccggcccgacgacgaggtgcgcaaggcgctgttggccgtggatgtcaccgacgaggtgatggccgaagccgagcgcgaggggtgcgatctgatcatcacgcaccatccgatcgttttccatgccctcaagcggttcaattcggccgatcaggtgcagcgctgcgtcgagcgggccatccgcagcggcattgcgctctatgcctgccacaccaatctcgacagcgcgccggaggggatgagctggcgactggccgagatgctgggcgtggcggacctgcgtgtgctgcagccctctgcggccgacgcgaaggtcggattcggcgtggtgggcgaactgccgggagccgtggcgaccgtggagttcatgcgccatatccagcgaacgctcggcgtgcgcgtcgtgcgtcatagcgacatcgcttcgccggaggtgcgccgcgtggcggtctgcacgggggccggggcttcgatgatcggcgaagcccgccgcgcaggggccgacatttacatcacggcggacatgaagtacaacgacttcatgacgcccgataaagccctcaccgtagcagatataggccattttgaaagcgaatattgcgcaattcagattttatttgatattttatcgaaaaatttgattacctttgcggttcgcaagagtgaggactcgcgcaatccggtgaactatttggtttaagtctaaactatagaagacattatatggcaacacaaaagaaaactgccgaagttgattattcgatgcaggagaagatcatggcgctttacgagctgcagaagatcgacagcaaaatcgatgaaatcaacaaggtaaaaggtgaactgcctcttgaggtacaggacctcgaagatgagatgaccggcctgagaacccgtatcgacaacatcaatgccgaaatcgaggagctgaatacgctcaccaaacagcgcaagcgcgaggtggatcaggccaagattcttatcggaaactacaaggaacagcagaacaacgtgcgcaacaaccgcgagttcgacgccatcaccaaggagatcgagtatcaggagctggagatcgagctggccgagaagcgtctcaaggagtacagcgccggcgtgaaggccaagaagctccagctggaggaggccgaagccgtagccgacggacgcgccgcagaccttgccgccaagaagagcgagctggagggcatcgaggccgagaccgcaccgctggtcgccgagttcgaagtgcaggccgaccgcgccaaagccaagatcgacgagcgcctgctggcggcctacagccgtatccgccagaatgtccgcaacggactggccgtggtgaccgtcaagcgcgacgcctgcggcggctgcttcaaccgcattcccccgcagcgtcaggtggaaattcgtcagggcaagaagatcattatctgcgagtactgcggacgtatcctcgtgaccgatcccgaagaggttcaggagtagcggatcattcagtaaacaagagggccggagtcattcaactccggccctcttcgttttcgcgggcggctaccatacgaccccggcgtcgagaatcaccccgtcgtcggcgtcggacgatgcgaacgaatcggctttgtactggacgcagatcataatcatcggctccgcgccggtgttgcgcagcgcgcgtcggccgtcgggggatacccggattacgctgccctcgccgacggcgaagattttgccgtccacctgaaactctccgtcgccccggacgatgatgtagagttcctcgtgcgtcttgtgggtgtggaggaacccgacgcctgcgcccggctcgatgcgctggaacgacatctccgcgcccgtagcgccgagggcgctgcccgtaaatacttttccgggaatctcgacgcccggagccaagatcagcgtgtgttgattcaactcgtccatctttccgactgtcacggcagcgaaattcgcgccgccggctgttttttcgatttttttcatctttgctgtacgtttggtttgtaaatggggtttgtatttgacaagggcaaagataaggagaacgttcgtcggatgcaagacggtacgtgcgcgtatgttacttacattgaggaaactaatgctggacgtcaggccgaacggggcgagaaaaaatcgaaactttttttcgcgccgtgcggaatctccggttgccggcggcggtgcggcgagtgttaatttattaacatcaaaatccttccgacttttataaatattccttaactttgcaaagtcgtaattttcggactaaaattactaacaaatgaagatagctattgcccagttgaactacacgatcggggatatcgacggcaacgcctcgaaaatcatcgattccatcaacaaagcgaaagcgcagcgcgccgaccttgtcatctttgccgaacaggccgtgagcggaacaccggctttcgatctgctgcgtaagacgaccttcctcgaactgtgcgaggacgcgctggtcgaaatagcttcgtgctgcgacggcatcgccgcgatcgtgggactgccgatcctcacgcgcgaaggaaccatcagcgccgcggcgctgattcaggaccgcaaggtgctgcgctacgtgggcaagaaatatatctcggcccgccgcgaaatgggcttcctcgtcccctcgaaagggttcgaatatgcgacgatcaaaggccacaagtgcgccatcatcgtgggcgacgacctgagccgcgagcacgatttcgacaagtcggtcgaaaccgtcatctcgatcaacgcccgcaagtacggcaagggcgccatgacctaccgttacgatatgatgcgccacctgtcgttcgtcgaagccaagaacatcgtgctggtcaatcaggtcggaggtgcgacggacatcgtctacgacggcacgtcgggcgcgttcaacaaccgcggcgagctggtgctgatgatgaagcagttcgaggaggatttccagattttcgacaccaaggcccagaatcctcccgtcggggttccctcgacctacaacgaccgcacgcggatggtctatcaggcggcgcgctgcggactccgcgactttttcctcaagaacggttacaagaaggcctgcatcggcctttcgggcggtatcgactcggccgtggtggcatgtctggccgccgatgcgctgggcgccgggaatgtccgcgccctgctgctgccttcgcagttctcgtcggaccattcggtcgaagacgccaagaagctggccgagaacctcggcatcgaatacaacgtaattcccattaccgaaatatataccagtgtggtgaacaccctcaagccggtcatcggcggccgggagttcgacgccacggaggagaatatccagacccgtatccgcacggtgctgctgatggccgtgcagaacaagacggattacattctgctcaactcgtcgaacaagagcgagaatgcgctgggcctgtgtacgctttacggcgatacggcgggtgcgttcagccccacgggtgacctctacaagagcgagatgtacgacgtggcgcgttatatcaaccgcacgttcggtaatgtgattcccgaaaacattctggacaaggagccgtcgtcggagttgcatccgggacagaaggacagcgatattctgccgccctacgaggtggtggacgccattctgctgcgcatgatcgaggagggccagcaccgcgaggagatcgtcaatgcggggttcgactcggaagtcgtggagaagatccactgcatgatcatgcgcaacgagaagaagcgttaccagttcccgcccgtgctgcgcctgtcgatgtgctcgttcgggcacgaacggctgatgcccctgaccaataaatacggcgactgaggcgtggcatccggaatcatcgaacacgaagggatcgtgtcgcgcgtcgaaggcgaccgggtctatgtgaagattacctcacagagtgcctgcggtacctgcaaggcgcgcgaggcgtgcggcttggccgaagcgcaggaaaagatcgtcgaggtgacgacccccggagcgcagcaacactacaccgcaggcgaaagcgttacggtcggcgtccgccgcagtgcgggcgctgtcgccgttatattggcctatgtcggcgcgctggcggtgctgttggcggtgctggccgcggcggtcgccgcgctgggatggagcgaaggccgcagcgccttggcggcattggccgccgtaggcgtctattactgcgtgttatggctcttcagacataaaatcgaacacacaattcatttctcaataaccaaaaactactgatggaagtattactttacacaatcctgacgctgtgtgcgctgggagtgctttccgcggtgatcctctatttcgtggcccagaaattccgggtcgaggaggatcccagaatcgacgaggtggagaagatgctgccgggcgccaactgcggcggctgcggtttcgccggctgccgcggcatggccgatgcgctcgtgaagcaggacgacatttcgtcactcttctgtcccgtgggcggcggcgactgcatgaaggccgtcgcggcttacctcggcaagtccgctcccgaaaaggaaccgcaggtcgctaccgtgcgctgcggcggaacctgcgagaagcgtccccgcaccaacgatttcaacggcgccaagtcgtgtgctgtggcttcgtcgctctatgtgggcgaaacgggctgtgcgttcggctgtctgggattcggggactgcgtcgtctcctgtgctttcgacgcgatccgcatgaatcccgaaacggggcttcccgaagtcgatcccgataagtgtacggcctgcggcgcctgcgtgaaggcgtgtcccaaaatgatcatcgagctgcgcaagaagtggcccaagaaccgtgcggtatacgtgtcgtgcgtgtcgaaggacaagggcgcggtggtgatgaaagcctgcaaggccggatgtatcggctgcggcaagtgccagaaggtgtgcgcgttcgatgcgattacgattgcgaacaacctcgcctatatcgacccgcagaagtgtaagctctgccgcaagtgcgtgaacgagtgcccgacgggtgcgatccggctggtcggcatggaaccgctgcccaaggcgccgaagactccggcggctcccgctgcgccgaaggccgcattggccgcagagaaaacggcaccggccgctgagaaggctgttgaatccgccaagccggccgcggagaaggccgcgcttgcatccgggcaggccgctccggccgacgcttctaaggcggccgcagtcgaaaagcctgccgggagtgccgctgcgcctgagaaggccgcgcccaacgcagagaaggccgctccggcggaaaccgcttccaaagccgaataaacggatttttccgcagagccggggcgggcgtggacctgccggggcgggcggaagacgaaggaaagaatccaaccgaaaaaccagagaaattaagatatgaagacatttccaataggcggagtccatccgtcggaaaataaactgagcggcgccaaaccgatcgaggtgcttccgctgcccgatgcggtggcgattcccctcgcacagcatatcggcgcgcccgccgcggccaaggtcgccaagggcgacaaggtgctgacgggacagctcatcgcagaggcgtcaagctttatgtcggccaatatccactccccgatttcgggtacggtgacggctgtcgacgccgttcccaacggtcaggggctgcgtcaggtgatgattacgatcaaacgcgagggcgacgagtgggccgaaggcatcgaccgttcggagacgctcgtccgcgagtgcgcgctttcgtccgcggagatcatcgcccggatcaaggacgccggtatcgtcggcatgggcggtgcgacgttccccacgcatgtgaaactctcggttcctcccggaaaaaaggccgaagccttgattatcaacggcgtggagtgcgagccttacctgacctcagaccaccgtacgatgctcgaacacggcgaggagctgctcgtgggcgtgacgatcctgatgaaggcgatcgccgtggagaaggcttacatcggcatcgagaacaacaaacccgacgccatagcgcacctgcgcaaactggccgaagggtataaggggatcgaagtggtgcccctcaaggtgaaatacccgcagggcggtgagaaacagctgatcgccgccgtgacgggccgtgaggtgccgcctccgcccgcgcttccgatcgacgtgggcgccgtggtgtgcaacgcttcgacgacctatgccgtctatcaggccgtgcagaagaacaaaccgctcatcgagcgcgtggtgaccgtcacgggcaagggcgtgaaggagccgaagaacctgctgacccgcatgggcacgccgatttcggcattgctcgaagcggccggagggcttcccgccgatgcgggcaaggtgatcaacggcggtccgatgatgggccgggcgatggtcaacctcgattcgcccgtgaccaaggggtgttcgggcattacggtgatgagcggccgcgatgccgtgcgccgcgaggcttcgcagtgcatcaagtgcgccaagtgcgtggccgcctgcccgatggggcttgaaccctattacctctcgaaaatgacgcagaagaagggctgggacgcgctcgaagagcagatgatcacttcgtgtatcgagtgcggctgctgtcaggcttcgtgtccctcgtacctgccgctgctggactgggtgcgtctgggcaagcagaccgttatgggaatcatccgtgcgcgtgccgcggctcccaagaagtaaatctccgaacgtaaaaaataccaaatatttatggcaaacaaacttgtagttgctcccgcaccgcacgtacagacctcgcagtctacggcccggatcatgcgcgacgtcgtgatcgcgctgatgcccgcgctggcggtctcggccgtggtgttcggagtggacgtactgcgtgtcacggcgctttcggtcgcggcctgcgtactgttcgaatatctgattcagaagtttctggtccgcggcgcttcgaccatcggcaactggtcggcggtggtgaccggcgtgttgctggccttcaacctgcccgcgtcgattccttggtggatcgtgctgatcggcgctttcgtcgccatcgccatcgccaagatgaccttcggcggactgggcaagaatccgtttaaccccgcgctggtgggccgtgtgttcctgctgatcgcctatccggtgcagatgacctcgttccccgtaccggtgaacggctcgttcgacgcgctgtcgggcgcgacgccgctggcggccgtgaaacacggcgctgccgccgacgtgctcggcgtgcaggaactgctgttgggcaacatgccgggttcgctgggcgaggtggccgcgctggcattgatctgcggcttcgtctacctgctgtggcggcgcgtcatcacgtggcagattcccgtgacgatcctcggcacgatggcgctgttcgcgtttttcgtcgcggcggcgaagggcggactctcggccggtccggtgctgtggcagttcccgttgttccatgtgttggccggcggcgcgctgctgggtgcgatcttcatggcgacggactattcgacctcgccgatgaccgtccggggcggcgtgatcttcggcgtcggcatcggcgcgattacgatgtgcatccgtctctggggcgcttatcccgaaggcatgtcgttcgcgatcctgatcatgaacgccgtggtgccgctgatcaacaaatatgtcaaacccaagcgcttcggcgtaaaataggaggggtgcagatatgaaaagtacacttttgaatatgacggccgtgctcttcggcatcaccctcatcgcttcggccggggtgggcgccgtgaacatgatcacggcggaaccgatcgctcaggccgagcaggcggcgaaaaccgccgcgctgaacggcgtgcttccggcgttcgatgagacggcggccgaaacgctgaccatcgacgagatgccgatcacggtctacaccgcgaccaagggcggccagctggccggatatgccgtggagtcgatgaccaagaacggtttcggcggcgcgatcaacatgatggtgggcttcacgcccgacggcgaggtgatcaacgtcaatgtcctgaagcaggcggagacgcccggactgggaaccaagatggccgacgccgacaacgtgctgctgcgcagcgtcaaggggcagaaactcgaagagaagaagctcgtgaacggcaaactggccgtcgccaaggacggcggcgacgtcgatgcgctgacggcggcgaccatttcgtcgcgcgcctatgtggatgcgatcaaccgtgcatggatggcttacaagagcgttgcgacgggtgcaaccccgaccgacgtgtcgtccggcgcgacttccgcggccggagatacggcggaggaacaaaccagcgggcctgaggctcaggaaggaggacaaaatgaataagctgaatatcatcgtaagcggcatcgtcaaaaacaacccgacgttcgtgctggtgctgggcatgtgccccacgctgggtacgacgacctcggccgaaaacggcatgggcatgggactggcgacgatggccgtgctgatcatgtcgaatctggtgatctcgctcatcaagaacatcattccggacaaggtccgcatcccggcgttcatcgtcgtgatcgcttcgttcgtgaccattatccagatgctgatgcaggcatacgtgccggcgttgtacgcttcgctgggcgtatttatcccgctgatcgtggtgaactgcatcatcctcggccgcgccgaggcgttcgcttcgaagaactcgccgctggattcgatcctcgacggtgtgggcatcggtctgggctttacgctggccctgacggccgtgggcgccgtgcgcgaaatactgggcagcggcgcgattttcggcgtcagcctcggtacggcggattacatgccgctgatcttcgtgctcgcaccgggcgcgttcctcgtgctgggatacctcatggttttgtttaacaaattagccaagaaatagttatggagctttcctattttgcaatcatcatcggcgccatcttcgtaaacaacgtcgtgctggcgcagttcctcggcatctgccccttcttgggcgtgtcgtcgaaagtcgagacctcaatgggcatgggggctgccgtaacgttcgtcatggcgatcgccgccgtggtggcatggctgattcagacctatgtgctcgttccgctggacatcgtctacatgcagaccatcgtcttcattctcgtgatcgcggcgctggtgcagatggtcgagatcatgctgaagaaactttcgccctcgctctatcaggcgctgggtatcttcctgcctctcatcacgaccaactgcgccgtgctgggcgtggcgatcctgatgatccagaaggagttcaatctgttgcagagcgtcacctactcggtggctacggcgctgggcttcgccctcgcgctggtgcttttcgccggtatccgcgagcgtctcgatttcgaggacgttcccaaagccttcaagggggtgcccatcgcgctgatcacggccggtatcctcgccatggctttcatgggattttcgggactggtgtaagtaccgaaccgggagcggctgtcgggaagaaaacagccgtccgggagcatggcggggaaggttacgccgccgttgcggacacgaaaaagggaagttgctgcggcaacttcccttttttatttcgcctgcaggctgtcggcctgttcggcgggcggcacgaaccgctggcggatcgcctctttggccgtgcgggagatgtaggcccagcgcgtggcgatcatgacaagcagcatcgccacgacggcgatcatcatcagctcctgcccggaccgggctttgaaccattcgaaaagtttcatgtttttgcgattattttcggttgaaacgttcgtttcttgcgtgcaattaattaattttgcaaaaataacaataaaaacccggattcgaaatgaaggatatcataaaacttcacgacaagaaattcaaaatcatgattcccgccgagaaaatcgacgaggcggtatcggctgttgcccagcgcataaacgaggattacggcgacaaggagacgccgttgttcgtcggcgtgctgaacggctcgttcatgttcatgagcgatctgatcaagaaaatcgagttcaacaacgagctgtcgttcgtgaagctggcctcgtacgagggcacctgttcatcgggctgcgtcaagagtctgatcgggctgaacggcagcatcgaaggccgccacgtgatcgtggtcgaggacatcgtcgatacgggcgagagcatcgagtacatgatttgcgatctcaaggcgcagaaacccgcgagtctcgaagtctgcacgctctttttcaagccggggtcctaccgcaagcagattccgatcaagtaccgcgcgatggagatcggcaatgaattcatcgtcggctacggactggactacgaccagttgggccgcagtctgaaagatatttacgtggtcaccgaataatggctctcaccgcagataccgaactgctggacggcgggcgcctgctgcccctcgttgaggatttctataccattcagggcgaaggcttccatgcggggaaacccgcctatttcatccgtttgggcgggtgcgacgtggggtgccgctggtgcgacgccaagtatacgtggaatccgaaactctatccgccgaccgacgtgcggacggtcatcgaccgcgcgctggcgtgtccggcgcaggcgatcgtcattacgggtggcgagccgctgctttacccgctgggcgtgctgaccgaaaccctgcacgggaaggggttgcagatttttctggagacctccggaacgcaccctttcagcggttacttcgattgggtatgtctgtcgcccaaacggcagcagcccccgttggacgaagcgctggagcgggcgcatgagctgaaggtgatcgtcgaaagcgaaagcgacttcgaatgggccgagcggaacgccgcacgggtgcggccggagtgcatgctctacctgcagcccgaatggagcgtcgccgaacgggtgatgcccgcgatggtcgagtacgccaagacgcatccgaagtggaatatctccatccagacgcataaatacatgcacataccctgatgagtttcgaggtgggccggaagttctggatcgccgccacggcggtcatcgtcgtcgtcacgctgttcgtggtggggcgcaactcgctgcatgccgtgaaaatcaagcgtcagatcaatgcgatgacccgcgaaaaggagtattaccggacgaagatcgagcaggacagcacgctgctggagcggctgcagtacgacgattatctggaggaatacgcccgcgagaattaccacatgcagcggcgcggcgaacatgtctatattatcaaggaataagtttttcgccgggagacggctcccggagtcaaggaaatgcggcggccttcgggccgctgttttttttttgttatggcctgccgagggacgaaatgccggctgagaggagatatgccgggcggtgcgagggccggccggtttgttcggctgccgtttttttgttatggcctgccgaaggaggaaatgttgtcgaagggcgaaacgttggctgagaggtgatatgccgggcggtttgtttggccggacggtcggtgcgactcccggtcggtttggttgccggtttgttcggtcgccgattctccgccgccggctttttggtggccggttcgtacggttgccgattcgttcggggagtgttttttgtcggggcggttggccggttttggggtttgctggttttccggggcgattttcccgtcggcggttgcggaaatgtcagtaatgcgtgaagccgtgccagtcgagggggcgaagcgttccgttttcgaaccactccagctctctgccgtccgtgatccggccgacggggtggagcggggcgccgaaccgggcgaggaagtcggcggcgagacgttccgcgtctgcgcaatcggccgtaagcagaaggacgtagtcctcgccggcgcaggcggcggtccggatgtccgcatctgctgcggccggaatccgctcggtatcgatggcggcgccgacgcccgaacgttccatgatgtgtcggatgtccgacgccagtccgtccgaaatatccatcatggcatgtacttcgtgccgctggccgagccagacgccttcggcgacctgcggccggggattgcggtgtacggcagcggcgggggtgtcgtaacggcccgcgagaatgtcgcgcaggcccgccccggaggctccgagtgctcccgccgtgaaaatcacgtcgccgggacgcgctccgctgcggcgtttgatatgtgtgtcggcggcgcggccgatggcggtgacgttgatcgtgatgcctgccgccgaacgggtggtgtcgcccccggcgagcgttacgccgaattcttgggacagctcccggtaaccctgcatgaactcttcggcccacgctccggtcgcatcgtcgggcagcgagagtgacagcagggtggcgacgggacgtgcgcccatcgaggccacgtcgctcaggtttacggcgagggatttgcgtcccagttcccgtgaggaggtggcggcgcgcaggaaatgcaccccttcggcgagcatgtccgtagtgaagacgagcgattcgccgccgccgacgggcagtacggcgcagtcgtcgccgatgccttcgaacccgttgtcggggagcgttgcgaaaaggtcttttatgcggtcgatgaatccgaattcggtcatggttttccgggcggtttgacgtatattgcgccgttacggtcgctttatattgggtgatattaaacaaagatattaaaaaattctttaaaatcactatctttgtctgcgaatcgcggcgggcggagtccgtgcgcggctaacagtcggaactatgaaaatattgattctcaacggcccgaacctcaatctgcaggggcggcgcgacaccggagtttacggtacgcagaccttcgaaaccttcttcgaacggctccggtcgctctatcccgccgtcggattcggctacttccagtccaatatcgaaggcgagttgatcgacgccgtacagcaggccgacggcgtttacgacggtgtggtgctcaacgccgggggatatacccatacctcggtggcgctgcgcgacgcggtgtcggcggtgtcggttcccgtcgtcgaggtgcatatctcgtcgatcctcgcgcgtgaggagttccgccatgtctcgctgctggcccccgtggccaaaggctcgatcatgggattcgggctggattcctaccggttgggagtcgaagcgctgctgcttggcggcgaaaagtagaaagccgcttccggcagcatgccgtttgcataggagcaggtgcgggctgccgctttcggggattccggagcgtttcctgtcggagcgggaaaggccggcgtttctgccgcgctggcggcagcggattccctcggagaaggggagtcggggcggaccggaattaccgagacggctcaaggctgccgcggaatatgtcgatcacacaataatgttcaaattataagcatcatacgtttatgtacagaatgaaaaaaaccaagatcgttgcgacgatgtcggacttccgctgcaccgaggagttcgtgaagaacctttacgatgccggtatggacgtcgtgcgcgtcaattcggcacacgtgacggaggacggagccacgcatatcgtcgagaccgtacaccgggtgaatccggccattccgatcatgatagataccaaagggcctgaaatccgcgtgacgacgatcgccgacgaatacggcaacagcatcaatttccgggtgggcgaccgcgtcgccgtacggggttcggacggcagcgacatgaccacccgcaaggtggtttatatgaacgtgccgaccatcgtgcgcgacattccggtcggggcgcgcatgctgatcgccgacggcgagctggaaattcgtgtggtggagaagaccgacgaggagctgatctgcgagttcgtcgtgggcggcgcgatgcgttcgcgcaagagcgtcaacgtgcctgcggtgtcgatcgacctgccttcggtgacggagaaggaccgccgcttcatcgagtgggccgtgaagaacgacgtcgatttcatcgcacactcgttcgtgcgcagcgccaaggacataaaggccgtgcaggagattctcgatgcccacggcagcaaaatcaagatcatttcgaagatcgaaaatcaggagggactcgacaacatcgacgagatcatcgaggcgtcgtacggcattatggtggcgcgcggcgacttgggcgtggagcttccggccgaagcgattcccaacacccagcggcgcatcgtcgagaagtgcatttgcgcgaagcgcccggtgattatcgccacgcagatgctctattcgatggtcaagagtccgcgtccgacgcgcgccgaggtgagcgacgtggcgagcgccatttacgagcgcgtggacgccgtgatgctgagcgacgagaccgccatgggcgactatcccgtggagtcggtcgagacgatggctcgcgtggcccgcgagatcgagcgcgacgaaacgcatttcaagccgatgatcgacatggacatggtttcggtgaaccacgagatcacggcccagctggcccgctcggcggtgcgcgcttcgacaaacctgccgatcaaatacgtggtcctcgacaccaagaccggccgtacgggccgttatctcgctgcgttccgcggccggaagaccgtgatggccgtctgctaccagctccacgcgcagcgtattctggcgctgtcgtacggcgtggtgccgattctgcgcaatcaggagctgcacgacaagtatcatttcttggtcgatgcgctcgaattcctcgatcagtaccgcaaactcaagggcgaggatctgctggccatcgtgggcggcagcttcggacccgacggaggtgcgtcgtatgtcgagatcgccaatgtggacaacatccgccggcgcaacgaggagatcgttgcggcgcaaaagtgttagccgttgaaaggggagttgaaggataaggtcgcccgcggcgtggcgtggagcatggccgagaagatcggtacgatgctcctccagatggccgtgagccttattatcctgcgcctgctgacccgcgacatcctcggcgtcatggcgattccgacggccgtggtggccgtggcgctggtgctcgtggacagcggtttttcgcaggcgctgatccgcaaggcggccccttcggcggacgattacaaatcggttttcgccttcaatatcggggtttcgctggtgatgtacgcgcttttcacggcgctggcgtttccggcgtcgcggttctacgacatgccccagatcgcgcagatcgcacccgtgtttttcctgcagctgcccatcggggcgctgtgcgccattcagaatacgatctgcgtcaggcagttccgtttcgcgctgttgtcgaaggtgactttcgcctcgtcgctcgcgggcggactggcggcgatcggtcttgcgctcgccgggttcgggatctggtgtatcgtggcccagcgcgtgctgcaggcggcggtgcggactctgctgctgtggtggctgagcgactggcggccctgcggggcgtgcagccgcgggccgctgcgcgaaatggctcccttcagtttcagcctgatcgccacggacctgatttcgacgttctacaataagattccgcagtttttcctcggacggctctatccggccgatacgctcggctcgttcgatcaggcgatcaagctcaaggatcagccgacgatttcggcgatgcaggccgtgcagagcgtcactttccctgcgctggccaagatcagggacgacgctccgaagttcgccgagagctaccggcaggtcgtgatggtggtctcctacgttcttttcccggtcatgctgggcatgtcggccgtggcgcacgacatgttcgccgtcctgctgggcgaggagtggatgcctacggtgccctatttcgagacggtatgtctggtgggacttttctatccgatgtcgataatcgcctacaacgtattgaaagtcaagagcggcggtgcattgatcgtgaagctggagatcgtcaagaaggtgattatgacgctggtgttcgccgtgacgattccgatcagcgtacaggccgtggtatggggactcgtggtgatcgcattctgcgaaatgtccgtcaatttcctcgccacgaccaagtttacgtcgctgtcgccggggcgtttcgtgcggacgctgctgcctccgctgctggcggccgccgcgatgtacggcgcggtgcggctgacggcccgcgcgattccggagcatgccctgctgcggctgatggccgaagtgacggccggtgcggtttgttatgtcctgctgtcggccctgttccggctcgaagccttccgcgaggtaggggctattgtccggaagcagtttttgcaccgttgattcgcgctgcttgcgtcgggggccgattcacggagcatcggtaaaaataaccgccggttataccttggggtgtaaccggcggtttttgtcggggtggaagaccctccccggccgtcaggcgtagaccttcggggtgatgacgccccgcaggacgaccagcgcgttggtgacgagcgattcgagttcgttctcgccggggtagaccgcgatgggggcgatgaacgagcagaattccgaaatgtactccacgacggatttgttgtgggcgatgccgcctgtcaggatgacggcgtcaacccgtccgccgagggcggcggccatggcgccgatctgcttcacgatgccgtagcacatggcgtccttcaccacgcgggctttttcgtcgccctcaccgatgcgctccatgacctgtatcatggagttggtccccagatgcgccacgagaccgcctttgccggccagcatctgctggatgtcgtgccgcgtgtagcggcccgaaaagcagagatcgaccagttcgccggcgggaagggttccggcgcgctccggtgcgaacggtccgtcgccgtcgagggcgttgttcacgtcgacgacgcggccctgcttgtgggccgcgaccgagatgccgccgccgaggtgggcgaccacgaggttcgccttctcgtagacgatgccgatgcggtcgcagtgcaggcgggccgtggctttctggttgagtgcgtggaagatcgaacgccgcgggcagtcgggatgcccgctcaggcgcgctatgtcgtccatttcgtccacgaccacggggtcggcaatgtaggctttgatgcctgcggtcgccgcgattccgtcggccagcagaccgccgaggttggaggcgtgctccatcgtggcgtgctgcaggtcgcggcgcatggcgtcgttcacttcgtacacgccggcgggaatgggtttgatgaggccgccgcggccgattacggcagcgagggacatgatgtcgaagccgtgttccttcaatgccgtgaggatcatgtcacggcgccagtcgagctggtcgatgatgttggggtagtgtgcgatctgttccgccgagtgacgcagggtcagatccaacaaaggccgctcctcgtcgtagagggcgaccttcgttgaagtagagccgggatttatcgctagaattttgaagcccataaatcggttccggttaattaggttggtgggttaggttggtgggttggttcaggctgccttactgtttcacggccagacaggccagcgcgatcgagtagagcttggtcttgctggtgtcgccgcgcgaggtcagcacgcaggggactttcgttcccatgaccatggctgccagttcgccgccgcagaggtgcgtgaccgacttgaagaagacgttggccgattcgaggttggggaagagcaggcagtcgggatcgcccgcgacggacgagcctttgaccttcttgtgttccgcaacgtccttgtagagcgccacgtcgagagacagggggccgtctacgacgacgtcgcccagctgtccgcggtcgcccattttggccagcagcgcgccttcggtcgaggagatgacgttgggaagcagctgctccgacggagcgatgcaggcgattttcggagtcttgatgcccagcaggttggccgtgcgggcgaggtagccgatctgcacggttttctgcttgaagtcgggcagcggaatgaccgccacgtccgatatgacgagcagtttgtggtagcagggcatctcgacgatcgatacgtggctcagcacgcctttcgggggaaacagtcctgcttccttgttgagaatgccgcgcatgtatttgtcggtcgagaccagtcccttcatcagcacgtcggcattgccggcgacgacggccgcaacggcctgctgcacgcatttgacgtcgctggcttcatcgacgatgttgaatgccttgatgtcgatgtcgttctcggcgcagacttgctcgataacgcttttttcgccgaaaagcgtaggctccacgaggccctccttgtaggcttcgtagacagcttccagcgtatgcgaatcctgaccgtatgccacggccagccgttttttacctctttttctcgcctcctcgacgatttcagtaagatgttggatcatagttgtggaaatgtgctttgaaaattattttacgagattgtatgtgtcggtagcgatgaccagctcttcgtcggtggcgatgacggccactttgacgcgcgaaccgggagtggagaggattttgtttacgccgcgggcgcccttgttggcctcgcggtcgaattcgacgcccatgaattcgagacccgtgcagacgctctcgcgcatctcgcacgaattctcgccgacgccgcccgtgaagacgatcatgtccacgccgcccatttcggctgcgtattcgccgacgaatctgcggatgcgtccgtagtgcatgtcgcgggccagaatggcgcggggattaccctcgtcgtaggcgcggtcgatgtcgcgcatgtcgctcgaaaggtcggtaagacccagcacgcccgatttcttgttcatcatttcgttcagctcggcgtaggacatgccctccttttcgccgatgaaggtgacggcgctgggatcgacgttgccgcagcgggtgcccatgaccagcccgtccacgggcgagaagcccatcgacgtgtcgaacgacttgccgttcagcacggccgtcaccgaagcgccgttgccgatgtggcaggtgatgatcttcgaattctcgaagtccagtcccgcgagcttggcgccggtctgcgccacgtatttgtggctggtaccgtggaagccgtatttgcgcacgcggtatttgtcgtaataggcgtggggcagcgcgtacatgaaattgacggccggaatggtctggtggaacgacgtgtcgaagaccgtgacctgcggcgttcccggcagcaccttctcgatcgaaagcacgccttcgaggttggcgggattgtgcagcggtgcgatctcgaacagcgagcggattttgctcttgacctcctcggtgacgatgcagctttcggggaagaattcgccgccgtgggctacgcggtggccgacggctttcacctcgtccagcgagcggatgacgccgtgctccgggtcggtgagggcgtcgagcacgagtttgatgcccgtcgtgtggtcgggaatcggacggtgcagctcgaaaggctgtttgccgacgggtttatggatgaggtcgccttccggcaggccgatacgttccacgatgccttttgcgagcagtgtgctcgatgcggcttccatgtcgatcacctgatacttgatcgacgagctgccgcagttcaataccaaaattaccattgtctttctatgtagttaattcctaaatgttgttccgatccacatgccgagcgctgcaaaaacgatgcataccgcgacgctcagcgccacataaatcgccgccgcattgtagcatccggcccgcagcaggcgcaccgtgtcggccgaaaaggtcgaaaaggtggtgaagcctccgcagaatcccacgatgagcagccagcccagcgtctcggagctggtggcttccagcaggatgccgatcagcagcgaacccgcggcgttgaccgtgaacgtgcccgccggaaatcccagcagcgtctgtccggccaagatcccgcccgaaagcagataacggacgatgctgcccgccgcgccgccgaatcccacggctataagttcacgaatcataagttaaatatacatctaattttaaggatgtgcaaatttacggaaaaaatgattacgaatcgttatattttttgttgtttttcggggtaaatccgatgcggaaggcttcaggattcccggatctgcccgtcgcccgtgacgacgtatttgtaggtcgtcagttcgggaaggcccatcggaccgcgggcgtggagcttctgggtcgagattcccacctcggcgccgaagccgaactgtccgccgtcggtgaaggctgtcgaaacattgacatagacgcaggcggcgtccacggcgcgcgtgaactgcgtggcggttcgcttgttttcggtgacgatggcttcgctgtggcgcgacgagtaacgggcgatgtgtgcgagagcctcttcgggcgatgcgacggtcttcacggcgagtttgtaatcgaggaattccgtgccgaaatgctcctcggaagcgtgttccaacaggtcggcggggtagtgtccgccgagggccgcgaaagcctcggtgtcggcgtagaccgtgacgcgggcggcggccagcggggcgcaaagctccggcaggtcggcgagccggtcgcggtggacgacgaggcagtcgagggcgttgcagacgctgacgcgccgggttttggcgttgcagaccacggcgcggccctttgcgaggtcgccgtcgcggtcgaagtaggtgtggacgatgccggcgccggtttcgatgaccggaacgcgggcgttttcgcgcacgaagcggatcaggcccgcgccgccgcgcggaatgacgacgtcgacgtaacccacggcgttcagcagcgctccgacggaggcgtggtccgaaggaagcagggtgaaggcgtgttcgtcgatgccttggctgcgcagggcttcgtgcagcagggcggcgatggcttcgttggagcagcgggcgtcgctgccgcctttcagcacgcaggcgttgcccgttttgatgcagagcgagaagatgtcggccgtgacgttgggccgcgcttcgcagatcatgccgaccacgccgaacggaacccgccgtttgacgatggtcattccgttggggcgggtgtgccgctccagctcttcgccctgcggcgagggcaggtgcgcgacggcttccatgtcgtcggcgatggcggcaatgcgctccggagtcagtcgcagacggtcgcgcagcggcgagtcgggggccatggcttcgaggtcgcgggcgttggcttcgagcaggcggggcgtatgcgtgcgcagcagttgtgcggcgtgcatcagcgtgcgtccgagtcgttcggtttcggtctcggccagaagcgttccggcctgacgggcggctttgaacagggattcgtattccatagtcgtcttattcgaggtagaggtaatcgcagtggacgaggggtttcagccctttgcgcccgatgctgcggcgtgcggtttcgctgtcgcacgagatgcggcccacggccagctgcgttccgtcgggcgagaggatgcgcaccaaatcgtcgcgttcgaaatcgccctcgacggccgtgacgcccacggcgaggatgctggcggccttgctggcccggacggccgctgcggcgccttcgtcgatgcgcaggacgcctttggcgaagccttcgctgctggcgatccacattttgacgcccgacgccgtgtgcggggcgggttcgaaacgggtgcagagcacctcctcgccggtcagcgccagagcggtcaggatgttgtcgcggcggccgttggcgatgatgacttcgatgccctcgccggccacgcgcgacgaaatgcggctcttggtcgccatgccgccccggccccgcgatgagcgcgccgggtcgatgtaccgcgagaggtcttcggagggtttcacgcggcggatcacctgcgacgaggggtcggagggcgagccgtcgtagatgccgtcgatgttgctcaggataatcagcgcttcggcctgcatcatggccgccacgagtcccgaaagttcgtcgttgtcggtgaacatcagctcggtgaccgagatggtgtcgttctcgttgacgatcgggatcacgccgttggcgagcatgacctccatgcagttgcgctggttgagatactgccgccgcgtggagaggctctccttggtggtgagcacctgcccgcagacgatgccgtattcgttgaagaggtcgtagtagcggttcagcagcttcacctgacctacggccgagaagagctggcgggccgatacggtgtcgatgcggcccgtgcgctgttcgaggacgctgcggcccgaagccacggcgcccgacgagacgaggatcacctcgatgccggcgcggtgcagccgggcgatctggtccacgagggacgaaatgcgcgtggtgtcggggcgtccgtcgtcgcgggtcagcacgttgctgccagccttgatgacgatgcggcggtatttgctggttctgtccatgtctttgcggtccgggcgtcgcccggcgttacggttcgtatttgtagcccacgcccttgacggtgacgatcttttcgtcgccgatcttctggcgcagtttgcggatgtgcacgtcgatggtgcggtcgcccacgaccacctccgaaccccagatccgggcatatatctcttcgcgcgagaagagtttgcccggcgacgagtagagcaggtccaagagggcgaactccttgcggggcaggctgatttcgcggccgtcgcgcgtgacggtgtagcgctcgcggtccatggcgacgccctcctccgccggagcgggggcctttccggcgtcgatgcgcttgaggatggcctgcacgcggctgaccagcagtttcatcttgatcggcttggtcaggtagtcgtcggcccccacgccgaagccggccagctgctgctcctcttcgcccaaggccgagaggaagacgaccatcgtgtcgcgcagctgcgggtcctcgcggatggcgcggcaggtctgcgccccgtccatcacgggcatcatcatgtccagcaggatcaggtgggggcggtgctgcgccgcggctttcagcgcttcggctccgttctgggccgtgaatacctcgtaaccctccttgacgagggtgtatttcacgaattcgaggatgtcgggttcgtcgtcgacgagcaggatgcggtggctcataatttcggtcaatgcgttttcggcggcgcaccggcggccggttggccgtgtgccgcgcatatcttgtgcgaagttagcaaatttccggcgaaatcgttcggcggcacgggaaaaatggttatatttgcgagatttatatacttccgtatatatggaactcaaaaacgtgtattgagatggctactgaaaatccgattcttcctgctcctgaggagcaagtcagcaaggctgctgaagatgtgcagaaggcaacttccgaagtgactcccgaagtccctgattccgaaacggctgcgactgcagaacccgaaacgcccgctgcctcgcagggcgaacccgcagcgtccgccgccgaggcgcccgtaagcgaagcgccggccgaagagaccgtcgccgaaacggctgcggaagctcctgctgccggcgaggctgccgcagaggcgcctgcagacgggaagggtgcgcctgcggaggtgcctgcggctgaagtccccgccgcagaggtcgttgccgaggctcctgccgccgaaacggctgcggaagcggctcccgctgaagagacggcgcgtgcgaagcgcgcccggatcaagcctgcggccgaagcggtcgtaacggagacggaagaggaggctgctgcgtccgacgtgcaggtggatttcgcggacgaggaggccgcgctggcggcgcaggacgccggactcgaactggagggcgagaccgccgaggaggccgaggccgagcagatggcgggaagcgccgccgataccgaagacaaattcacgggccggggcaaggaggagctggtggctttgtttacgcgcatgctcgaagagcagcccgtgcagtcgatccgccgggatgtggaggcgctgaagatcgccttctaccgcatccgccgtgccgaggtcgaagccgcacgccgcaaattcatcgaggaaggcggcgccgaagaggattttgcgccggcagtggacggcgtcgaggtgcagctcaaggagctgttcaaggagtaccgccgtcgccgcgacgagttcatcgccaatctcgaagccgagaaggagaagaacctacaggtcaagctggggattatcgaggagctgaaggagctggtcaattcggacgagacgctcaaccatacctttaccaaattccgcgagctgcagcagcgctggaaggagaccggcatcgtgcccctgcagaacgtcaaggatttgtgggagacctataacctgcacgtcgagaatttctacagcttcatcaagatcaacaaggagctgcgcgatctggacctgaagaagaattacgagcagaaggtggctctgtgcgagcaggccgaggcgctcgtgctggagccttcggtggtcgaagcgttccacaaactgcagaaactgcacgacgaatggcgtgagacgggtcccgtggccaacgaatacaaggaggtgctttgggagcgtttcaaggcggcgtcgagtcggatcaacaaacagcatcaggagcacttcgaggcgctgaagggcgagcaggtccgcaacctcgaactgaagacggagctatgcgccgccaccgaggagctggccgcgcagccgctcaccacccgcaaggagtggaaccgggccagcgaccgtctgctggagattcagaagacgtggaagaccatcggcttcgcgcccaagaaggataacaaccgcatatacgaacgtttccgcacggcgtgcgacaggttcttcgaggccaagcgtcagttctattcgggcgtgaaggccgagatggagcataatctgcagctcaagaccgaaatatgcgaggccgccgagtcgctgatgaacagcgaggagtggaagaaggcgaccgacgagctgatcgccctgcaggcccgctggaaggagatcggcgccgtgtcgcgccggcattcggatgctatctggcggcgtttccgcgcggcgtgcgacaaattcttcgagcgcaagggtgcgcatttcgccagcgtggacggcgagcacgaggagaatctgaagaagaagctcgcgctgctggaagagatggccgcggccgatgtcaagacgggcggttacgacgtgatccgcgacttccagcgccgctggggcgagatcgggttcgtacccatcaagcagaaggacgccgtgcagaagaagtacaaggccgccgtcgatgcgctgttcaacacgctgcgcggcaccgagcgcgaccgttcgatgaaccgtttccgcgagaaggtttcgtcgttcaagtcggcgggcggcagccgcctgcgttcggagcgcgaacggctttacggcaaggtgcgccagctggagcaggagatcggcctgctggagaacaacatcggtttcttcgccaagtcgaagaacgccgaggcgctgatcgccgacgtgaaggccaagatcgagcgcgcccgcgaggatatggccgccgcgatcgagaaagtgaagctgatcgaccgtcaggcgcaggaggagaatcacgaaaacaacgacaacaaatagtaataaacgtaatgaaactttccaaacccaagtacatatttgttacgggcggcgttgcgtcgtcgctcggcaagggtattatttcggcctcgatagcccggctgctgcaggcgcgcggctattcggtgaccattcagaaactcgacccctacatcaacgtcgatcccggaacgctgaatccctacgaacacggcgaatgctatgtgacggaggacggcgcggagaccgacctcgatctgggccactacgaacgctttacgaaccagcccacgtcgaaggccaacaacgtcacgacgggtcggatttacaagagcgtcatcgagaaggagcgcaagggcgagtatctgggcaagaccgtgcaggtcattccccatatcaccgacgagatcaagcgccgcatccagctgctggcgcagaagaaggtttacgacgttatcatcaccgagatcggcggtacggtgggcgacatcgagtcgctgccgttcatcgagtcggtgcgccagctgcgctactcgctgggctataagaatacggcgctggtgcacctgacgctgatcccctacatggcggcttcgggcgagctgaagaccaaacccacccagcactcggtgaaggcgctgctcgaaaacggtttgcagcccgacatcctcgtgctgcgcaccgagcatccgctttcggtgaacctgcgccgcaaggtggcgctgttctgcaacgtggacgccaacgccgtgatggagtcgatcgacgtaccgacgatctacgaagtgccgcagaagatgcacgaccagcatctggacgaggtggtgctccagaaacttgacctgcccgccgacaaggaacccgatatgaccgcgtggaacgcgctggtcgataagatcaagcacccttcgaagaagatcgagatcgcgctggtcggcaagtacaccgaactgcccgacgcctacaagtcgatctgcgaatcgttcgtgcatgcgggcgccgtgaacgactgcaaggtgaaactgcgctatgtcaattcggagaagatcacgcccgaaaccgtggccgagaagctgggcaagatgtcgggcattctggtggctccgggcttcggaaaccgcggcatcgagggcaagatcgtggccgtgcgttacgcccgcgaaaacaacattccgttcctcggcatctgtctgggcatgcagtgcgccgtgatcgagttcgcccgcaacgtgctgggcatcgccgacgccaattcgagcgaaatggaatcgacgccgcatccggtcatcgacctgatggaggagcagaagggcgtgacggccaagggcggcacgatgcgtctgggcgcctatccgtgtgcgctgaagaagggttcgaaagtcgccgcggcgtacggcaagctcaatatttcggagcgtcaccgtcaccgctacgagttcaacaacgactatctggagcagttcgaagccgccggcatgcaggccgtgggcatcaaccccgatacggggctggtcgaggtggtcgaagtggcgaaccatccgtggttcgtcggcacgcagtatcatcccgaatacaagagtacggtgctgaagccttcgccgctgttcgtggcgttcgtcggagcggcgctcaaatacgccggggaaaagaagtaataaccgcacaaagtaagaagcaaacacgtttagatggataaaaaaacaattttgggtattgtcgtcgtggcggtcctttttctgggattcgcctatgtcaatactaaacagcaggagaaatatcagcaggaaatggccgcgtggcaggcctatcaggattcggtagccgccgcttcgcgtcccgcggttcccgcggcggacagcgcggcaggcggcgctgcggagagtgcggttgcggcgtccggtgagacggcggcgcccgaagcggaggcggatttggcccagaccgtgcgtcagcgtcggatcgccgcgatgggcgagtatctgaccgcggcgcaggaggcagagcctgaagagtttacggtggagaacgaggtgatgacggtgcgtttctcgacgcgcggcggacagatcacgggcgtgacgctcaaggactacaccaagtacgcaccccgcggtcagcgcgaccaactgatcgagctgatggaccctgcgagcgcccggttcgacatgtcgttctatgtgaagaacggcctgaacaacgtcaaggtcaatacgatggattacgtcttccgcgccgaacccgtggagacggcaggcgatgcccggcgtgtgacgatgcgtcttgcggtggcggagaacgcatggctcgaatacgagtaccttatatataataagcaggctccggagcgcgattacctcgtggatttcaacgtccggctggtgaacatggccccgcagatggccaaccagacttcgatcggcatcgactggtcgaatgtctcgtaccagaacgagaagggtttccagaacgaaaacatgtacacgacgctggcctaccgttttccgggcgaaagttcgatcgaggagctgggcatgagcgacggcgccaagtcgaagagcgtatcgacggcggtgaactgggtggctttcaagcagcagttcttctcgtcggtcttcatcgcgccgcagaacgtctccagcgccaacatggccttcgatacggcggctcccggctcggagctgctcaagagtttctccgtgcagatggctgtgccctactcggcgcaggtcgaaggatatgatttcgcattctacttcggtcccaacaaatatgcgatcctgaagaaagtcaccgacaacaacggtgcggacctccatatggagcgtctgattccgctgggatggggtatcttcggctgggtgaaccgctggtgcgtgattccggtcttcgacttcctgcgcaactacatcggcagtttcggcatcattatcctgattctggtgattctcgtgaagctcgtcatctcgccgctcacctacaagagctacgtgtcgatggccaagatgcgcctgataaaaccgcaggtggacgagcttaacaagaagtatcccaagaaggaggatgccatgaaaaagcagcaggcgacgatggaactttacaaaaaggccggcatcaaccccatgggcggctgtattccgatgctgatccagctgccgatcctgatcgccatgttccgtttcttcccggcgtcgatcgagctgcgcgagcagccgttcctctgggccgacgacctctcgtcgtacgacagcatcgtgaacctgccgttctcgatcccgttctacggcgaccatgtcagcctgttcgcgctgctgatggccgtgtcactgttcggctactcctacttcaactaccagcagaccgcttcgtcgcagccccagatggccggcatgaagtttatgatggtctacatgatgccgatcatgatgctgttgtggttcaacagctattcgagcggcttgtgctactattacctgctgtcaaacctctttacgatcgggcagacgctcgtcatccgccgcatcgtggacgacgagaagattcatgccgtgatgcaggccaatgccgcgaggaagtcgaaaggcaagaaatcgaaattccagcagcgctacgaggagctgatgcgtcagcaggaggcccagcagcgggccaaacgcaagtagttcccggaccggaagccttcgggaagagaccggacccgactggaattgaccgggagcggtcagaaccggcccgaagcgttcgggctgttgaatggactgcagagaacaggccggagacgaaacctttgaaccgggtgtgcgtctccggccttgtttttgctctggtgcggatgtgtaaaatcgtacgactatgatgaaacgaattttttttgtgctggcgctcatggcggccggcacggcgctccgggcgcagagtctcggcggggagtatcggctcaaacggatcgttccggtcgaaggacggcagggaatcgccgccgactcgaactattattacgtttcgggcagcacggcgctctacaagtatgacaagcaggggcggctggtcgccgaaaacgaacacccgttcgaaggactgccgctcgaagccaatcacttgggcgatatcgacgtgtggaacggcgaactgtatgccggtatcgagactttcgaagacggcaagggcgagaacattcaggtcgccgtttacgatgcggacaacctgaaatggaagcgttcgatcgactgggaccccgaatctgggcaggtcgaggtgagcggactggccgtggaccgggacaacgacatggtctggatgtcggactgggtggacggccgctatctgtacggctatgatctcaagacggggaagtatgtccgcaaggtgcatctgcgtccggttccgcagtggcagcaggggatcttcatggtggacggccggatgctgatctcggccgacgacggcgatgcggacctcgacgagccggatacgatctatatcgccgacatgcgcgacgggaagagttatgcgacggcgctgccgtttcgcgcgatgaccgatttcctgcgtgcgggcgaaatcgaaggattggcgatagatccgcagaccgacgaattgctggtgctggccaaccgcggttcgcggatcgtgttggggatggtcaagggcttttatcccggctacgacaaggaactgcacgaggtttatgttttcgaaaaggtaaaatagaaaaagtcccggaagggactttttctatttggagcggacatggcgccgccgggtgcatttgtcggatgtgtttgtcgggcgcatttgtcgggcgcatttgccgagcgtatttgccgggtgcatttgtcggatgtgtttgtcggggctggaacggaagtctgtccgggacgattgcaggaaccgattgccgtggcatctgagaggacggacgatggggcgggctgagttgcggggaccgcgattgtccgaaacctgctgcttggcggtttcgggttcgtgatttataaatccgcttcggttgcttgtcgggagttgcggtcgctgatgatcgcgtcgaaattttccagcgcccagccgatgagcgagacgagatggggcatgagcgattcgccgcggggcgtgagggcgtattcgacgcgcggcggcacttcggggtagaccgtgcgcgaaagcaggccgtcctgttcgagccgccgcagggtcgaggtgagcatcttctgcgagatgtcggtcatccggcggtgtatctccgaaaagcgcagacgcccgcccgtgtgcaggttgtagagcaccagcagggaccatttgtcgccgaagcggtccacgatattgcggatggggcaggcggcgtaccccggatcggttgcggttttcgccatcttattcgacgtagagcacgagtcctttgaggtattcgccttcggggtgatagatgctgatcgggtggtcggcgggctgcgtcatctggtgcaggatgcgtacgttgcggcctgcgatggctgcggccgagaagaccgtcgtgcggaacagttccttcgatacggcctgcgagcaggagaacgtgaagaggatgccgccgggtttgatctgcgaaatggcgcgggcgttgagccgcttgtagccttgcagggcgttgcccagcactttgtggtgtttggcgaaggccggagggtcgaggatgatcaggtcgtatttgtcgccgatgtccttgagatactccacggcgtcggccgcaatctcgcagaagtcggcctcccggccgaagttgagcaccatgttttcggtggcgagtgtcacggcgcgttcggaggagtccaccgagcagacctttcgggcgccgcccgccatggcgtagaccgagaatccgcccgtgtaacagaaggtgttgagcaccgtgcggcctttggcgtagcgtttcaccagttcgcggttttcgcgctggtcgaggaaaaagcccgtcttctggcctttctcccagtttacgaggaatttctcgccgttttccgtcacgatgtgcgattcgtggtcggagctgccccacagataaccgtccacggcgcccagccgggcgttgtacggcaccgtctgcgaacttttgtcgtagatggccgtgattttgtcgccgtaagtcgcccgtatcgccttggcgatctccatgcgggcgtggtacatgccgaccgagtggcactggaccacggccgccgttccgtagatgtccacgaccagtcccggcagggcgtcgccctcgccgtgcaccagccggtagcagttcgtgtcgggattgtccgtaagtcccagcgtgcggcgaacgtcgtgcgccacggcgatgcggcggttccaccactcctgatcgatcgtctcccggcagaacgacagcacgcgcacggcgatcgaaccgatctggtagtgtccctgcgcgatgaattcgcccgaacgggtgtatacttcgaccagagcgccttcggcgatttccgattcgtcttcggccttgatgtagtcgatggctcccgaaaaaatccacgggtggcggcgcataagagactcttccttgcctttgcgcaggtatatttgaggtgtcatgctttgggacgttttattttgggtgtgtgcagcagtttgtcgtagatcgccgtgcagacccacgcatcggtcgcggcgtagagtttctgtttgtcggtgagcgtcgcggcctcccagttgctcagacgctgggctttggagacgcgctgccggaggacgatggccgagagtttgcgcaggctcttgtcctcgatgccccattcgggggcgatggactgcaggtccacgaatccgccgtcgcggaagtggcggatctggcgcagcgagcggaggtcgcccgcgacgtcggcgccgattttgaggatggagtcggtttcgagcacctgaaggatcggcttggccagcggaatcttgttcagccggaacagaaagcaaagctgcggggtcgagagctgaagcagcgacacccggtagcttatgcccggacggaacgaggggcgcgtctcggtgtcgaagcccacgacggcctgtttcatcagaaacttgcaggccggcacgatgtcgcgctcatgctcgatgatgcggatctcgcccttgaattcgatggcgggaagcgcggcggtctcctcgttgcttattttatcggtaaaattatttgtcgtagtcatgcgatggaacgttcccacaaaattacggaattatttccggaaaacgacatgttcgcagacctttttgcgatcaggtgtcggggcgccgggttatttcagcctgattttcccgtccttgcaggtggcgagcaggccctcgtcgagcagctgccggatcacctcgccggtccgctgcacgccgcccggaaatccgtcggccagttcgcgcgggtcggcgggaccttgggccagccgttcgagcacctctttgcgcaggctttccgccgcattgccggcggcgtccgcggatttttgttttgcggcgcgcctgcgggccagacagatgtcgcagacgccgcacggcgcgggatcgccctcgccgaagtaggcttccagcacggcgctccggcagcgggtttcgttggcggcgtagtcgagcatgtgttcgaaacgttcgcgcatcagctcctgacgccgtttgtaggtgtcgggagagatgtagaggtcggcgcggggaagccgctcctcgttcatgaagaggatcggcgagcggttggaggggacgtagcggatcacgcgcagctgccagagccgtttgagcagctccttgacccgctcgacggtgtagccgctccacgtggcgatctcgccctcgtcgatctggcggaattcggtgaagacgccgttgtaaaggcgcagcagcgtgcggatgaagtggtcgagttcgtcacgctggacgcggatgcggtagagatcgtcgcggcttacgcagaacatgatccgcgccggattctcctgcgcgtcggtcagcgtcatgtagccgttctgctgcaggagtttgagcgcgctctgcaccgtgccggagtagaggtgctcgcgggcgcagaagtcgtggatgttgaacagaaacgaagcttcggcgccgtcgccgatgccgatctgcaggtaggagcagaccttttcgtagatgtccttgatcttttcgagcggcggaaattcctgctcgaaacgctttacgatgcgccctccgtcgtcgggggaggtcagcagcagggcgtagctgcgcacgccgtcgcggcctgcgcggccggcctcctgatagtagctttcgagcgaatcgcacatggtgtagtgggcgacgaaccgcacgtcgggtttgtcgatgcccatgccgaaggcgttggtggcgaccatgacgcgcgtcctgcccgcgacccactcctcctgccgcagcgagcgctcggcgtgtcccatgccgccgtgataggccgcagccgtcacgccctgccggcgcagcatgtcggcgacctgttcggtgccttcgcgcgtgcggacgtagacgatgcccgaaccgggaacgttctggaccagccggagcagctgcccgtttttgtcgtcggtgcggcggacgctgtacgagaggttggggcgcgcgaaactgctgcgcaggatatgcggctcggcgaagcgcaggtggcgcatgatgtcctcggccacgagcttggtcgccgaggccgtgagcgccagcacgggaacgcccggcagtttttcgcgcagttcggcgatgcgcaggtacgaggggcggaagtcgtagccccactgcgagatgcagtgggcttcgtccacggccagcagcgagaccttcatgcgctccacgcgcaggcggaaggcttcggtggcgagccgttcgggagccacatagaggaatttgacgtcgccgtagacgcagttgtccagtgcgatgtcgatctgccgcggcgagagtcccgaatggatggcgacggccggaatgcgccgcgcccgcaggcggtccacctgatccttcatcagggcgatcaggggtgtgacgacgatgcacagtcccggctgcgcgagtcccggaacctgataggtcagcgacttgccgccgcccgtgggcatgagggccagcgtatcgcgcccggccatcgccgagcggatgatccgctcctgcacgggacggaattcggtgaagccccagtagcgcttcagcacctcgaaaatcttgtctgcggacccttccatgcacacaaaggtaggaaaaattaggcggtttgaggaatttttcatacttttgcattcggttaaacgttcgacaaatgaagataagcgaaaagttcaaagtgcgcgagatggcgggggagcatgtgattatcatgccgggccgcgtcggtgccgatatgacccggattcttgcgctcaacgactcgtcgctctatctttgggagacgctccgcggccgcgacttcaccaccgaagaggccgccggcctgctcaccgaacgttacgaggtggatgaggctaccgccctgcgcgatgcgcaggcatgggcggggaagctcgccgaatgcggtgtgctggagtagccggaacctaatattattgcatgaaactgaaaagactcatatcgctgttactgctctccgtctacctgctggcgacgggcggacccgcgtatgtgtcgctttcatgcaagtgcgtcgcgatgaaggcccgtgccgcgcacgtatgctgtcatcactgccagcacggtgcggatacttccgacggaaccgcgtcgctgaaggccacctgctgcggcaatcaccattcgacggagatcaatctctatacattctcgcaggacagcgaaaaatcgacccgttgtacggttaccgatctgccgcccgcgctggtggccgaggctccggagcctgccgacatctcgctcggcggggagaaaaccgtcggacgctgcgcccccttcgtcgaacggggccatgtccgctgcgcgggactccgcgcccctcccgtattggcttaaaacccttttggggcggatgctgcgtgcatccgtccggaatcagttttaaccaataacggaatgtaaatgaaaatcaacaaaattttagttttatctgtttcagccctagctgtgtgcggtaccctcagcgcgcaggatttgcggggcgtggtccgcgatgccgacaaccagccgctggtgggcgcttcggtctactgggagggtaccacgatcggcgccagcactgacgccgagggagcttttctgctccaccgcgtgaaaggttacgataacttggtggcttcgtatctgggcttcgtgaacgacacgctgcacgtcgcgaacggcgcggcgcggatcgaattcgcacttagggcggacggcgtggagctggaggacgtcgtggtcgagggcaacctcagcggcaacttcgtcaagcgcgacggcatcgtcaagaacgagatgatttcgttcgcgggtctctgcaagatggcctgctgcaacctcgccgagagtttcgagaattcggcttcggtgaccgtggggtacagcgatgccatttcgggcgcgcgccagatcaagatgctgggccttgcgggcacctatacgcagattctcgacgagaaccgtccgatcatgcgcggcctgagcgccccctacggcctgagctacacgccgggcatgtggctcaattcgattcaggtctccaaaggcgtggcctcggttacggccggccatgaagccatcacgggccagatcaacctcgaacaccgcaagcctaccgacgacgagcggctgttcgtgaacctctacctcgacgacgagctgcgtcccgaagccaatatctcgacggcgtttcccgtttccaagaacaagaaactgtcgagcgtgatcctgctgcacggttcgatggacaccgacgtgcgcaagatggaccacaacgacgacggtttccgcgacctgccgctggccgaccagctcaacatcgccaacaaatggctctatgccgccgacaacggcacgcagattcgctggggctggaagttcgtgcaggagaaccggctgggcggcatgctcgactataagaattcgatgcgcgaccagatgcgcgagaaatgggaccagccgggcacgctttacggatcgaagatccgcaaccgcggcgcgaacggctattttaaaataggtatgcccgtcggtccttcggtatacgatcccgacgagaaggacgagatgcgttcgaacctcgcgttcgtggccgatttcgaccacttcaacgaaaacgcctacttcggtctgaacgactacaagggcaacgagaatgcgctggcgatgaacctgatgtataatcactacttcacctaccgttcgtcgctgatcgtcggcgcgcaggcgcagctgcagtattaccgcgagagtctggccaacaacacgccgtggatcgaggccgcgaagtcgcggttctacgacttcgaccgcagcgagcaggaggtgggcgcctatgccgagtacacctatgctgtcaaggacaagttctcgatcgtggccggtatccgcggagattataacgccttctacgacaagtttttcgtaacgccccgcggtcatatccgctggaacatcaccccttcgacgaccttgcgcggttcggccggactggggtaccgttcgaccaatgtcatcaccgacaatatcggtattttggcgacgggccgcgagatcgtaattcccgatttcgacgggttcaaccggctggaaaaggccctgaccgtgggcggaagcctgacgcagaccttcgggctggtgagcgccgacgacgcgacgctgagtttcgattacttccgcacgcagttctacaactcggtgattgcggatcaggagatgtatgcggacaaaatcatgctctacaactcggacaaacgctcctatacggatacctaccagatcgacttttcgtggacgccggtcgagcggctcgatattttcgcgacgttccgctatacgaacagcgaaatgacgatcgaccgtcccgacggaacgacggcccgcgtggagcgtccgctggtgagcaagtacaagacgctgctcaatattcagtacgccacgaagttccgccgctgggtgttcgacgccacggcgcagctgaacggtcccgcgcgcatcccgacgcagaccggaaatctggccgacgacaagtattcgccccgttacccgatgttcttcgcgcaggtgagccgcaagatcggcaagttcgatatttatgtcggctgcgagaatatcgccgactaccgtcagcacgacccgattctgaatgcggacaaccccttctcgacgggattcaactcgatgaacgtctggggaccgctcatgggacgcaagttttacgcgggtctgcgcttcaacctctattgatgcgctccgcggaaaaaagagattcaaaccttaaaataacacgaagatgaaaaagattttaatgctttgcctcgcccttgtgatgggcgtcggcatgtgcgcggccgagaagcctgccaacaagaaaacggtgacgacggtgtttacgaccgacatcgactgcgagcactgcgtcaagaagatcatgaacaacgttccgtcgctgggcaagggcgtgaaggacgtgcaggtcgatctgccgaaaaaagaggtgaccgtggtatacgacggcacgaagaacaacgacgagaatatcgtcaagggcttcgcttcgctcaaggtgaaggccgagccgaagaaagccgacgcgaagaaatagcggcggccgggttttgttattgaaaaaggaggactttgggtcctcctttttttgtctgccgttcgtgtgattgcgcggcctattccatcggccgtatgcggacttcggtgacgccttccagctcgcgggcgagacgggcggtgtcggttttctcttcgacttcgccgtagtggtagggatagaagaccgccggacggatcgccttgaccgcttcgacggcctgatccacggtcatcgtgtagggctgattgaccggaaggaatgcgatgtcgatattcttgagggctttcatttcgggcgtgggttccgtatcgcccgcgatgtagatgcgcgtgccgccgacggtaaggatatagccgcagtcctcgcggtctttggggtggaactgcaggtgcccgtcggtggtgttgtaggcggctacggcctcgaccttgaggtagtcgcgcggtgcggcgacgctgcccggccgcatcgtgtagcagttcatttcgaacgcttcggccgaagtgcggtcgcagagtatctcggtctgcggcgtctggatcgcttcgacggccgctacgtccagatggtcgtaatgcgaatgggtgatcaggatcacgtcggccttcggcagcgccgcgtatcgggcgtagccgctgacgggatcgacatagacgtatttgccgccgacctcgatcgaaagcgaggcgtgccggaagaaggtgatcgtgatttgcgtgccgtcgcatgtggtcagcgtgtcggcggggtattcgggcgctgctttctttccgcagccgagcagtgaaaggagggacataagtaacaagagttttgggttcattcctcaaatattgtacataacaagggcaatatagtgaaaaaaagtgaaatattcgtacctttggcctgcattcgaatttgaaaaacgatgaaagggactttgaaaaaactgatcgtgctggcggccgcgctgtttgccgctgcgggagtcgcggcgcaggatgccgaccggattgtgggcatttacaaggccgtggaggagggcaaggagtccaaagtggagttcacgcgacggcccgacggcacctaccgcgggcagatcgtctggctcaggaacccgaacaaccccgacgggacgcccaaactcgacgtgaagaatcccgacaagtcgaagcggtcggggcgtgcggaccgggtcgtggtggtggacggcgtgaaatacgatgcggagaagggcgtctggaacggcggccgcgtgtacgacccgaccaagggcaagagctacaaggtcgaggtgtcgttcgaggacgaccggacgctgcgcgtcaaaggatcgctgctggggttcagccgttcggtctattggcaaaaaatcgaataaatgtgcatttttttgcgccggggcgcagtatttttcgaatttgtacgtttatatcgcataatttagtattgaaattcttatgatgaaaaaagttttatttgtagcggccgtggctatgtcgctggtttttagcgggtgtatgaaggaagacgacacctacaagaaattgaagcccgtacaaccggggcttaacatctacaccggtgccatgaaccagaatatcgtgtcgatgcagcaggccaacttcggcttgcggcttgcgatgctggtggccgaggccgacaaacagcagaaaacgatcgacgaagtgacggtcggcagcagcaatacactgctgaaaaggcagttgctgggcaatgccaaagtcgagactacggcgaacggttacaaaatcacgttcgatgccgattatgccgacctcgacacttatgtccgcaagggtacgctgctgatcaacaccaacgagacggcgctgctgaaagatgctacggagagcaagccgtggaccgttactttcgaggataaactgacgatgggctattcgggcggcgacatgcaggccatcacgctgacgggcggtctgacgaaactctatttcgtcgagtcgtcgggcgcttacggaatcgggctggaggctcagcagtcctatgtcggcaagaccgaggagctgacctcaaactggaacggcaaatttacggtgaagcctgagaacgtgaatttcacttatacggactgcgccggcaagaagttcatgctgaacggcacggctacgggccgcacgttcaacacctatgacggcatttcggcgacgacgatgagtctcaggatgaccaacggcgagtattactcttcgtcggctctttacggcggcaagatcgaagcgtcgctgggcgacggctacaatccgagtctctatccgtcgaaggatgtcatcgtggagatcaccttggaaggtacgcggcttcgtcagacgatcacctatgccggtcacattgtgacggtttagggaattttatccgaatgaaaaagagcggggcttgtcggcctcgctcttttttttgtcgccctgtatttccgtcgtcaggaagattgtcggtcgagccgcatgaccgaagggatgcagaatgcgacgagtccgatgccgcagatgaccgtgccggcgatgacgaaggtcgtcgtcaggccgacatgctcggcgaggaagcccgtgccgagcagtccgatcgccgaggggagcagtccgaaactgtagtacagcgacatgacgcgccccagcactcccgcgtcgatgcggctctggatgacggagacgaacgacgagttgaagacgctgctcgtgacgccttcgatcagggaaagggcggcgaagagcgcgaatgccgtgggcggcagcatgcccgaagcggcgaacagcagtccgatggtcaggtacatcaggtttatcagcacgatgcggttgacgcggtaggttcgggcgcccatgacggcgccgccgatcagcgcgccgccgccccacacgatctcgatcaggctcatttcgtaggcccctccgccgaagtgctgcagcgtcatcagcggaaacatcacgccgacgggcatgatgaagaaccacacgaggacggccagcgtgaaaaaccagcccatgcccggaacggcgtgcatggcgccgaacccttcgcggaactcgcgccagagactgggcttttgcgccgtgctgcgttcgggattgggaatgcggaccagcagcagggtggtgcaggcgataaaggcccccgcgacgtccagcagcaggatgttgccgatgcccgtcaggttgatcagcagggcgccgaacgcgggcccgatgatgttcgacagcgaactgatgatctggttgatgccggcgatgcgcgtcagctgctgcttgggcgcgagcagcggcaccgaagcctgcatggcgggggtgtggaaagccgacccgatggaacggcaggccagcagcacgtagatatgccacatgcgggcgacgccgagccagaaaagtacggcgaggagcagggtgcacaacgcgatgaaactgtccgccagaatcatcgtccatttgcggtcccagcggtccacatagacgccgaccagcggacccagcagcgactggggaagcatgccggcaatggcggccagcgccagcacctgcgccgagcctgtttcgaggctcacccagaagatgatggcgaaggcgacgaccgaactgctcaggatcgaggccagctgtccgctccaaatgacggcgaatgtctttttccagttttccacgctgcgtttttgcggttacatgccgatccgcgggaaaacgaagcctacacgcgtttgatcggaccagaaccaatagtgctgtttgtccgatttgagcagcacgaaatcttcgatgctgccgatgttgagtcccgtgttgtcggtgaaggtgccgcggaccttctgtccgtcggagggcatcgactccagctggagactgacaaatttcaggcccgcgtcgtcctgaatgcggaacgtaagcgtcgtcggatcgacgaacaactgctgtttcgccttgtcgaagagccgcagcgcttctccgctgcggtagattcctacggcttgggtctcctgcagcgccgtgcgctgggccttgagcgtcgggtcttcggttttgtctttcgagcaggcggctgcggccgcgagacagatcagcagaagatatttgaggtgtttcatggcggatgttatttgacggtgatgtatttgacgatatactgctgcgactcctcttcggcgtcggtgacgacggccatgatggtgtgttcgcctgccgcgagagtcgtgtaagtgttttcggtcttccggttgtcgatgtaccagtcgatccggccgatcttgccgcggtagtcgagcagactcagcatgaccggcgtgtcgtgcgtgtatccctcatccgggacgcagatgcgtacgcttttataggtgtaggtcggctccgtattgaagatcaggtctttgctgctgtccaccgtgtcggacacctgtgcgatggagagtgcatattcggtggcgggcgacagacccgttatgtggaaggcattgcatcccgttacggtctccgaacgctgtatgcctgccgatttccatgtgatctcccactcggcggccggatcgccctcccatgtcagcagggcgtcgtactgtctggcgctgacctcggccttgagattggccttggtcttgaccgacagccggacctgcgaaccgtcgagttttatatcgctgaacgaaacggaaggtttgccgctgttccatgaaatatagtccgcgttggtttcgggcgagagcgacgtgatgttgttcgcgccggggaagaacgtcttttcgggaacgtcgtaggacgaccggcccggaaccgaccgcacgagtttcatacattcgtgggccggattgttgttgagcgtattgtaggaccactgcggggcgtatctgctggtgtaatcgacatggtataccagcaggccgcggcacgctgctgcgctgttgaggggctgatcccacttgttgttccgggtgtcgcggttctccagcaggaaatagtcgttcgtcgtcggcgtctgcaccagataacctttgttctccgagaccggagcgagcgtataaagcccgttttccgtgacctcatcgggttcggcccagccgaccatccagcgttccagtatgttgaccgacggcggcgtgcggctgttgttgttatagctgcccgaacacatcagcgagaaattctccagcgccggggcggtgccgcccgatgccgagtagtcggtgtcgtagaagtcgggccagcccagcacatggccgaattcgtggcagaaggtgccgatggcggtcatctggtaaccgccgttcagctctgcgccgcaggcgtatccctgcagttgtacaccgtccagatagacgttgaagccgccgtagcggacgtcccaccggtgcggccagatggtttgcgtatcgcctgaatctgcctgtccgcgcccggcgtagaagacgaagacgtcgcgtatgactccgttgtcggcgaaatcggtgaagttgacgtcgttatcggccagccggcatgcttcgacgatcagttccgctacattttcgctgccgtcgcttccggcatagtacgccgatgttttcgaggctttgtagggacccaccacgacgaattcgggatcgaacagtctgttggagttgtcctgatagtaattccatgcgctgcccgtcgcgccgttgacgctgtagccgtcctgcatgagcaggttgcggaaatcctgctgcgccgatgccgaggcgaatttcttgtcggaggattccaccaagataatcagcgatttgagccggccggtggtttgggccgaggtgatgcgccgcggaggggcgggctttccggcggcgggaagcacgggggcttgtgtctgctgcggcgccggcatattcatcggtttgacgtaggtcggcttcagctccttccccagccgtgagacgacggctctctcatcggcggtgagtgcgtttaccgggcgggccttgacttttgtcgggaccagttgccccgaagccgacagttcggcgtaatagagatcgccgtcgggacctccggtcagcgtgtagccctccggggagagcatgtagtggcggcgctcgtcaccgacgaggcggacggtgagctgcgtgccgtcgctcagggttacttggatgagacccggcttggcgggaacggcgtgcgcagttccgataccgcagagaagcgctgcggacgcggcggcaagcgaaaggaaaaagtgtcgcatatggtttgttttaaatataagtgtataaatgtacgataaaatccggaaattactgccggttttatcgaaaaccgcttcgttcggttatatatcggaaccaaaaaaaggcggataccgaggtatccgccgctataaacctttccgcagagaggttatttaactgctttaactattgcctcgaatgctttcggctcgttcatcgccagatcggccataaccttgcggttgagggcgatgcccttggcgttgactttgccgataaattgcgaataggtcattccctgcgcgcggactgcggcgttgatacgcgtgatccacagcgaacggaacgtccgcttcttgagttgacggtgtgcataagcatagcacagacctttttcgaccgtgtttttcgcaacggtccaaacgtttccccttgaaccaaagttacctttggcaagtttcaaaactttctttcttcttgcgcgtgacgcaacaacgttgactgaacgtggcatactgtaaagtttttgaagagctgtcagcgatgcggttctcccgcattctttggggctgtttcgctccgattaataaaatgtccgcccggaaattacttgacgagcaggttcttgattttggcttcgtcagccgcagaaacggtacccgaatagcagaggttgcgcttctgtttcgtcgtctttttggtcaggatgtgactgtgataagcgtgtttgcgcttgatctttcctgtgccggtgaaggtaaaacgcttcttcgcagcggcattggttttcattttcggcattgtcgtaaatagttaattagttaaacatagcctgcaaagatacgaaaatttcggcactctgcaaccttgaaacggaaaattctcctctttttcaccggaaaacatttcccggcgcgaggggtgtccgctccgtgcggaaggcttctccgtggcggcctgtcgttccgtccggccgttccggcatatacgcacgccggcatccggtttgcccgtcccgataatttgtactatatttgatagggaataaaaccgcggaactatggagatggagtgggatttgatattgagattgtgtgtggcgggcctttgcggcacggtgatcggacttgaccgcgagtaccgggtcaaggatgcgggattccgcacccattttctggtcgcgctgggcagcgccctgatgatgatcgtgtcgcagtatgggttcgagggctttctggccacgcacgacggactgcggctcgaccccagtcgtatcgcggcgcaggtagtgagcggcatcggcttcatcggtgccggtacgatcatcattcaccggcagctggtgcggggacttacgacggcggccagtttgtgggccacggcgggaatcggacttgcggccggaggacatatgtatatcgtggccggagcggccacgctgcttacgctctttgcgctggaggtgctcacgctgttcttcggcaggctggggcgccgccggatcatggtcgtcttttcggccgccgaccgcaaggcgatcgacgccatgttcaacgaactgcaaagcggggaatatgccgtgatctcctatgaggtcgaggcgcagcgcagtcccgacggcgtcgtataccgtgcgacgctggttatccgggccaaggggaatgccgacgaagaacgctatgtcgatctgctgcgtgagaatcccgatgtgactgtcgagcggatcgtttagaaccagcggtatacttcgcggagcgttctctcctgcgacatgtcgttggggttggtgcccggaacgccttccgggacggattcgccccggcgggcgaaaagctcggtccagaattgcggcagcgtgccgtcttccgcccggaaattcatcggacgggccgtgaagatcggcgaaccgtcgcttgtccggtaacattcccagaccagttcgctgcaatagaattttccgttgtcgggccggaaggagtagtcgtaggggagtccgagatggcttcgtgcccgcctgaccgcttcgcaaactcccgcagtatccttcaatcgcatggcgacgaccgccggacgtccgccgatttttgccgactgggcgaggaattccggcagtgccgtaagccggaccccgccgttcgtcgtagcttcgagtaccgaatccgctccgtttttcaccacggcgattcccacgtgcgagaaattcaaccgcccgttttcacccgtcgccgcggtgatcgctccggtcatatccgaactttctccggcctgaaagagcaggtcgcccgattgcagtgcatggtcgttccggccgcacgaaacagccgaaaaaagtatacctatatataataagcttcgtttcattctgtcggatctcttgtggggacaaatatattaaaaatctctggaataacctcgaaaaacgggtgaaatgacgctaaacgacttaatatcagagttgttacggtgtcaaatgatgacaagccgaaaaagcggaaaacgcaaagaaaagcggatttaagaagaagaatggtttgcaaatcattacccgtgaaagagtaagatttaacatatgggagatgctattgcaccgtttgtcaccgatttgcatatcaaggtctaactcgttgatatttaactttgcaaacaaaaaaaaacgagtatggcaagaagtacattcaaagtgctgttctacgtgaacggcagcaaggagaaagacgg

SEQ ID NO: 12055 - DNA, 693 bp, Unknown
  gut microbiota DNA sequence
atatggtgctgcaaaatatatttgcgcatttttgcatcgggaaatgatggcttgtaaacagccataagcaaccataaccatttagaataaagtcgctgtatttcagcgacttttctattttaacactttccagtccgtatttggaggtaacagattttatccatatttttctatcatatttctaccgcgacagaaattcacggttagcccgaatgtcacaatgacgcattagttgacgtgtgttgacaatggtttacatgtgtagacaaaaagggaaattaaaaaacagagaaaatgatataggaaatatggaagtaaagagaatttgtcaatggtgtggaaaaccgttcattgcacagaaaacaacgacctgttattgtagccctcaatgctcgaagcgaggttacaaacatcgtatcaaggagcgcaaaatggaactgcgccacattcaggaaatgcaggagttgcgctccagtttggagaagcaggaatatttcactttttcgcaggctgcccgattgatgggcgtgagccgtcagtacatttataaattagtcaaagaggataaacttagagcatcccgaattagcggaagaatggctttggtaaggcgtgcagacatagagttaatgctcaaaagcaaaccttacgaacgactggttgcgaaaaacgacttcaacatctccgagtatt

SEQ ID NO: 12056 - DNA, 17143 bp, Unknown
  gut microbiota DNA sequence
gggggggggcgaggataggaaggcaagagagaacggggagaataagaagaacaggagagacgcaggagagacgcaggagagacgcaggagagacgcaaaaagcggcagcatttgcgggaagccggcccggcagcaggttgagtacgaagcggaaagggtttcgaggccgccgccggagattgcagagcgaaaaaaacgcgccggatttcaggtccgggcaactccgacgcggcacggttcatgcaaggtcgtatgctcgtaaaccaaaaataaatttacgttatgaatcagcaaagacacaccaacgaggacacgctgaccgatattttcggttcggaagagatgcgcaatcccgcgcccacggagtttatccccaaaggcaagacatcgcccgaaatcgcctaccagttagtcaaggacgaaacctatccgcagacgcagccgcggctcaatctggcgacgttcgtgacgacctacatggatgattacgccacgcgcctgatgaacgaggcgatcaacgtcaactatatcgacgagacggagtatccgcgtgtcgcggtgatgtgcggccgctgtctgaatatcgtcgccaatctgtggaacacccccgaaaaggccgagtggaagaccggagcgctgggcatcggttcgtcggaagcctgcatgctgggcggcgtggccgcatggctgcgctggcgcaaccgccgcaaggccgcaggcaaacccttcgacaagccgaatctggtgatgagcgccggatttcaggtcgtatgggagaaattctgccaactgtggcagatcgaactgcgcaccgtgcccctgacgctggatcacatcacgctcgatcccaagcaggcgctggagatgtgcgacgaaaacacgatctgcatcgtgcccatagccggtgtgacgtggacgggtctggacgacgacatcgaggggctggacaaggcgctcgacgaatacaacgccaagacgggttacgaaattccgatccacgtggacgccgcgtcgggcggtttcatcctgccgttcctcaaacccgaaaagaagtgggacttccgcctcaaatgggtgctgtcgatctccacgtcgggccacaaatacggtctggtatatccgggccttggctgggtggtctggaaggacaagaagtatctgcccgacgaaatgtcgttctcggtcaattacctcggcgccaacatcacgcaggtgggtctgaacttctcgcgtcccgcggcgcagattctgggccagtactacaacttcatccggctgggattcgagggctacaaggagattcagcagaactcgatggacgtcgccaagtactgccaccagcagatcggcacgatgaagtgcttcaagaactactcgaaggaggtcgtcaatccgctcttcatctggatgatggatcccgaatacgacaagaaggccaaatggacgctcttcgacctgcaggccaaactgcagcagagcggctggatggttcccgcgtacaccatgcccaagaacatcgagaacgtggtcgtgatgcgcatcgtggtacgtcagggcatgtcgcgcgacatggccgacatgctgatgggcgacatccgcaacgccgtcgcagagttcgaacagctcgaataccccactacgtcgcgcatcaagtacgacaacatggagcaccagaagggcaaggtattcacgcactagaatcggggattcggaccggcggtccggggttcgccccggacttccggccggtttccggaccggcattacagccggaaggcggaaagactcccatttattgaggttcagtcaacggcgggacgccgccggctggccgccgcttccggcacccctgcttcggcaggggtttttgcgtcgggacgtgaagactgacgcaagaagcgaaccgcaggcagcaggccgaaacgaagaagaggacagctgcaagaaaaagatccgctcaagagagaatgcgacaacatacaaaaaaaggctcaaaatgagtttgtatatcctcattccgaacctttacaatttgtcggggagactggattcgaaccagcgacctccaactcccgaagctggcgcgctaaccggactgcgctacaccccgaacatttgggacccttatcattttaagagcgcacaaagataagtcgaaaatctgaaaagacaaaattatttccgcaaaattatgcgcttcttttatcttccgccctgcttctgcccttgccgatccgatcgtacctgcttcccgtttcctcgcacgacttccgactgactgtaacttccggccccagaccgcgcttggtgtccgattgccgtttttgtatgaaatttgcctgaaaacggcgttgtttcagaactttacagaaacaaaaaaagttactgcaaagtattaatttacagcaactttcttcatgtcggggtagcgggattcgaacccacgaccccctgctcccaaagcaggtgcgctaaatggcttgtgttgtataaaaaacgcttttcaaacacattctaacgcacatattgactacttttcgcttttgccgttatttctcggttaacacattggttgacacatttgtgaaatcccaatgcaggttaataattaagagaattatttgtaaatgattgatttaaaataaaaacctcccgacctaaaaggccgaaaggtcgtatcgtgtcttacacagataattgcttaactataactccaccgaacgctactttacaaactgcatcagatagttttcgcagaatccagctaacgggaacttcaccacctcgttccgtccgtcgggtgtggcgtattggaataggattgtatcggctttcacgtggtagtcaaacaaatttaccttttcgcccgttccctcgatttgtgcctcgttagccgtcattgtgccgattattccgtccatatcttcgagttcgcattttcatccgaatatgtattgtcggttctttgtaaggacaatttcgacgggctttgtaatgtctgccatattaggggtaaacaggtaaataaatgtttcgggaaatatttcgtctttgggttttcctgcaagcaggactattccctctgtttggctccatttaaccgtcttttggattatctgtttatcctctcatgcgtcggtctttcattcagttttcggttgtttgtatttgttcattttagctaaaatttaattgttatttatctttataaagataagattattagcgaaataaacaaaataagaaagtgacaaactctgcaaaaggatcttatagattaaccttttcacaaagtctgtcacttcctatttattagtgcttatgaatcagatcttcttgaatgttaatgttgcttcataaacatcattttcatcatcgggatttacctcatgctcgaacaaaacaagacgggatttagtcaattccttgatttggaaaatataagtcattggttcggttgtgttcttttcctgcatggtcaacacgtttccattgatggagtaggtatagttgtactcctcattgcttccgtcatgccatttaagaatagcagtaccattatcattaaaggtataagtgtaatagtcagtttcggtaggccagacttcatctgattcaccatctgtttcttggctttcgatgatttgccatgtcccaataatattattgggattcattttgtcatcatcatcggagcaagccgagaaagaaactaccgcaaacatagcggccataataagaaacaactttttcatagttgcaataagtttaggttgtcgccccagcaccaacgcgacggttaatgtttgatttttaagaaacagaaagcgtggtgctgaaaacttattttagtcagactggtcgtaggaaacctcgaagataaaataagcaacagccccacgcctatcccgtataaaggatatgacgcggcgagttgtcggcttactctctcttctgtcgaatttcctacgttcgtctgacgagaataaacttacactttccgtgtttgttcgtatgtcccacaaatgtaggaaacaaaaacggattatgcaattatcggcatcttgggggctgttgcagttacaaaattagggcggaaccatccgcaaagttttattcttcgcttatcagtagtaatccaacttcatgtaatatcaataatctttcgctgtgtcggtgttctgaatgcagataggggcggcttgtattaggtggaatcttattaaatgggagggataaaaattcggttttccatctgaaaagggggagaggtgaaaaaagagagtatctgtgtggttgcaataaattattgttgtgcgggtgtaaagtatgcaaaatttgttacctttatagcaaagtatcttatagtatgaaaattagtgagatttataatctgcaaaaatcacaagcagaattagattttgttgatattgatgtaacgaaggatttaccattattcgttgatcctttttttctgtcgaaaagggaagatgcatggtctatggatgctgtttcgacattacgaagtttttttcaacaaataataaattttattaagcaggggtatatcaaggaggcaaaagaactttttggatatttgaaagaaccaaatgtaacttgtcttggcttgtccagaggaaaaccgcaagggcggggtgtaggacatgaagacacggataaggtttttaatcgtttattaaaaagcaaggctattagtacagggttaattcaagatatagaagataatattttatttatcgataaattcggtaaggataaattatctgatatgactactaatatcattctaaatcatttgataaagtacactcagaaccaatgtaacctacacaatatcccaatgcaaaatgctccttcggggtacttttgggataaaatgtccatggaatggcgttctgaatttactgaaatgttggtatgtgatgggaggaaaatagtattagttcccaaagggatagtttccttttgtaaggcatatatgcccgataaatattacaaccattttgttttgaactatttgcaacaggaaaacattcgtttaggtacaaccttggtatatcgtaggagaagcggagtcccgtatgtgacaaaaaagagtataaagcaagcatcaccatattccaaagattttttaattcactttaccaaagcacatccagaggtattgagaaattttaaaaaccgtactcacgtctcggctctttctaatgaagatatttatgatatcaatgtagaaaacattgcgaaatcattatctgaacaattgatgcaaattccgatgggcaatgaagctgcatcgcagtatcataatatgatgattggcgtgttggaacttattttttaccctcatctcattaacccttacaaagaacaagaaattcatgaaggacgaaaaagaattgacattgttttcgaaaatgcagcagaacaaaatagtgttttggatagattgattagcaaacaccatattccatgtcaatatattttcttcgaatgtaaaaattattccagagatgttgccaatcctgaattggatcaattatcggggcggttttctccccgcaggggaagagttgggtttttattatgtagaaatattgacgattttgatttgtttatccaaagatgtaaagacacatataatgatgatcgcggcttaattattcctcttgttgataatgatataattagcttattaaataatgttcgaaattattctcccaatagatatcttgaagattttttatctcatcgtgttgcaaaattaattttataaatttaagcaaaatcaaaacgccccgactataaaatcggggcgtctgaacgaaagtatattatgtgagtagaaaagattgtgaatgtagcttgtttgcctttatcgggtcttgggtgcatagcaccctaacgaaataagccaacgacacggattcgggaatcatcttgcaccgttcatttagggcgtaagtaaccgacagcggattatctattggcagattcggaatgttgtatttcgtaaaaatccgattcattgcccgttcatttcattgcggcggattagtccccttatttgaacagtaattgcaaatctcttggtaaatggcgtgtgctgtgtctttctgcggcgggtttataaagcaatcatccgttatttcgtagccgttcggtagggccttaatcagtcctaatccgttactctctttaataagagctgaaaccgtattacgattcattccgacagcatcggcaatctgtccgatatttcaaaggatagtattcgtattattaagacatatagcctttaataagagcaaaaagcccgctattttcggcgggtggttctttgtaaagaatcggttatccacgaaaaagaaatccgtttggggattggctatataataggaattgcggcgtttgtatccgtcgattatgcgggttgtaacctgcattgctccgcactcctttaatcgttggacagatcgtttgatagtacggatatttactcccgttatttgggacagcctttcttccgttatatggcttgtttgtgtcttgtaatccgatttgcatttaatcgttgctcaaacgtaaatgtcggtcggtttgccgttgcccgtccgaagctggcaaattgattttggaatcgttgtgtaattcatcgttagcgacgtaattagtaaatagtatctcttttgtttttaataatttccgaaagcaggcggagcctaatgcggctttggcggcttttcggttgtcgaatcatttgttttgtgttacatagtacagcatagtctgaaaatcgggtttgaggctccccagagccgagagcctataattaggtgttggttgggtaggtagtggtataagtgccacttttgagcacgaagcaggggacagatttaggcatcgcccttatccctcttgctggcttctgtaaaggtacaaaggttatcatcggaaacaaaacgattcaacggatttttaatccgcggcctacgtgttgccttttgactattattttagcatcggagtatgttttacgggaaaattaatgtgcaaaaagtagtattagcgggtattttacatagtctgttgttctaaaacacctttcgtgtcatgtaattcagtactattagcggttcggtacatggtgcggctgttctaaaattcctttcaaacacgtgttttaagcgctaatagcggtttttgcacggtaaataagtgcgatgtacacgtaaaaagccgtaaatttgggtgtaaaacgctattttatgaatgagaaaggggccgatgccatccgtaagagtatgtatgaatccttactgatggatgaaaacgataagattgtcaattgggatttcgacccgctgtgccgtgagttgcgcgagtatgtcgatattgcctgcggatgtgatgaacagacgtatggagtccgcacgccgcaattcgaatatcgctactgtacggggaagattaagatgccctttgccaagtcggattatctcgctaacgacgatataatcgctacggttatgggattggggctggatgtcgagaaattctggtttgcgctggtctttatttacgattatgtcgaaacctcgtttaagaactgcggtcttgtgaaacccgcgtctttggataaggcagtgcaaaatctgttcaaagagttgggcgaggatttcacggacgatgatattgaaataacccttaaaaagaacagaaagaaagtcgaggttctgcccgttataaagcgtgggattttggactggttgcgggaaacctatgaacgggaatgcaaaggcaggaagattcagtattacgggattgacacgggcaatttcgacgaaacctatccgagtacgtcgtttcggatttatcggactgtggagatgtatcgggatatgctgaacactttattgggcgacaaccgcccgaagcaacccgacaagagtgtttcattgaatcggctgttgctgatttcgcgtatctgttacctctatgaatttacccgtaatgacagctttttgtatggcgacgattcgttaaaaggaataattaagtcctgcaaggggcgcatgcctgcaacttattccgctgtttacctgtaatttgcggagggagagtaaaaacgccctttatttcactccccgtgtttggggtgcgaaaagtcaaatctttgtagtgtcgaaagggataaacccgacgacctgcaaacacttgggcaagggatgcagcataatttaagcccctctgtaaaaggagtatttaggattatggctaacgctattattaatgcaaagagtaacgcaaatgaaattaacgcggcaaacgccgcaaccgctacgcctgctcccgttgccgaacagaaagaacagcagacggcgcagacctcgcgccgccgccgttcgactacgcccccgatgtggcgggtaatgacgcaggcgcggcccgttttcgatgtccaactgaaaaaggataacgaaattaaattggcctgcatcgacaaattcatgaatgcggcttactcggatgcaaacaagttttgggctgatttcatggagcaggtaaatatcctgcttgacagccgcaggtattgccgcgagtgtgaaatgttgggcttgaagcctgaatatgtagcggaacatattgtgttcctcggtagtgccacaatgaaaaaggtgctgaaagacggtgtatcccgtacattaggggctgatgtgcaactttacgggaaacgcttttcgcccgaagatgcggacagatttctgtcggaagatataaaacgtcttcccgaacaaacgacggtcgcctaatttcagactgctgtcgttgaaaaaaaggacactccgtatattcgtcggagtgccctttttcgttcacaatagattctgcatcgccgcgtcgatttggctgttctcaaacgaatccaagtaaatctgtgtcgtggataaatcggaatggccgagcgattcggaaataatggcaatattcactcccgaccttttcaacacggtggcgaacgtgtgccgagcgacataggtagtcagatgttcaatgccgaccgtttgcccgattttgcgtaaccagcaatttgtattccgccgcattttgtggatgcggtcgaattgctgttgctcggtcttgtgtatgcgtcggtcgagtatcgggaaaatataatcttcgtccgtttcactcccgcgtcggtatttggaaataatggcgtgcatttcatcggtcagtcggaaatttatcggcttgcccgttttcttacggatatattgcacacgcccgttttggatattcccgtatttcagcagggcgatgtctgcaaagttaatccctgctccgaaataactgaacacgaaaatatcgcgggctaatcgggccaacgggcgaaactccgtgaggtcgagtgcgattatttggcgtatgtcctctttgcctacggcccgtttcttcgttcgggtgtcgaatttgctgactttataggcatcgaacgggtaataatcccgcttcactaattgcgactctaccgccttgttaaacacgctacgtagtgttcgaaagagttggcttatggtcgtgtcgctgcttccgcgttggcgcaaccaatcttcataacgccgcaaccattttgtgtcgatgttccgaaacggtatttgcaatcgctgtcccgtgaatttcagcagggatgcgcgggagtatttgtaaacctctgcgttgccgagttgtttttctcgtttcatgtcggcaatcagcttgtcgtataattcaacgacgctcccgcattgtgtttgcgaccgaaagtgcgacactaacgtatcggcggtgtactcgcgttgctgggcggtcatttcgacgataaggtcgttgtattccgccgtttttgcggctatcagccgttcgattcgttccttgttgggacagttgcgtttgggcttgcctttttcgaaatcccaaaacttttcgtgcagggaaaggccgagcgaaacgtatttgcgtttgcggtctttcgtaactcggagcattaaaggaagtgtgccgtcttttaatggtttgtacttgtaacaaacaacctcggtgcttgctttcatggtgtcgtttggttgacacattggttaacacaaatggctgaaaaacgtgttaaccgagcaaaaatcggcaaaatcggatgctttgtgataaaacgcaaaaaagccctccagagctatctgaaaggctttttttgtctgtcggggtagcgggattcgaacccacgaccccctgctcccaaagcaggtgcgctaaccggactgcgctacaccccgtcgttcccggccctgaaacccgtgattggccttacatcagccccgcaaggcttttcgtgtcaatcccggactcttccggccgggggaaccgtcacgattccgggatgcaaagatagcggcttttttctttccggcaaacttttgtcccaaaatcggttttgcaggcagttcgtgaaatcgccgcagcgagcggttcctgacacgactccagttacggttcctgccacaactccgatcacgattgcgcgcagatcgcaagttatctgccgccgaaagcagtcctgcatcggccggactgcccgttttcgatccccattctaccggaatattcacgccgacgccggctggaatcggcgtcgccccgattgccggaccggcagggtcccctacctccgcttatgctcccgaagactccgtctccatgactgccggagccgaggttgccaccgctcctccgattaccatcgcttcttccgccggaacgcctgcgcttaaacctgtcgaatccgcctgaatatcccccggcgacatgtctgtctccgctcctgctcccgcattgtcgtcctccgcttcgacctccacggtttcgccgtccacttcgagggcgatcgtataacggtcgcggcccgcgtaattcggcagcgccagcgaatccatcgtctgcacccggaacgctggagccgtcgcgccgtgcgtggactgcatgtactcggccaacgccttgttgcgtgcggccatcatgcgggccagctgtccggcggctttttcgcggtagagcgccagcgccttgtcgtcggccgaaagtccctgcggcgaaattccctgccgggtcagcagcgaatcggcaaaagccatgatcgccggagtgcggatgtcggtctgctggatcttttcgtattcgagcatcgacatcggctgccggccggtcgtgtcggcgctcttcagatgctcggcataggccatcctgagcgcgccggccgcctgccggggcagggcgcggcgcatgttgacgcgctgcgtcaggacgatgtgcatttcgggtttgtcctgcaacgcctgcgcgatcttgtccagcgaagcgtactgctccgacgtgaagacgtattgcagcggatcgatgttgatgtattctatgttctccttgttgcccgacaggaacgagaagggcgccgtcacgactttcagcaggacgttgccgattgccttcagcacgatcttgcggtaggagaactccggcgaatcgagactccccctgaccggaaggtccatcttcacgtgtccttttttgtctttcaggacatatagtcccagcttgagcggaatattcatctcggccttgatctccctgcgctttttgtccactttcggctcgaacatgtcgaggtggttggtgccgtcgaggtaacggtcgcggatgacgttctgactgcggaacgtgaggttgcccttggtcagcggataggccgtgtagtgttcgcagtagggaccgaagtcgcgcaggtcgaggttggtgagccagagcgtgatgttctggttgtccatgtcttcgagcgtcccttcccagcgcagcttcgccgagccggtcttctgcatccgtgcatcgacggtcatgctgttgcgcttcgaggggtcgaaatcgcggctgcgcatgcggatttccgagacggtatattcgaacgggcggtgcatcgtcaggtcgcgcaccgtgacgcggccgttcgtgatttcgaggtcggcgatccggagcgtcggactcggcgtcgcgcttcccgcggcgtcggacgccgtgatttctgccgccggggcaggaacggcagacgtcgtgatttcagccgccggagcgggggctgcttccggagcgggattcgctgccgcagaagcggaaacggcggtcggcgaagcggtttcagccgccggggatttcatcagagcggcgagattgttgccttcgggcgtcatttcgaacagcgccgagagtcccgaaacatagatgcggtcgaatacgaagcgcattttgcccagatcgccttcggcgagttttacccccagcgtatcgacgcccgccacgggccgctgctgccggtcgcgcagggcgaagcccgccagcgaagccgtaccctcggtcgtgagcgaaagcaggtgttccgtgttgccgcgcaggcggatgtcggccgacaggcggccgtccacggccgtgacgtcgagcgactgccggaaatagggcagcgtgcccgccagcgcgaagtcctgcaggcgtatcccgatgtcgaattccgagctttcgatgttgtagcccacgtcggtcgagagcgaaccgccctcggcgaagttgagcacggccccgacgtcggttttctcgccggagaaatagacgcccggaatgtgcaggtttatgtcgttcatgccccactcggcatcgagcgcgaggtccttgtaaaagaccctgccgttgcggatcgagatgtcgtaaatcccgatttcccacggtttcgacggtttttcgggcgttgcggcggcagtcgtgtcgcccgcgaagcgggctgtgatgtcgtcgaaactgaaagcgttgccccgctggtagatcttcacgtcgggacctgcgaacgagatttttttcacgagcacgcggttccccagcaacggccatagccgcatgcgcatctcgaagctgtccagtcggaaaaacgtcgtcgaatcttcgcttccgccgatgcggagtccttcgatgcgcaggcgtccggtgaagatgttcatccgcagccgctccatgcggatcgagcggccgatcagttcgcggtcgtgtttctcgatgtagttcttggctacgggcgaaacggcgatcgccgctatgacgatcagcgcggccaagacggcggcggcgatcagcgtaattttaatccatttcttcatggttcttctgtttgtggtcagtgcggcatccgggaaatcctccgcagccgccttgtgtcgtatcgttttttccggtctgcggtttattcccgctattccgggttccgcggatcttccgcgaagcctttcatattccgttcgggcgtccggacgtccgggcgtccgagaaccggcccgaatgttgtcggaccgctgtcagaccgctgtcggaatgccgcccgaatactgtctgaaggctgtcagaatgttgccggctccctgtcgtatgcttccggcggcttcggaacctccgcctgaactcggccgtggattttgcgatcgcgttcgggaattcgcggcggaactccggctgtgggttttgcggtccgcattccggaacttgcaatggaaattccggccgtgcggtttctgtctgcggtttctgtcagcggttattgccgcgtgcggtttcggccctgcgattcggctccgcggcccctccctgcgatccctcagcgcgttatctcctcgaagagatgcccgaagtcctcgcccggcgcgggcatgtagacggcgaagcccagcgcctgcgcggcgtcaacgttcttccggccgtcgtcgatgaagagcgtttcggccggcatcacgccgctgtcagcgatcaccttgcggaaaatcgcctccgaaggcttcagttcgtgcagttcgtacgaaaggtatatcttgtcgaaatagtcgtccatcgtatgcccgtcggccgtaaacgcgccgcggatggcgaccatcgccgccggattgttgttcgaaagtacgtaggtgcggacgcccgcctcgcgcagacgcatgatctgccgcagtttggcgaccggaatccccaccagaaatgcgctgtatgccgccgcgatttcggaatcggtcacttcgggccgtccgtccagccggcgcatctcgtcgcaggcttcgtggaacgggatgtcgccccgctccagccggccgatcatctcggcgggatagtagggattgataaggtcggcgacacggggcatccccagctcgcggaacgctgcggtgcagcgctcgatgtcgaggtccacgaggacgccgccgaggtcgaatattacgtttttgatctctttcataagctgttgcgatttttgtttttgcgcggccggccgcctctttctctctggcaggtcgctcctgttttgccggccgcctgctcctgtcttattggccggatgcttctgtcctgccggccggccgctcctttctcacgggacggcatgttttcatatccggagtcttccggcgttttttgttattcacaccgcctgccgttacggccgtcgttttgccggccgttgcatctgctattccgccagccgtttagtccgtcgttgcgccagccgttccgtcagccgcttggcttccgatcgtggcagaccgcgggccgtgttatttctggaattgcatcgtgaacctgcggatcggccgcagcacccacatcggcagagccttgcagaggggaatccacgcccggttccaccagtcgggcacgatgcagcggcggccccgccacaaagcccgcagtccccgccgcgcgcagttgtcgggcgtgataagcacgccgagccgtttgccgatgcgctgccagcggggcgtcagcccgtagaggtcggtcgccacgcctgccggacagaccgccgtgacgcggatgccgcggtcgcgcacctccttggcgaaagccaccgagaacgaccgcatgtaagccttcgacgcgctgtacagcgccagccccggaaacggcatccacaacgagtaggaggacatgttgagaatgtgcccccgcaccccgcggcgaaccatgtcggcggcgtagagacggcatagctgcgagacggtcaggtcgtgcagcaggatgatgcgttcgatacgctcggcgggcgtcgtcaggatgtcgcagaacgagaagatgcccgcgttgtttatcaccacgtctatttcgatcccttcggccgcagtccggtcgtgcaactcctgtgccgccccgacccgcgcgaggtccatcggcatgacccggacttcggggaggtgtgtgggtgttgcaggggcttcgattcttcccgccaccggtgttcctgctgtctgtatccccgctgccggtatttcgtcccggcctgttcctgctgcggaagcccccgccgtacggcgtatctcttccgccacggcttcgagcggcgcggcattgttgccgacgatcaccagccggtagcccagcgccgccagccgcagggcgtaacagcgtccgatgcccgatccggctcccgttaccagcgcccatgcgcttcccggccggacttcgccgcgcttcatccgccgggaatgccgtgccgtctcctgcccggtgcggatgcccggtgccgttcccgtcgtctcttgcacggtgcaggtgtccggcgcgccttcgccgggcgtatgtcccgattgcttgtcgatcgggtttgtgtcgttcttatgttccatgtctacggcagttttgccagttcttcgcggattttgcgcggcaggtcgccgcagtgcttgcagcacttcatatccaccgagtacatgcgcgcgatgcagtagttgcggtggtcgcactcgctgcgggtcgcggcatcgccctcccgaagcttgttgacgaacgcagggtcgttgaccagcgcccgcgccatctgcaccagttcgaatcccgcgtccagcgccctgtcgatgccttcgcggctcaccagcccgcccacatagaccagcggacacttcagctcggcgcggaacttcttggcgtcctccagaaaatagcactcttcgaacgggaactgccggatcatccacggcccgcaccagcggataaagtaacgcagccacagcggcgagtagtagctcatcgtgtagatcggaatcagcccccgcatcacggccatcggggctttcgacacgaatccgcccgacagcacgatgccgtccacaccgaaacgctcgatctcgcgggcgatttcgagactttcggggatttcgatgccgcccttgaatccgtcgtacatgttgtgcttcaccaacacggccgttccggtctgcgccgcggcctccatgacctcctccagacacatccgcatgaaacgcatgcggttttcgagcgatccgccgtactcgtcgcgacggcggttggtgtagggcgaaaggaactgcgaaatcaggtatccgtgcccggcgtgtacctccaccgagtcgaatcccgcgtcgtgggccgtatggacggcccgcccgaagtcgcgggccacctgctcgatctcgccggcccgcatgccgcggaccggcgtgtaggcgtagaggttgaagcccgtggacgcgccgatcggaatctgccccgccgtggtcaggtgggtcatgttgccgcagtggccgatctgaattcccgccgccgcgccttcgcggtgcacggcgtcggtgatgtcgcgcagccccggcacgatttcgggccgcagccacagctgcttgtcgaacgaaagcccgctgcggcagaccgccgcataggccagcgtggtcatgcccacgccgccgcgggccaccgatacgtggtaatccttcaactgctgcgtcgggccgaaatggcggcccatcgactcgaacgccgccgaacggatcgtgcggttgcgcagcgttacgggtcctaacttatagggggtgaaaagcgatgacataatcgggtcagtaaatgaaaggtatgatctttttgcgtccgagcgacgtgaattcgtcgccgaactccttggcgtagcgtttgttgagcgatgcggcgcggggcgcgaggttggcgaaggtccaccacgcgaacaccgctccggcccacgaccacgaagccacggcgaagcccgtccattcgagcagtt

SEQ ID NO: 12057 - DNA, 19775 bp, Unknown
  gut microbiota DNA sequence
ccggcgcaggttgcggatgatgtggtccgaatggagattcacggccattcccgcgaggaacatcgccccgccgatataaatataaggttgcgcgaaccagtcggcgtagtagccttcgggcgagacgtagaagatccacccgccctgcatcagggcgttgagcgtgttgaagcacatgcccatcacgacgatgccgagcggcattttcgacgcgccgcgcatgagcagcggaaagatgaacgcccgttgcaggtagtgggcctgaaagagcgcgaagagcgtcagcggcccggcttcccacgttctttcggagagcagccacagcacgcacatcgccacgaatacgggcgactccatcagcacccagccgatcttgttgggcacgggcggcccgtatttggggttgaagagatagccgtatccggcttcgaaaaaatgtagggcagcgaagaccaccaaggccagcagcgccatgacgatcaggaatatatcgaatgtttgggccatatcggaacggtttcggtaaaacggcataaagataataaaactttcccgctccgacaagtccccgaaagggccgtttttgttctttttgacagcagaaaaacagagcagcgtccgcttttacagggcggcttccccggcggaaaggcgggctgtcgcccgtcccattttcggccgcaaaaaatcgctccggggttcctgcggcggtaaaaaaagaaagtgatttcgatacggtgtatctacagtcggtggtagtggcagtacagcagttcgccgtcgtcgccgtggaggtgcatgccgccgcccagacagtagcggaacatcttgcagtcggcgcatgcgccgcgccgcgcccaatcgcggttgcggaaaggttcgaagcggttttgccacacgtcccagaatttatcccggtagatgttgccctgatggaagttggcacggatcgacgtgcagcccgaaatggcgccgtcgacacggatcgaagccaccgagactccggcggcgcattggtagaagtaatcgcggacttcggtctcgtagtccccaaggaagccttcgcaggcatagctggtcccgatcctgccctccttgcgggtacggcggataaattccagcatttcgcggaactgcgcgtcggtcatgcgcagcgacggatcgttcttggcccggcccatggggaaaatcgaaaagagccgccagtgcgcaacgccctcggcgatcagcatgtcgcggaacgcttcgagctgcggcaccatggcgcccgtgacgcaggtcaccacatcgtaggtcagcgagggttcacggacgatcatgcgcagggccgccagcgcgcggtcgtaactgcgggaattgccgcggatatggttgtgttcgcgttcgaagccgtcgagactgaccgaaacgctgcgcagcccggcgtcgagcaggcttcgcaggcgcgcttcggtcagggccatgccgttggtgaccatgccccacgcatagccgcggcgggtgacttcggctccggcacgctccagatcgtcgcgcaccagcacctcgccgcccgaaaagataatcagcacctcggagggatcgacatggggcgtgatctcctcgtcgagcaccttcaggaagtcttcgagcggcatgtcgggcacaccggagtccacgcggcagtcgctgccgcagtgacggcacgaaaggttgcagcgcagcgtacactcccaaaagagcgtcgtaagccggtgctcggcgaccgtcgaagcgtagagatcggaaaagatattgagggccagccgtttgcgcaggcccggacggcggcgcgccatggattacttctcaggagccttggcgcccttcttcgtgtccatgacgggcgtatcctcggtcggtttctccgcaacgggatccagttcctccggttcggcggactgcaccttcgcatcgggaatatgcacgcccgtagcaggtccggcctgtccgggaggacgcacgccgtacatgacgacaatgcggggcggcaccttcaccgagtcctgaatctcctgcgatccggtctcctgcttctgttcctctgcgcccttcgccggagcgtttttgaccgtcgagcaggcagtcgaaaagccaagcagcgcagccagagcgagtttcagttttttattcatatcgcatcgtcattaaggtcattgttacagagcaaagataaaaaaatttcgaccgaacctgaaaaaaacatgccaaaaagttttgaaagccagtgatttttactttactttgccctgtacaaactatttaattttcaatttttatgacaggtaaggtaaaatggttcgatagcaaaaaaggctacggattcattacgggagagaacggcaaagagattttcgttcacttctccggtatcgtaacggacggattcaagtcgctcaacgaaggtcaggcagtcgaattcgaagtcggcagcggtgccaaaggcgagcaggctgtgaacgttacggtaattgagtaagccccacggcgttctctaaattcagggaataagagcaacagaaactcagcatattcatcagtactgaattttatgtattcaacggtgttcggacacgatccgaacaccgtttttcgttcctctcctcaccgaagataggattcgggaacaccttcggaatgcttttgcgtctttgaaacgacctttttcaattcgtatacatatgcgcctgcgtcctgaggaggatcggccagtgtcagtctccggactttgactacgtattcatatccctcctcatagatttcatcgaagccccggatcggatcatgcgaataccacaaccgccagtccggactctcctctttgtaaatatagacaggcagcccctgcaaccaatcatagtcgtcgtcggcagcagcgggcttgacggaagcgatggtgagcgtgatcgttttttccgacttgtatttatcatccagcttatcgcagccggcagtcattcccccggcaaaaatcagaaagagcgtcatgcacaatgacagcaaatgttttttcataaacaacaggttttagatgtgagagttagacgcaatatggttatgcaatatagataaaaaatatcgatttgcaaatcgcaggatgctcctatttattccgtaaagacattacacggcccgcatcggtcaatcgaaacggcttttttttgcccgtttgaaaaaataatcgtacttttgggcgtcaattttaggttaattcaggttcaaacataaaaacccaaacacaaccatgaaagaagcaatcgcaattctgactggcggcggacccgcacccggcatgaataccgtcgtgggcagcgtcgcaaagaccttcctccgcaaaggttaccgcgtaatcggcctgcacgaaggctacacgggactgttcaacccctcgccccgaaccgtggacatcgactaccccatggccgacggtatcttcaatcagggaggttcgttcctgcagatgagccgtttcaaacccaaggattcggatttcgaaaacaacttcaacctcaagttcttcaccgacaacaacatcaaactgctcgtgacggtcggcggcgacgacacggcttcgaccgcgaaccgcatcgccaagttcttggaggccaagaaataccccattgccaacatccacgtgccgaagaccatcgacaacgacctgcccctgccgaaaggcacgccgacgttcggttacgagtcggccaaggacaagggcgccgtcatcgcacgtgccgtctatgttgacgcccgcacgagcggcaactggttcgtactggctgccatgggccgcagcgccggccacttggcattcggcatcggcgaggcttgccactacccgatgatcgtcattcccgaaatgttcgacaagacggaaatcaccgtcgagaagatcgtgaacctcgtgatttcgtcgatcatcaagcgcaagatcatgggcatggactacggagcagccgttatctcggaaggcgtattccacgcgctgagcgacgaggagatccgcaagagcggcatccacttcacctatgacgagcacggacaccccgaactgggcaaggtatcgaaggcgcacatcttcaacgagatgatcgagaagaaggtgaaggagctgggcatcaaggtcaagagccgccccgtggagctgggttacgagatccgctgccagaccccgatcgcatacgacctgacgtactgctcggagctgggtatcggcgtgcacaagctcttcgccgaaggcaagaccggctgcatggtttacgtggattcggaaggcaatgtaagtccgctctacctcaaggacctgcaggatcccacgacgggcaagattccgccccgtctggtggacatcaagtcggacaagttctcgtcggtggtggagaccatcctcaacgccatcacgcctgcggattacgaggctgccaagcagtatgtccccaatccggaggagtacgatttccacaagatcctcaactggaaataatcctttccgaaacaggatttcagcaaattcccggaagctgcggcttccgggaatttttcatacaggccgggaaagagcgggcggcggcggaagggccgggacggttgagggcggaaaggccggcggtaatgacagaaaggccgaggagggaggaatggaggaagacggcaacgacaaaaggacggacggtgatcgcaggaaaaccgagcggagacggcagagaagccaaagaaggaggaatggaggaagacggcaacgacaaaaggagggacggagacggcaggaaaaccgagcggcgacggcggaagagccgggacggttgagggcggtgattttccaactttttcaggcggaaaaggaaaaatacccgtatctttgccgcattagatccctaacccttaaaaatacctttattcatggagacaccggaaaacaaaaacgatgtgttcgaaccgatgccggaagaggctgccgcacaggttacggcggaaaactctgcggacggcaaccggccgcagaagatggccgaagcaaagaaaaacctgctcgcgggagcgctctggtgcggcggcggactgactttcagtttcttatcctactatttcgcaacagccgggggccggtacgtagtcgcaacaggcgccattatctggggcgcgattcaggcgatcaaaggtctcgtcgtcatcctgaaaatccagcatcaggagggacgtttcacggcattctggcgcacggcggcgctggcggcatgttcgctcgcagcattgctctatctgggacagttgtcggtgcggctggccggcggcgaagagatgcaggtggtggataccgaacaaatctacacgggtgcgcaggggatcaaggcgaagattcccgccggatacaccctgctcgaagaaaccgtgcagcccgaaacggacgaaacctacgcctactacggtttcgacacctacaacgaccggataggttacagtctgggcaaggtcgtggatatgattccggaggagatcacgtccgtcgatgagatttcggcccactgcgcacaacgcgattcggccttctacacgggcggattcatcgcgccgacgcagcgcaccgaaatcggcggccgcgaaatgttgtgcagcgaaggatacataacggagaatccggagttggtttatgccgtttacgacatgctttacgaaggatcgctcgttacggcgacattcaggtacgagaaaaaggattacggcaagcgggagacccgcctgcggatcgaaagcctgctgaaaggcatcgagctggaataactgcgcggatactgcgaaaacggataaggacggcacttgcatgccgtccttttttattagaggaagcggaaggcaatgcgggaaagaccatcgggaaagcgtatgccgacggcgagagtacgggcggcaactgcagaaagaccgagcgacgatgaaaggaaaggccggggagggctacggcagcagaaaggaagaagacaacagcaaaaggccggacagcgagggcagaaaagtcgaacggtgacagcagaaagtacgggccggaacagcgccgtacagtgcgtggcttccgagtcgggagagtgtcagaacagcgtcggttcggcctgccggagtgcggcgggatgcgcatggagattgatgaattcgagtccccggcccaaagcgcggcgaacggtgtagtgtgtgccgccgggggaaccgtcgtaccacgcgaccagcagtgcggcgtgctcgacaaggtaattgttacgcacggcataacaccctgcatgataggacggggagagtgtcacgctatgatcggcggcagccagcacacgccggaagcgttcgcggtcggcggccgggaagcggctctcctgtccccggaaagggattacggcgaccagccgcagaccgggcatcggcgtgtgcggaaaatgcgggtccggagccgaggcgggagaaaaggccgatgcagaaaccatggcagaaggaaaagcagatgcggaagatgcggcgggagcaagagtcgatgtgggaaacgcggcgggagaaaacgaggatacggaatccggagcagaggaaaaggccgcagcagaagtcgcggcagaagaaagggccgagacgggaaccgaggcaggagaaaaagaggatacggaatccggagcggaggaaaaggccgcagcagaagtcgcggcagaagaaagggccgatgcgggaaccgaggcaggagcaaaagaggatacgaaatccggagcagaggaaacgactgcagcagaagtcgcggcagaagaaagggccgagacgggaaccgaggcaggagaaaaagaggatacggaatccggagcagaggaaacgactgcagcagaagtcgcggcagaggaaagggccgaggcgggaaccgtggcaggagaaaaagccgatcctgtttcggaatcgcggcacgcgaggaccgcttcggcggcggcgaggtcgaagcccatggccatgccgcagaggaaggtccggaagccgcgggcgtacaactcccccaccgtcgcgcgcagagccgcagcggcttggcccccgtaagtgcggtggccggtaaaagcgacggtggtaaggcggtcttcggtcatacatccaaaggtagcgttttggcccggactttgcaagatttcctgctgaatttaaaactttatacgaatatgaaacattctgcaaattgtctcgcttcctttctgggcggcgctctggtaggagccgtcgtcgccatgctcgtaacccccaaatcgggacccgaattccgtgaggacatccgcgatatggctaaaaaaggcacccgcaagctgaaaaatgaaattgacaaaattcattgcgactgcaacggtcttgactgcgattgcgacaaggacgaataaacgggaccgccccatgaaagatagcccgtcaccaaccggaaacatcgtcacatcgctgatctttttcggtgtgacggctgccattgcgatcatcctcttcatcgatgcgttcgtcatgtggctcgcgtcgctgaccgggtccgtcgcagtcgcagcactcattaccggaggtttcttcgccgtaatcgcagccgtggtctatctgctggccgtgcgttcggccctgaactacgtccgggaccggatcgaaacggtctacgaggtcgcttcccggatcaaggaggggtatgactggttatccgacaagttttcgttcctttcgttcctcagaagatccagataaggtaggaaaaaaacgccggtgcaaggaattgcaccggcgttttttcgtgactggacggcaaccttacagatagcaagtccgcgtggacatatactttcgtacagctaccccggacacgcaggtaaagttcgaaagaggacaccgggaagctgagaaacagaaaaacaaagaaaaagaggatgccggcaaacagtacggcagggagataaaaaagggtgaacggcgtttcagacgcaaaccgttcaccctcgcaaatatgtggaaactccgattgaatcagccgttatttaccgaagtaacgcttgtagagaccttcgaagcccttgccgtggcgcgcttcgtccttggccatttcgtgcacggtatcgtgtacggcgtcgaggttctgctccttggccatgcgggccagacgcatcttgtcttcgcacgcgccgcactcggcgttcatgcgcttttcgaggttggtcttggtgtcccataccacctcgccgatcagctcggcgaacttcgaagcgtgctcggcctcttcccatgcgtaacgcttgtaagcctcggcgatttcgggataaccctcgcggtcggcctgacggctcatggccagatacatgcccacttcggtgcattcgcccatgaagtggttctgcaagccctcccagagttccttgctggcgcccttgccgtcgccgataacgtgctcggtcacgaattcgaggtcaccctccttttcgacgacttcgacgaatttctctttgcctaccttacacatcgggcactgctcaggtgcctcaggaccttcgtggatgtaaccgcatacggtacaacgccatttctttgccataatcgcagtaatgtttattgtttatattctgtttgtgtggtgcaaaggtaacgattaggggcgaaattcgcatataaaaacgattgtctttttttatagaacgataagccctgcttatagtcagccccggcggtcgataacctcctcgatataaggcacgtcggtggaatccttcaccagcacgcgcttgtcgcggtcgagcagatagagcgccggaatcgcatggaggtcgtagaggctcttctcgcgcacgacgcagcccgcatcgtagccgttgatccagctcggcggaatatggccgcggtattcgcgccactcggcgagatcctcgtcgggataaagcgcgacgaccttcagccggccccgctcgatcatctcggagagcatcggcgaaccgccgatctgctcgcgcagctgtttgcacatcgggcagccggggttgttgatgaacagcaagacgtactcggccttcacgccgtagagcgtcccggtggcgcccgaagcgagcgtatagcggaaatcgttggcgcgctcgccgatgcggttctgcatcgccatattgagatcgtaggaggggccgatacgctcgtactcgtcgtaatagggactcgccagcacggcccgaagaacgggaatatagaattcgtcgttgcgcagcggcgaattggggtcgtggataacctgctcggccagcatcgtgaagtagtcgagcatgggacgcgaagccgaagcgcggcgcatgagcgaatccatcggcgcgccgtcggtcggacggtcggagataagcgcgatccagcggacataggcctcgaccatctgcaccgtatcgacctcgcgaataaaaagggtgtcggcgaagtcgaagcggtcccagtaatgccagcgcaggtagtcgcgcttcgcgtcgtcggagagactcgaaggcgcgatggccggaaggaaaacccgcatctggggcgcggcggaggtctgctgctgcgacgaacggcggccgccgcacgaaacggcgcagagggccgccagcaaaataagaacaatacggtacataaaaggagtgttttatgtgcaaatatagtttttttcggctacaatcctaccatcctcccggcgaaagaggttcataggacggatttgcacggtagttgcaacgttttcatccgttaaaatcaattctcaatttcattgaattatggatgtaaagaaaactaccacaagtaccgggttcaaattgagtgtgatgacactcgcaattatgaacgtgactgccgtagtgagtctgcgcggcctgcccgcagaggccgtctacggactttcgtcggcattctactatctgtttgccgccatcgtgttcctcattcccacggccatggtcgccgcggagctggccgcgatgttctcgacaaagcagggcggcgttttccgatgggtcggcgaagcttacggcgcacgcaccggattccttgccatctggctgcaatggatcgaatcgaccatctggtaccccaccgtactgacgttcggcgccgtgtcgatcgcctttataggcatgaacgacgtgcacgacgcggcgctggcctcgaacaaggtcttcacgctctgcatggtgctggcaatctactggatcgccacgttcatcgcgctcaagggactcggatgggtaggtaaaatcagcaaatggggcggcatgatcggcacgatcattcccgcgggtctgctgatcctgctgggcatcatctacatttcgaccggcggccacaaccacatggacatgtcgcagggattcttccccgacctctcgaagttcgacaacctcgtgctggccagcagcatcttcctcttctatgcgggtatggagatgatgggcatacacgtcatggacgtaaagaacccgtcgaagaactaccccaaggcaatcatcatcggttcgctggtcacggtctgcatcttcgtgctgggcaccttctcgctgggcttcatcattcccgcaaaggacatcagcctgacgcagtcgctgctggtgggcttcgacaactacttccactacctgcatatgtcgtgggcaggccccattatcgccatcgctctgatgttcggcgtgctggcgggcgtgctgacatgggtcgcaggtccttcgaagggtattttcgccgtgggcaaggcgggctatctgcctccgttcttccagaagaccaacaaaaacggcgtgcagaaaaacatcctgctgattcagggatgcgtcgtaacgctgctggcgctgctgttcgtggtgatgccttcggtgcagtcgttctaccagattctgtcgcagctcaccgtgctgctgtacctgatcatgtacatgctcatgttctcggccgccatcgtcctgcgatacaagatgaagaacaccgaccgtccgttccgtctgggcaagggcaacgggctgatgtggttcctcggctgtctgggtttctgcggcgccctgctggcgttcgtactgagcttcgtgccgcccagccagatctcgaccggaagcaacaccgtatggttctcggtgctgattatcggctgcgtggtggtcgtaggcgcgccgttcgtcatctatgcactgcgcaaaccctcgtggaaagacccgcaggcagctgccgaattcgcgccgttccattgggaaacgcagcccgtcgcagcggctccggtgcatacgaacactcccgaaccgacggcgaaaccttcggagacggaacttcacaacaaataaatcgataaacagatcggacaatgattcaaaaaatagacaacgctacggtccgcgaggccgtacagcaggcatacgagcgctgcaagaacgaaacgggcggcaagaacgccgactatatcccctatctggccaacgtgccgtcgaacctcttcggcatcgcggcctgcctgcccgacggcgaagtgatcgccgtgggagacaccgattacaaattcggcatcgagtcggtatcgaaagtgccgacggcgatactcgccatgaaccagtacagcgcgcaggagatgctcgacaagatcggcgccgacgcgacaggactgcctttcaactcgatcatggcgatcctgctggagaacgaccacccctcgacgccgctggtgaacgccggtgcgatcagcgcctgctcgatggtgaaacccgtcggcgacagcgacggcaaatggaagtcgatcatcggttttatcgaagggctggccggatcgcaggtcgaagtgatcgacgagttgtacaaatcggagacggcgaccaacttcaacaacaagtcgatcgcatggctgctgaagaattacaaccggatttacgacgatcccgacatgtcgctggacatctacacgcgccagtgttcgatcggcgtgacggccaagcagctcgcaacgatggccgcgacgatcgccaacggcggcgtgaatcccgtgaccaagcagccggtattcaaaccggaactggcgccgaagatcgcatcgctgatggcgacggtgggcttctacgagcacacgggcgactggctcttcacgacgggcctgccggccaagacgggcgtcggcggcggaatcatgggcgtagttccgggcgtgatgggcgttgcggcgttcgctcccccgctggacgaagccggcaactcggtcaaggcgcagaaggcgctggcctatgtcgccggacatctcaacctcaacatcttcggcacgacgcgctgcgtgatggccgaaaaagaacccgcaaaggcataggccgagcggtaatgtacggcgaaaggggctgcacttcggagtgcagccccttttctatcggacgggaatacgccgtccgtcagaattgataacgcaccccggcgacaaacgaaccggagacgcccaagccgccttcggcataggccgccagacgaccgccgacctctatgcctacgggcgagagttggaaagcgaactgggttcgcgtatcgtccattttaaatctctcatcaccaggaagctttaatccggactcggtagttccggtactcggacgccacgaacttttgctttccgttaagactttaccgggaacatatgctatttcagctttcgtgaaaacgataccagctcccgcacgcgagtaaagggagacgatccccagcttcatccaagtccatttcacatcgggcatcacggcccaataatgatttttaatcgaaaaataattatccgtaattttcgaacggatttccctcacttgctgttcgctggaagcgtataccgcctgaacgcctatgctgagatttttcagcaggcggaaattataccccatcgtcgcagcgccccacataccggtttccgatatctgccagtcataccgtattacacctcctatgccgtacgaaatatacggcttttcaaactgccccgtcagcaggcggtaatcatcgatccagttgaaaaccggggcatacccgtaagagaccgacacttcatgccgtttcattttctgggagacggccggcagcaccgtcagcgcggcaacagccagcaagagaaattttctgtacataagtcaagcgggttaatgttctcaaagataataaatttcgtcgaaaaaagcacgatcggccgcacaaatcatcaccaaccctctcggctgcatcatccgtccggcaatgcggcggctagcggattcccaaaagcgcaaaacgggtacggcagggctgacaagtgacgcatttcacagaatagaagaattctttgcccgaaccgtacccggtaatatcggcctgcgcagaaaaaagcaagggcgcaggtgcaactcccgttgaccggccttccgagccttgcatggcagttgtccttacgcccaagcccgtcccggcgcaaggccgggacatgacaagggtttcagacaatgtttacaccatgcataaacctgttatataaacagtcggaagttcgtcaacggcgtaaaggttgtcttaaccttataatatgtcgttacggcggagccgtatcgtttcgcaaagttagcataatttctgtattcggagtttcataggtacaaatataaacaaattactcgatacttaaacatgttcaagtgtaaaaaatcgacttattccatttttttgtaaaatggaacgaaaaaaacaaagacgcgacgaagagttactcagaaaaattatcctgcgggtgaaagagttacgacgtatgcacgaccaccaatcgcaggaacaattggccgaagcaacggaattaagcattgcacaactcgaatccggcaagaattttccgaatctgacaacaatttcgattatttgtaagttttacaatatcaccctcggcgaatttttcgcgccgctcgactatccgacgaaagacaactaattattctgcaactttccgactgcaggatcatcttattcgaataacagaaccgcacaaataaaaaaagattccgcccttagaggcggaaccttttttacagtgcgtatcggacagactactctgtctcttcgataacggccttaaacagctcgacgtcctccaaggtggagttcatgacgtaggtgtatgcctccgaaatcttgccttcggccagcttgcagaagaccttcgccgaattgacatactcctccgactcgccggcctgacgcgccagcaggtaggtgatgatgatatgtccggcggtctcgacaagacggcgggcgtggaaatccttgaagccgcaaagctccttgtcccccgcttcgacgcgggcgatcatctccgcgaatttcgcggtcagctccttcagcttcgcaacgacgggctgcatgggctggctgtattcggcggcagcgtaacgctcgatctgctccatgaaggtgcctttggtcacggagttgatggccgcaacgacctgcagctgcgaagtgccttcatagatattcatgatgcgcgcgtcgcggtagagacgctcgcaggggtaatccttcatgaagcccgaaccgccgtggatctggatggcgtcgtaggcctgctgattggcgtactccgacgagaagagcttgacaagcggcgtgaagccgtcggcaaggcggttgtagaacttcatctcctgacgctcctcgccttcgagcgaacgttcgtgcgcgatatggccgtactgcttgtaaacctcgacgaagcgcgtggtttcgtacaacagcgcgcggacgccctgcaatttggctttcatgttggagagcatctccgaaacggcggcgaaacggatgatcggcttgccgaactgctcgcgctcgtgggcgtatttgagggcttcgcggtaggcggcctcgcagagacccaccgactgggcgccgatgcccagacgggcggcgttcatcagcgacatcacgtatttgataaggcccatcttgcggtcgccgaccagttgcgccggagcattggtgaagaccagctcgcacgtcggcgatcccttgatacccatcttgttctcgatacggcgcaccttgacgccgccgtcgcgcttgtcgtagaccagcagcgacagaccgcgggcgtcggtcgtgccctcttcggtgcgggccagcaccagcgaaacgtcgccgtcgccgttggtgatgaaacgcttcacgccgttgagcagccacgtctgcttctcctcggaccacgtggccttgagcatcacggcacccagatccgatccggcgtccggctcggtgaggtccatggcgcaggtagcgcccgcggaaacccacggcaggaatttggccttgatctcctccgaagcgaactcgttgagcgtctcggcgcagtcctgaaggccccagatgttctcgaagccggcgtcggcgcgcgacaccatttcgttggccatcacgaagcagaccagcgggaagttaagaccgtcgtacttgcgcggaagcgtcatgccgctcaggcccgcatcgacgatcgccttcatgttccggaccgtacccgaagcgtactccacatggtcgttcaccacgcgggggccttcgtggtccacgccctcggcattcggagcaatgacctcgccgcagacctcgcccgcgatctccagcacgcggcggtaggagtccatagcgtcttcgaaatcctgcggcgcgaaatcgtagaggtccttttcggcgaaaccgcgctctttcagctccacgatcttgcgcatcatcggatgcccaaggtggaactgcaaatctttgttatctgaaaagaaatttgccattacttcgaattttgtttgtagtacttaatcatcttggggattatctcattgacgtcgcccgtgatggcgtagtcggcgatcttgttgatcggggcttcgggatcggtgttgatcgagatgatcatggccgaaccgtccatacccgccgtatgctggatctgacccgaaataccgcaggcgatgtagagtttgggacggaccgtaacaccggtctggcccacctgacgggcatggtcggcaaagccggcgtccacggcagcgcggctggcgcccacttcggcgcccagcacgtcggcaagctcgaacaccagctcgaagttctccttcgaacccatgccgtaaccgccggcgacgatgacgctcgcgcccttgatgtcgatcttgctctccgaaatctcgcggtcgaggatccgcaccgccagatcggtgtccttcacgaacttctgccagtcgatcttcttcacctcgccggcgcccggcgtagcagcgtactcgcggcgcatgacgccttcgcggacggtagccatctggggacggttgtcgggattgacgatcgtggcgatgatgttgccgccgaaagcgggacggatctggtaaagcaggtccttatactccttgccggtcttggcgtccttgtggtcgccgatcaccagctgcgtgcagtcggccgtaagaccgctgtaaagggccgacgatacgcgcggggcgaagtcgcggccgttgcaggtcgcgccgaacagcgcgatctggggtttctcctgttcgatcaggccgcacatgacggccgtatggggcagcgtgcggaaaggtgcgaagatcttgtcgtcggcgacccagacggtgtcggcgccgtatttggccagttcggtctcgatacctgcaagatgctcgcccagcactacggcttcgagcttcacacccagcgtcgtggccagttcgcggcctttggtcagcagttcgagacacacgtcggcgaccttgccgccctcgttctcgatatatacgaatatattgttcatggattacttctgcggatttaaccgagcgtgtggctcgcgataagttcgaccatcagtgaattgatatcctcgtcggaagacgtgagtttcttggcctccttggcctgaaacaccacgttctcgatcttcttgaccttggtgggcgaacccgcaaggcccagctgctgcggatcgggattgacgtcggcggcggcccactcgacgatctgcaggtactccttcgcggcggcgcgcttggcggccggcgagtcgggagctgcggcgatctccgatttggcgagggcgaatttgcaggtcatcacgcgcttggcgttgcgcggacggcattcgggagccgacgcgttgaccgtaacgaccaccggaacgggcgtctcgaccgtctccatgccgcagttcaggcggcgtttgatgaccagcgaatccgctttgatttcggtaatctcctcggcataggtcacctgcggcaggcccagcttctcggccacctgaggtccgacctgcgccgtatcgccgtcgatggcctgacggcccgcgaagatgatgtcgggagcgatcattttcagcgcgcaagacagcgcgtacgacgtggcgagggtgtccgaaccggcgaactcgcggcccgaaagcagatagccgccgtcggccccgcggaacatggcgtcgcggataatgtcggcggcgcgctgcggacccatcgtaaggatatgaaccgtggagccttcggtgcggtctttcagcgcgagcgccatttcgagcgcattgaggtcctccggattgaagatggccggcagcgccgcgcggttgaccgtcccttcgggggtcatcgcatccttacccacattgcgggtatcgggcacctgcttggccaatacgacaattttaagtgcttttttcataaggttatagttacaaaattaaatcggtttcgttgtttcggacgccgcggcaggcggaaaactccgcgcacggggccgcatatccggccgcaatacggcatgcgggatacattcggcgcggcatacgcggcatgcgacatgcggcggccgaaaggctcccctaccggacgatcgtttcgccgcggtcgggaccgacggagatgatcttcacgggaacgcccgtctcgcgctcgatgaattcgacgtacgtcttgaatgcgaccgggaagtcatcgtagctcctgcagtcgcgcaggtcgcacttccagccttcgaactcgcggtagacgggtttcaggtcgtcgccgatctcgtaggggaaatgcgcggtgcgctcgccgccgacctcgtattcggtggcgaccttgacggtctcgaagtcgttcatgacgtcggacttcatcatgatgagctgcgtcacgccgttaatcatgatcgaatatttcagcgcgacaaggtcgagccagccgcagcggcgctcacggcccgtaacggcgccgtattcatggccgatactgcgcatccgggcgcccgtttcgtcgaacagctccgtagggaacgggccgctgcccacgcgcgtgcagtaggccttgaagatgccgtagacctcgccgatacggttcggggcgatgcccagaccgacgcaggcgccggcgcagacggtattcgaggaggtgacgaacggatacgaaccgaagtccacgtcgagcagcgtgccctgagcgccttcggccagaatgctcttgtcctgagccagacacccgttgacgaaatattcgctgtcgatgatgttgaaacgcttgaggtattcgacggcctcgaaccacttccgttccagctccgcaatatcatattcataacccagaccgcgcagaatgctctcgtggcgcgccttggcccgtgcgtaaatctgccggaaatcggcgctcagcacgtcgccgacgcgcatgccgttgcggctcaccttgtcggtataggtcggaccgatgcctttgcccgtggtgccgatcttggcgctgcccttggccgcttcgtaagccgcatcgagaatgcggtgcgtcggcaggatcaggtgggctttcttcgaaatgcagagttgtttggtcaggtcgtggccgctggctgcgagcgcctcggcctcctcgcggaagaggacggcgtcaatgacaacgccgttgccgatgatgttggtttttccgccctgaaatatgcccgaaggaatcgagcggagtacgtatttctcgccgttgaactccaacgtgtgaccggcattgggaccgccctgaaaacgggcgacgacctcgtaggcaggcgtcagcacatccacgacttttcccttgccctcgtcaccccattgcaggccgaggataacgtcaacttttttcattgtatccggttgtatttttgtgtgcaaaagacattttttgcatccaaaggtacgaattattatccgaaatacccaattcgccgcggcgacttttcaacaatgtatcagaaatcgggcacgggaaaatcatcccgcagagaaaaaacaaagcacttggcgaaatcggcggaataaaattcggctgctccggagcgggacgggcagatagacggacggggcagacggacaaagcggacaaagcggacaaagcggacagagcggacggggacgaatgagcggagagacggagagacaaagcaggcggatggacgagcagacagaacagatgaacaggagacggaacagccgaacgaatagacaaacggacaaccggacggttggacgagcggacagaacagatggaacagatggacaggaggcgaaacagccgaacgaatggacaaacgggcggatggacgagcggacagagcaggacagaacaggacagagcagacagagcagacagaacagacagagcagacagaacagatgaacaggagacggaacagccgaacgaatggacaaacgggcggatggacgagcggacagagcaggacagagcagacagagcaggacgaacaagcagagagacgaagcagagagacgaagcaga

SEQ ID NO: 12058 - DNA, 66391 bp, Unknown
  gut microbiota DNA sequence
ttcggaagattcgcaaaacaccggactgaatcatgtcgcaggcgaaaaaaaacgacaatcccgccccggagaaaccggacgggagcgaagaccgggagcagaaaccgggagcagagcggacgggagcggatcggacgggagcggatcggacgggagcggatcggacgggagcggatcggccaaaaagacgatacggaatcagcggacgattatttcggtatgtccgtcggcgctgacgctctgcgatgcgcggcagtagacggtcgtgagcggaggattgccgcccgcgtcggccttaagccggtccgagcagggccgcaggtcgagcgtcacgagccggttgccgctgcagtcgagcaggcggagcgctccggcggatttgaggtccagcagcgtgagcgcattgtccgcgcagttcagctccagaagagcgcgcaggccgtccagatcgagcgaagcgatgcggttacggctgcaatcgagcgtctgcaacagcgtacacttgcgcaaatcgagctgcgtgagatcgttgccgctgcagtcgagccgttcgagccgcgagaattcgccgatctcccacatatgcgcgatgccgcggtcagggcagtccattttcaggacgcgctgcgcttcgtagcgcgaaatgcgtccgtcgtggtcgatgtcgaaatgctcaaggcaataagcctcgaatgcgggatctgcaaaagtgatgtatacgcgcttgttcttgtcgtcgcgttcgtcgtccgcaaggccgcaggccgcaagaagcgcaaacgcgaggagaggaacgaagcgggtcataggcctcagatgtttacgtcgtcgtcggagtcgtcgccgccgtcggaattgccgtcgtcctgaatctcgtcggcacccttgatctcgtcgtcgtagtagtccttgtcgtcgtcctcctgcgcattgtcgtcgatcttgacgtcgatcttaaccatgtaagcgatttcgtccgtatcgaaaggtacggcatagaaaaaatctccgttgggcttgtccacgcgcatcatcgcttcggtgaaccccagcgggtatttctgcttgacggcctcctgcagttcgggggccagattatggaagctcgttacgatatgtttcttcgtcgtattctgtttagccataataatgtttggaaattttctgcaattataagcaaaatttacatatcgcgccacatactcaatttttttttgcattttttttgaatttgcaggtagttacgaacaaaatacgtacctttacgcacgttatacttatattatgatacgcgagagaatcgaagagctgcggcggcagcttgagtaccataacttcagatattacgtcgaaaacgcccccgaaatctccgacttcgaattcgacgccatgatgcgcgaactgcaggatctggagcgcgcgcatcccgaaatggccgatcccaactcaccttcggtacgcgtcggaagcgacatcaccgcggatttccgaagcgtgaaacaccggtttccgatgctttcgctcggcaacacctattcgccggacgagctgcacgagttcatcgagcggatcgagaaggagacgggtcccacggaattcgtctgcgagctgaagttcgacggcacggccatatcgctcacctacgagcatggccggctgttgcgcgccgtgacgcgcggcgacggcacgcagggcgacgacgtgacggccaacgtccgcaccgtgcggacagtgcccctcaggctcaggggcgacgactggcccgactatttcgaaatacgcggcgagatactgatgccctacgcctcgttcgacaagatcaacgccgaacgcgaggcggccggggagacgcttttcgccaatccgcgcaacgccgcggccggaacgctcaagcagcaggcttcggcggtggtcgcgcggcgcggtctggactgcacgctctaccagctggcgggcgacgacctgcccttcacgaaccattgggagagtttgcagaaggcacgcgaatggggattcaagatttcggaccagatgcgcatatgccgcagtgcggaggagatagacgcctacatcgcccattgggacgaagcgcgcagggaactccccttccccaccgacggcgtggtaatcaaggtaaacgacttcggcgtgcggcggcagcagggattcacggccaaggccccgaaatgggccgtggcctacaagttcaaggccgagcaggctttgacgcggttggacagcgtggcctttcaggtgggacgcacgggagccataacgcccgtggccaacctcgaaccggtgctgctggccggcacgacggtacgccgggcgacgctgcacaacgccgaacagatggccctgctggacatacgtccgggcgacatggtatacgtcgagaaaggcggcgaaatcattcccaagatcacgggcgtggagctttcgcagcggccggcagacagcaggccgttcgagtacatcacggtatgtcccgaatgcggcacgccgctggtcaaatacgaaggcgaggcgaagcactactgtcccaatcagggcggatgccgtccgcagatcatcggacgcatcatccacttcatccgccgcaaggcgatggacatcgaggggctgggcgaagagaccgtcgagctgctttacgaaaacgggctggtgcgcgacgtagccgacctgtacgacctgcaggctccgcagctggcgtgtctgccgcggctgggcgaaaagtcggccgacaacatcatccggagcatccggggatcggtcgaagtgcccttcaggcgcgtgctgttcgggctgggaatccgcttcgtgggcgaaaccacggccaaatacctcgcggaacacttccggtcgctcgacgcggtgatgaaagccacgcgcgaggagttgaccgaagccgacgaagtgggcggacgcatcgccgacgcgatcatcgaatacttcgccgacgagaagaacctcgccatcatccgccgcctgcgcgacgcgggcgtgaagttcgaagccgaagcgcgcgagctggcgtcggagtcgctcgcgggaaagagtttcgtgatatcgggcaaattctcgaaccacagccgcgacgagctgaaagagctgatcgaaatacacggcggcaggaacctcgcggccgtgtcggcgaacgtcgattacatcgtggcaggcgagaatatgggtccggcgaagctcaagaaagccgagaagctgggcgtgaagatcatctccgaagaggattttatcgccatgatcggcagcgacgaaatacccgccgcaaatgcggcggaaaagcggacggaagggagtgcggaagggggcgcggcgcacaaggatgcggccgagccggagctgttttagcggcaggcgcaaccggataggccgtccccgccggtacgaagaaacggcggcgggaacggaagagacgacaacggcgggaacagaagacgccgcggcggcggaaatggaaacacggcagtgaaggcaggaaacgcaatgccgaaagaaggctaaaacgcagggcggcaaacgaagacgctgcggcggaagcaggaaacgcggcggcggaaatggaaacacagcagtgaaggcagaagacgcaatgccgaaagaaggctaaaacgcaggcggaaacggaagcaggagacacaacagcggaagcaggaaacgcggcggcggaagttgaaaacacggcagtgaaggcagaagacgcaatgccgaaagaaggctaaaacgcagggcggcaaacgaagacgctgcggcagaagcaggaaatacaacagcagaagcaggaaacgcggcggcgggagcggcgtaagcgccggatcgcggaagacagccgtcgaaaaagaaactacgaacaaaaccggaatacgatgataagagagaaactgacaggcgtgggggtcgcgatgataacccccttcacatcggacggacgcgtcgattatcaggcattggcgcgcatgatagactacgtaatagagggcggcgtggattacatcgtggcgctcggcaccacggccgagaccccgacgctctacatgcccgaacgcgcggtgatcgccatgttcatcaccaaccatatcgcaggccgcgtgccgctggtgatgggctgcggcggaaactcgacgtcggaggtgctggaccagctccgcgaattcgacctgcggggcgcggacgccatcctgagcgtgacgccctattacaacaaaccctcgcaggagggactttaccagcatttccgcaccgtatcggagcattcgcccctgcccgtgatactctacaacataccgggtcggtcgggcgtgaacatgaccgccgagaccacgctgcggctggcgcgcgacatgaagaacgtcatcggcatcaaggaggcgtcgggcgacatcgagcagatgcagcgcatcctcgacaaccgccccgaagggtttctggtgctgtcgggcgacgacggcatgacgctcgacctgatgcgccgcggcggcgaaggcgtgatttcggtggcggcgaacgtatttcccaaacgtttcatgcaatgcgtcggtcatgccaagcagggcgatttcgaccgcgccgaagaggagtacagggcgctcgacgaagcggtgcacgcgctcttcgaggagggaaatcccgtgggtgcgaaatgcgcgctctcggtgatgggcaaaatcggccccacgatgcggctgccgctggtcgagggttcgcaggcgctgcgcgaaaagttcagccggctgattgcggaatacgatttgcgctgattccgcgttagtgtctaaaatacggactaaaacacggatatgaaaaacttactgctgttactgcttctgcttccggcgctggccgcagcgaaggttcccgacgaggaggatattcagaacaagacgatggacgccgagtcgccgttctactatccgtcgctgatgatgcgctacaacgccggcgacgaaacgctgaccgacgaggattaccactacctctattacggctacgcctatcaggagagctacaaaccgctggactcgaatcccgatctggacaagctgctgttgatggcttcgggactcgatcccgacaaaccggccgtcgagacgctcgaagcgatgctctacacgggcgaagatgcgctggcccgcgatccgttcagccccaagatcctcaatctgatggcctacgcccacggcgcgctgggcaacaaactgcaggaaaagatgtactacaaccggatgcagggcgtcatccgggcgatccgggagtcgggagacgcgctgacgcagaaaacgccgcgccatatcctgatgttcgaccacgcgctcgacgtgatggccaccgaagggctttcgtacgacaagagccgcatcatcagccgaacggtggagttcatcccgctgaccgtaccctacacggtggagggcaagaagcgcaagggactctactacgacttcggacgcatatactggaacaaacccgaaggttatacctataaacgcgaccgcacatggcagttcaacaacctcaaaccccgtacgtacaaataatccggcgcacgttcgccctgctgctggcgctggcggttttcgccggctgcgaaaaggagcgggagccggcggaaataacgagttcgcaggaagaagcggtgctgcgcagcacggccggatcggcagcggcgttcaccgtgacggcgaccggaccgtggacgctgaccaccacgggcagcggattcggcatctcccccaccgcagggggccggggcgagacgacggtaacggtgacggcgtcggacgggaatccgggccgcagccgcgtcaagctggggacggtcgcgctgactctgaacgcaggaggcgcgcagtgcagcgtcaccgtgtcgcagagtccggcgacggcgacgcagaccatgctgctctacatgccgggacgggatttgctgaaattctacaagcagaatatcgacggcgtcctgaaagccgtcgatgcgaacgttccgggcgacggccgcgtattggtctgctatcagcccaacgcgcactcgcaggccgaaatgtacgaggcgtatttcaacgccgaaaagcaggcggccgcattcgcgctgctgaaaacctacgacgatttcgcggcggccgatcccgcatgcgtacagcgcatgctggccgacgtggaggcgctcgccccggcgcagcattacgggatcatcgtcggctgtcacggcaaggcgtgggtgcccgcgaatcagggagcgctcagctactcggcccggatgtcgaaggtgctggaggatttatggaccccggcgccgggggcgctgacgacccgttcgttcggcgacacggggcggtcgatcgacattacggacttcgcggcggcggtcaaggcccagaattacaggaccgactacctgcttttcgacgcctgcttcatggccaatatcgagacgctttacgacctgcgcgaatgcacggactacgtgattgccgcgccctgcgaaatcatgggagagggattcccctacgagcgggcgatgccgtggttcttcaccgacggcggcaaaacccgcgatctgacaaaggtgtgcgaagcattctggaacttctacatgaacgacgcgacgacccaatcgggctgcatttcgctggccgtgatgtctgaaatggagggcatgaaggaggtcatgcggcgcatcaacgcagcgtcgaaaaagtcttatgccgaggagctgcaaagctacgagggaatgtcttcgcacatattctacgatctgggccactgggtcgaactggcctgcggcgacgcggggctgaaagaggatttcaaagcgcagctggacaaggcgtttcccaaagccgcacggctcagcacaccgggattctactcggcgtacaacggccggatgaaccccgtcgcctactattcgggggtgtcgttcagcgaaccgtcggacaaatacgtcgaggagaacaagcagacgagctggtaccgggacacgcattgaatgaaaaagggtgattcttgcgaatcacccttttccgttattcgtactggccggacttgagccgttcgacctcctcgcgggagaggaaacgccatgcaccgcgcttgaggttctttttcgtcagacccgcatagtagacgcggtcgagcttggtgacggtatagccgaggaactcgaaaatacggcgcacgatgcggttgcggcccgaatggatctcgatgccgacctcctgcttgttgtccttgacataggagatctcgtcggcgaaaatctcaccgtcttcgagcgtaatgccctcggcgatgcggtccatgtcggcgcgcgtcaggggtttgtcgagcgacacctgatagattttcttcttccggaaggccggatgcgtgagctgcttggtcaaatcgccgtcgttggtgaacagcagcagtccgagactgttcttgtcgagacgccccaccgggtagatgcgttccgtgcaggcgccctgcaccagctccatgacggttttgcccgcatgcggatcgtcgagcgaagtcacatagcccttgggcttgttgagcacaagatagaccttcttttcgccctgcacacggctgtcgttgaatttcacctcgtcggtgggcagcaccttggtgcccagctgggtgacgatctgaccgttgacggtcaccagacccgccgtgatgaaatcgtcggcctcgcggcgcgagcagagtcccgactgggccagaaagcggttcaggcgcatttcgccgatctgcttttcgggcgtgaacttcggataggaagccggcttgtcgtcgtgcttccggaatccgggcttatagggtttgtcgccgaacctgcggtcgccggactttttgtccgtgaaccgacggtcgccggcgggcttgtcgccgaacttgcggtcgccgtagggtttgtcgccgaacctgcggtcaccggactttttgtctgcgaaccgacggtcgccggcgggcttgtcgccggatttacgttctccgtaaggtttgtcgccgaacttgcggtcgccgaatttcttgggaccccggttgtcgccgtaggcgggtttttcgccgcggggcttatcgccgaacgagcggcgcggtttgtcgccgtcgcggtaacgttcgtccgaacgggcgcggtcgccctgccgttcgtcgccgaaactgcggcgcggtttgtcgaatgcaggacggttgtcctccgtaaagtgggggttgtacgacgcccgcttgacgggcttgcggtcatcggacggctgctccgaatcggcagcatcacgctgcaaacgcgggcgacgctcgacacgctccgccgtagcggtcacggtacgctgacgcttgtcgcgtccgaaacgcgtaagcaccgaggtcgagtcgtttttaaagtctttcataatcagtttgaatgtttacgcggcaaagttaatcgaattttccggataaaagcatattgcatgcccgattcggagataaaagccgcaggccgttacaaattcgccgcttttgcgttatctttgcatccataaacaacgcccggcgccgtttgccgggtatttcccccgtcgctttccatgaacatgaaccgtgaaatactgcgcattgcgctccccaatatcgtctcgaacatcaccgtgccgctcatgggcatcgtctcgacggcgatcgccgggcactggggttcggacacggccgcgacgatcggcgcgctggccatcggcgtgtcgatcttcaacttcatctactggaactgctcgttcgtgcgcatggggaccagcggactgacggcgcaggcgttcggcgcgggcaacttccgcgaatgcaccaacatgctggtccgggcgctgctcgtggccggagggatgggcctgctgatgttgctgctgcaatacccgctgggcgaactggcgctgtggggactcaacggcaacgacatgacgcgcgagtacttctacgcccgcatctgggccgtgccggcggggattctgctgttcggcttcaacggctggtttacgggaatgcagaacgcgctgataccgatgttcacggccatcacggtcaacgtggtccatgtgctgtgcagcctctggttcgcattcggactggacatggggatcgtcggcatcgcctacgcctcggtaatcgcgcagtggacgggcgtggccctctccgccctgctgctcttcgcatgctaccgcaggatactgaccggaatcgactgggcggaggtggtgaacctgaaaccgctcaagaccttcttcatcgtaaaccgcgacatcatgctgcgcacgttctgcatcgtggccgtctacaccttcttcacgggggcgtcggcccgcatggacgaaccggcgctgctggccgtcaacacgctgctgctgcagttgtttacgctcttctcgtacatgaacgacggattcgcatacgccgccgaagccctgacgggccgattcatcggcgcgcgcgacgaaggggcgctgcgcgactgcctgcgccgctgcatcgcgtggggcacggccgtgtcggtgctgttcgtcggcatctatatcggctggtggcgcgaactggtggggctgttcgtggacagcacggcgcccaatgccgcgacgatcgtggagctggcgggagagtatatcgtatggatcatcctgattccggtcgccagcgccatgcccttcatcatggacggcatcatggtcggagcgaccgagacgcgcgtcatgcgcaactcgatgttctgggccacggcggcctacttcggcatcttctacgtcggctacgcgataatcggcaacaacgcgctctggctggcgttcacgctctacatgttcctgcgcggggtgctccaatacttcatgacgcaccgcctgcggtcgatctatgtgaaagcgacagtctgaccgccatggaactgactcctgattcgctctacatcaaatacgtccgcctgaaagaggaggacgaaacgccgcagacctatccgtacaccgttccggcgctggccaacttccggcggctggaattccgcaggcccgtgacgttcatcatgggcgagaacggcatggggaaatcgacgctgctcgaagccatagccgtcaaggcgggattcaatcccgaaggagggtccaagaacttccggttcgcgacgcgcgccagccattcgggcctttacgaacatatcgttctgggacgcggtctccagccgcgcgacggctatttcctgcgggcggagagtttctacaacgtggcgacggaaatcgaaaacgtcgccgacggcgtactgaaatattacggcgacaagtcgctgcaccagcagtcgcacggcgaaagttttctggcgctgctcggacaccggctcttcggacacggactttatattttcgacgagccggaagccgcactgtccccctcgcgccagatgtacatgctgtgccggatgaagcagctggccgagcaggggtcgcagttcatcatcagcacccactcgccgatcgtcatgtcctaccccggcgccgagatatacgaaatcacggaccgcggactggaaccgaccgaactggaggagacctcccatttccggctgatgaagcgttttatcctcgaccggcggggaatactgcggcagatggagctggagaaggaatagcccccgaattaagttcgggggctattccttattcggagtgcgcaccggacatagcatcgaataaagcgccggacaaaagagcgcaaacaaaaaccacccggctcctgcgagtcgggtggttctatattgccggcgggctgtcccgcccgttatgcggcggttattcgcccttggcagctttccagagcgggaagtatttgtcgtacttctcctgaatgccgggttcgtcgcgcagacggaagcagagctgcttgagcatgtcgagcgtattgaagtcgtcggctttcagctcgtgggccttctcgaaccacggaatagcctccatatagaccgcattggcggctttcaggtcggcatcgtaagcggcctgactgctgtactgcttctcgttcatcaccttgttcatctcgtcggccttgatcgtgtagaacacgcccagatagtagttgccttcgaagaggtcgggtttcagttcgacgaccttccggaacgatgcgatgctttcgtcgtactgcttcagcgcgaagaagatacggccgcggccgaaccaaaggtccacattctccggattgctctcgatagccgcgtcgatcagcgccaccaagtcggcggggtcgcccaccgaatcctcaggattggtatagagctgaaccagaccgtcgagaatgcgctcgttcttcgggaacttcttgataccggcgaccagcgcatccttggctttcaggacattggccttgtcggcgtccttctggccgtaatagcagtggaaaaggtaatagtagatattgccttcctcgtcgttatagcccagttcgagcgccttgttcaggtaatcggcaccgatgacgaacgaagcggggttcgcagcaccgtccaccgtgcgcaggtaacccgcatagtagagcagcgcgggttcgggattgccgtgagcggggctggactgggcttcgaaagccagtgcataggcgtcggcggcatcggcgtaattgccggtgtcgatacccgtgttgcccacctgcgagcagaagtcgctgatctgcttgagaccctccttgaccttatcggccgtcttggggtccatttcgtaagccttgttataggcttcgatagccttggcgggagcgtcttcaatcacccactgcgtctggctccaagtcgcgatcttgccgtccttgatatatgccgtgaaccaaggatagacccaagcctcgtagggaacgttgacgagcgtcaccgattcggtcgaggcgggttcgccgacggccagcttgagcatcgcggcgtccatattgacgaaaaggttcttcgtcggttcgatagccgcttcatagaaggctttgccgcggttgatccacgtcgcagccttggcgcccttcttcgcatcggcgatgtcggcgtcgctcttctcgatcttggatacaagcgccgacttgtttactttctgggcctgaacggcagtaactgctacgagagccaccgcaaggaccgtcaaaaatacttttttcataacagattgaattttaatgttttaaagtcatttcttcgttactcctccgccggacggtccgcttcgggagtggcgtcattcccggttgcagcgacctctgcggattgtacttcttcgtcttcatcgcccgctgccggcacggccatcaccgaagcaatggcgtcgccctcgcgcaggttgatgatacgcacgccctgcgtcgcgcggcccgcaaggcggatctgcgacactgccgtacgtatggtaagtcccgaacggttgataatcatcaggtcgttgtcgtccgtaacggcctgaatggagataagtttgccggttttctccgttacattgatcgtcttcacacccttgccgccgcggttggtgatgcggtattcgtccagatcggtacgtttgccgtaaccgttctcactcagcaccagtacgtcctgcttcgaatcgggttcgacacatatcatgccgaccacttcgtcgctctcctcgatcgagatgccgcggacacccgcaccgacacgtccgataggacgcaccgtgctctcgttgaagcggatggccttgccgtcgcgggccgcgatcatcacctcggcctgaccgctggtgagcttggcctcgatcagctggtcgccctcgcggatgacgatggcgttcacgccgttctgacgcggacgcgagtaggcttcgagcttggtcttcttgatcgtaccgtccttggtacacatgatgatgaagttgttgttgacgtactcctcgtcgttcagacgcttgacgttgatgtaggcgcggaccttgtcgtcgggttcgatctggatgacgttctggatggcacggcccttcgaagagcgggcgccttccggaatctcgtacaccttgagccagaagcagcggcccttctccgtgaagaagagcatcgtattgtgcatcgaggccacgtagatatgttcgatgaagtcttcgtcgcgcgtggcgctgcccttggcgccgacgccgccgcggttctgcgtgcggtactcggcaagcggcgtacgcttgatatagcccatgtgcgaaatggtgatgaccatgtcgtcgtcggcgtagaagtcttcggggttgaactcctcggaagagtaaacgatctccgagcggcgttcgtcgccgtatttctccttgatttcgagcagctcgtccttgatgatctgcatctgcatgccgacgttttcgagcacctccttgaggtaggcgatctgcttggtaagttcgtcgcgctcggcgatcagcttgccgtattcgagtccggtcagggcgcgcaggcgcatctcgataatggcggaagcctgaatgtcgctcaggttgaagcgctcgatcatcgtctgcttggcggcgtcgggcgtctgcgacgaacggatgatgtgcacgatctcgtcgatgttgtcctgcgcgatcagcagaccctgcacgatatgcaggcgttcctcggccttcttcaggtcgaagcgcgcacggcgcaccaccacgtcgtggcggtgatcgacgaaatgcttgaccagatcgcgcatcggcagcatctggggacggccgttcaccagcgcgatattgttcactgcaaacgaagtctgcagcggcgtattcttgaagagcgtgttcagcacgacgctggcgacggcgtcgtgtttgagaatgatgatgatgcgaaggccgttgcggtccgattcgtcgttgatgtaggagatgccctcgatcttcttctcgttgatcatgtcggcgatcttcttgatcatctcggccttgttgatcatgtagggaatctcggtgatgacgatgcactcgcggccgctgggggtatgttcgatatcggtcttggcgcgcatcataacgcggccgcggcccgtaagcatcgcctcgcggacaccctcgtagccgtagatgatacctcccgtcgggaagtcggggcccttgatatactgcagcatctcctcgcccgtgatttcgggattgtcgatataggcgcaacaggcgtctacgacctcgctcaggttgtgcggggccatgttggtggccatgccgacggcgataccgctcgcgccgttgacgatcagcagcggaatcttggtgggaagcaccgtgggttcgggaatcgtatcgtcgaagttgagcgtccagtccacggtctccttgtcgatgtcggccatcacctcgtcggtgatcttcttcatgcgggcctcggtgtaacgcatggccgcaggcgagtcgccgtccatagaaccgaagttaccctgaccgtcgaccagcggataacgcatcgaccagtcctgagccagacgcaccatggcgtcgtagaccgacctatcgccgtgggggtggaacttaccgagcacgtcgccgacgatacgggccgacttacgggtgggcttatcggagtagaggttgagctccgcactcatatcgtagaggatgcggcggtgtacgggcttcatgccgtcgcgcacatcgggaagcgcgcgcgacacgatgaccgacatcgaatagtcgatgtacgccgacttcatctgctcttcgatattgataggaatgatacgtcctaccaaaccggcattcttttcttcttcagttagcatcttgtctcttgaaattacggtcttttaacgaacaaaaatacgatttatttccgatctgagcaactttagggcgataaatctgacgccggcgcacaagatttccggaccgacaccccgtttttgccccttttccgccgatctgacggcctgaaaaaaatctcccgacgaggtgtcgggagaaaacgagcctgtttgcagccgggcgagagccggcggccgcggccgggtgggggggggcagatgcgttttcagacgcaggggaaaagtcgggaaaaacgatttccgggaagcacgcctcgcttttttgccgtttcgggaggattttttacctttgcggcttcgacccgaattttatgacccgaatcaatacccccaaagaggtcctcgcgctggccggaagctccgcggcggacaaactgcaaaatacggccggcaagaccctcatactcgcttttctggccggcgcatacatcgccataggcggcctgttctcgctgatggcgggattcggatttcccggagcggccgaagcgcccggattccagcgtctgctgtcgggcgcggtattcccgctggggcttatactggtggtattcaccggagccgagctgttcacgggcaacaacgccgtgctgatgccgggggcgctcggccgccggtacggctggggcaaagtagcgcgcaactggacgctcgtgtggctgggaaatttcgcaggggcgctcttcttcacctattttttggtggttctgcccggcgtgctgtcgtcggaaatgtggcgggaagcggcctgcaatattgcgcaggcgaaggtatcgctgccgtggggcacggttttcctgcgcggcgtgggcgccaactggctggtatgtctggccgtatggctcggaatgagcgccaacgacgtgccgggacgtatgatagggctgttttttccgatcatgtgcttcgtggtgatcggctacgaacactgcatcgccaatatgttcttcatcccgctgggcatgctgctcggcgcaccggtatcggcggcggagctgttcgccggcaatctggttccggccacgctcggcaacatcgtgggcggcggtctcttcgtgggcgggctgtactggtacctcaaccgaaaataagcggcaggaaattcccgcggcagcagggacgcggcagcccggcgcgcaatccggggcatgagccgtcacatacgcacgccgttcgtatccacgaagtgtatccgccggagtatatccgcgcaggcgtatcagcggaagtcgataaattcgtaacctttgtagtcccctttggagaaggctttgagcggtgtgtcgagcggcgcgacgccgagaacggcgatgccgacctgctcgccgtcgtaatcgtagcggagcgattcggggcgcatcgcggcggtatcgaccgtaacgagaatctccccggcgggcgaggcgtccgccgaagtcggggtcagccgcacgacggcccggccgttcgcgtcgctcaccagcgagggggcatactgggtgccgatgaagtcgaaggcatgggcggggttgctgagcagattacggcttgaagtatccacgtcgtcgatggtcacttcgcggcggcggttgtcgatctcgtagcggattttgccgtcgcagtagacctccgcctcccccaccgcgatatagtagttttcaccctcgacggcataacggccgcgggtggtgtattcgtccgagctgacctcgaacgtcactccgtaagcgcccagcgcacggaatcccgcagccagattttcgagaatctcagcggcccgtccgtcggcagaaggcgcaagggcggcaaccgccgcggaggatgcgggagacgcagcagcagccggaacgccggaccggaagaaatcacctgcggccacaggaacagcggatacggtggtttccgggaaaaccgcacgaagacccgacacggcagtttcggcagacaccgaggaaacagcggatgcggcggtttcggctgacgacgagacaacagcagatgcagtggtttcggctgacgctgtggaaacagccgacacggcggcggcttcggttacggcgaaggtttcggaaaacatcccgcgggcggcggccgtccgggccgctgacagcagcactattgcgaacaaaagtcgtttcatgggcgtaagcatcagaataaaccgaggtcctgcagtttggcttcgagcgacggcaggtcgtggaacagaatgtcgcgcggcttggccccctgctggcggccgacgataccggcgcgttcgagctgcgtcatgatgcgaccggcgcggttgaagccgacttcgtagttgcgctggatcatcgaggtagagatattgccgcccgaaactgcgtcgcgggcgatctcggcgaagagcgagtcgtatttcaccggagcggactcctcgctgccctgactgctgccgccgccgtccgcatcgggcgtatagtcgggcagcggataggcttcggtatagccctgctggcgggagatgtaatcgacgacgcgctccacctccttggtctcgaccagcgcacactggatacgggtcagctcgccgtccttcgagaagagcatgtcgccgcgcccgatcagctggttggcgcccggctggtcgatgatcgtgcgcgagtcgatcatctgcatcacgcggaaggcgatacgggccgggaagttggccttgataccgcccgtgatgaccttcacgtcgggacgctgcgtggcgatgatcaggtggatgccgatggcgcgggctttctgcgccagacgcatcacggggccttcgacctcgcgggcggtcatgatcaggtcggcgaactcatcgacgacgacgacgatataaggcaggtaacggtggccgttatgcggattgagccgccgggaagtgaacttctcgttgtattcggcaatattgcgcgccccggccttcttacagagttccagacggttgtccatctccgtacagagcgagttgagcgcatagaccgccttgcggggatcggtgatgatcgcatcgtcctccgattccatcttggcaaggaaatgccgttcgatcttggcgtagagcgagaattcgaccatcttggggtcgatcatcacgaacttcagctgcgcggggtgtttgcggtagagcagcgaggtgatgatcgcattgagtcccaccgacttaccctgccccgtagcgcccgcgaccagcaggtgcggcatcttggccagatcgaagacgtagttttcgttctggatcgtgcggccgatcaccaccggaagctcggccttcgactcctgaaaacgcagcgaacgcacggcggagtacatcgacaccacctgcttgtcgcggttggggacctcgatgccgatggtgcccttgccgggaatgggcgcgatgatgcggatacccagcgccttaaggctctgggctatgtcgttttcgagactctggatcttcgaaatcttgacgccctgcgcctgcacgatctcatagagcgtgaccgtgggaccgacggtggccttgatacgctggatcggaatgccgaaattcttgagcgtctcctcgatgcgggtcttgttgtcgaaaatctcctcgtcgctaacctccgaatcggactggtagtcctccagaagcgtcacgggcggcttgctgtagttcacgaggtccttcagcggatcgtagctctcggtcgtgatcgcccgttcgtcgaccatgcgggcctcgttggcttcgaccgtaacgacgacgccttcggcaccggccgaacccgcggaaacagatgcgtcggcgggtgcggattcatattcgggcgcggagccggctccatgcgcaggcgcatctccggatgcggaagcagccgcggcgagagatgcggggccggaaagggattcggaaccggaaagggattcgggagcggctccggcgagggcagccggggaagatgcgccggcatctccgcctacggtaagttcggtgaacgggccgtcggaaacgggcatattgcggaccggagttccggcggagggtgcggccgagggtgtcgagggacgctccagctcgacgagtccgccggggccgagcaccagccgcccttcgggacgcgagaggtccacttcgataaattcgccgtcctcgtcggtccttaccgcggattccgcttcgcgggcgggttccgagccgacgggggtgccgtcggacgagatttcgacgaagggatcgtcctcttcgccgcggacgatctgcgtcgcggctgcttccggctcacgggcgggacgtacgatttcggggtccggcgtacgtgcggcgcgcggcgtttcaggctccggcacgcgcacggcgcgcggcgtttcgggttcggcggcacgctccgtcccggctgccccggcagcatccggcgcggccggcgtcgcggcagcagaaacggccccgtcggcctcctcggcatggaggtgtcccggaacgaccttatgcttgacgatctcgacgatccggccgctcttgtccaccatgacgttgcccgcgcgattgaccttgttgatgaaattgcggttgatgaagacgcccgtcagtatccagcagcccacgagcaggataagcgtgccgaagacgccgatatgcgtgtgcagcagggcgccggtctcgatgccgaaagcgccgccccaccccgtcgagctgcaaaggctccacttgtcgccgaaggcgaagcccagcgtcagcgagccgaggatcatgatcaggaagagcgagagaatcgaatggttgaacagcagcggacgctggcggatgatccgcacgccgacgagaatgatcatcgtcggaatcaggatgccgaagacgccgaacgaattatcgaccagcaggcgtcccagcttcgcgcccgcccagccgcagaggttctccggctcgacgcccagcgtcagccgctcctcaggcgagagttgcaggccgctctggtcggcggcccagctgaagaacgaaaacagcacggacgacgcggcgaacacgccgacgaacagcagcaaaaggcccgcgatccagcgggcgctgtcgctattggagcgttcgatgcgctgacgtccgtttttagaagcagttgtatttgtcgtatttttagatgccatctcgtgttgcgcttgattttatcaagcgaagttacgcatttttttcgacattcggggtatcagggggaactttattgaatcccgcgcccgctcagagcgactccgcggccttatgttccagacgcaggcggtagctttcgccggcgaaggtgcggaacgtataggaggggacgtggtccggggcggcgtgcaggccgtactggtcaagcagctggacgacgcggcgggcgacggcgggcgacggatcgacgatttcgacgccgcggcccgcgacgacgcgttccagcacgggaagcaggaaaggatagtgcgtgcatcccagcacgatctggtcggcaccgtgttccagcatcaccgcgacggcatcgcggacggcctgctcggcttcgggcgtcgattcgcggtcgctctcgaccagttcgacgaaaccgcggccgggggcggtgatgagttcgacgccgctgccgtatttggccgccgtgcggcggaaaagttcgccgtcgagactccgctcggtggccagcaccccgaccaccccgctgcgggtattcaggcaggcgggtttcacggccggctccatgcccacgatcggcatcggggcgtatttctcccgcaggaagtcgattgcggcggccgtggcggtattgcaggccacgacgaccatcttgcacccctgcgcgacgaggctggcgacggcctcgtcggcgagccgccgcacctcctcgcgggggcgcgatccgtaggggcagtttttgccgtcgcccagatagacgagcgattcggagggcagcatgcgccgcacctcgcgccagacggtcagtccgcccagccccgaatcgtaaacacctatgggagcatcgttcattcgcttctgtgtatttgtcactccgtccgcttcggggaaagcaaccgccgcggagggaggttattcgttctgcatcgtgtgtcggaggatcatttcgaccacctcgtcgtcggacagctcgccgcaatcgacgatcagctgcgcctgcgcgtaaaacggttcgcgcgcagccatgtcgcggctcatgaattcgaccagttcggcgtcgcccagcccccgcaggcgggggcgcttctgccgtccgtaagggcttagccgccgggcgatctgctccgcctcgcggcgcaggtagaccgtaaatcccgcggcgttcatgcgggccatgttgtcgcgccagacgggaagacctccgcccgtggagaccacggcggcggttccggcgagcgtctgttccagcacttcgcgctccacctcgcggaaacgctcctccccttcgtaacggaaaacatcggccacggaagccccctcgcgccgttcgatcagcgcgtcggtgtcggcgaactccgcacccagacggcgtgcgagcctgcgtccgagggtgctcttgccgcaccccatgtaaccgatcagaaaaagaggtttcatcgtcggaggttaaaacagattcagctgttcggggtcgatcacctcgtcggcatcgcctttggcgcgttcgatttcgaactccacgccgcccgaagtcgtgcccgtacggggcaggccggcgggcgacgcgggcgttttcttcggagcggaagccttcgcggcggggttgtctttcacggccgagtcgtctttcgcggcaggattatcctttgcggcaggaacgccgtccgccgcaggcttgttccgagcaggggcggatccggccgggacgcccggcgcggaaggagtttccgcagcggaagaggccggcgcaaaggccgggccggccgtggcggaattcgcaccggaagagacggcagaaccaattccaccggaaagtgctgcggcgtcgatcgcgccgcgatcagccgcatcaccgttcgaaccgcccaccgcacggttgtccgcaccgtcggccgcaccgttgccggaaccgccttgcgctccgccggaagcaccgccgccggagggcgtatcgtcgggagcgtcgtcaccgtcgtcgtccgaaggttcgggttcgggcggcagttcgggttcgatgaagcgcagcgcggcgacgtcgtaggtcgtcaggcgcttgcccttggcgcggtggctcttgacgcccacgaattcgtccacgtcgatctcgtccgcagggcgcgacgcatgcgcgcccttgtaggtgatttcgagcttggcgcccgtgcgttccgtcacggcgaccagatcggcctgcccctcctcgtcgaggaagaactgcatcttgtcgctcatctcggccgtgaaacgcttcatatagtagtactgctgcgagcggtcgtaatagcagacgctgtagatgcggtcggcttcgtaacggctcacgcgcacggtctcgtcgggaaagtgctggccgagatcgtaacccgtgatgtagtactggttcttggaggtccagacgatgatcttgtcgtcgcccttgaactcgcccagcagcgtgccgcggccgtcggcgttcaggcggcggacatcctcgtcgaaccagacgttctggccgccgagcgtcgaagtgccgcgctccttgaggacgatcttgtggatgccgtagcgcgagaagagattgccctgactctggcgccccttgatggcgagggtcgagaagtcgaggtccacgatcaccttcttgagacgcggacggggcttgaagtaaatcttgagcacctcggcctcaccgttcggattgacagacatatagagtatctcgctcttgggcgtgcccttggtgatgtcgtactccttgtcgcgcgtgatggccttgatggcgcagcgcttcatcatgatcgggccgttcttgccgtcgcggtacagcacgttgtagatcgtgcgctcgtcgttgcgcttaaagacgccgatataatagatgcccttctcgaagaaggccttgtcgctgaccttggtgatgacgtaacggccgtccttggtgaagacgatcacgtcgtcgatgtccgagcagtcgcagaccagctcggcgtccttcatcgacttgccgatgccgaagaagccttcggcgcggtccacgtagagcttggcgttggtcacggcgaccttcgtggcttcgatattgtcgaattcgcgcagttcggtcctgcgctcccggcccttgccgtacttgtcgcggatacgctcgtaataggctacggcgtattcggtaagatggttcagatcgtactgcgtggacttgatgtcctcctcgatctgacggatttcattgtcggccttgtcgctgtcgtaacgcgaaatacggatgaacttcagctccgtaagccgctgcacgtcggagagcgtcacctcgcggcggagcagtttcttgaacggctccagccccttgtccacggcggcgtaggcctcctcgcggctcttgctgccctcgatgagctggtagagcttgttctcgatgaagatgcgttcgagcgacgcggcgtgccacgcttcgttcagctcgccgagccggatctccagctcgcggcccagcagccatttggtatgctcggccgagcggcgcaggatttcgctcacgcccagaaaatggggcttgtcctcccagatcaggcaggcgttcggggcgatcgagacttcgcagtccgtgaaggcgtagagcgcgtcgatggtcttgtcgctcgactcgtcgggcgagacctgaatgacgatctcgacccggtcggccgtattgtcatcgaccttcttgatcttgatcttgcccttgtcgttggccttgatgatcgaatccttgatcgactcggtggtcgtggtatagggaatttcggtgatggccagcgtacgtttgtcgatcttcgaaatcttggcgcggaccttcaccgcaccgccgcgaagaccgtcgttgtaacggctcacgtcggccatgccgcccgtcgggaagtcggggtaaagctggaattcgcggccctgaagatgggcgatgcaggcgttgataagctccacgaagttgtggggcaggattttcgacgccagacctacggcgatgccgtccgagccctgcgccagcagcagcgggaacttgatcggcagcgtgacgggttcctccttgcggccgtcgtaggtgagcatccattcggtggtcttcttgttgaagaccacttcgttggcgaatttcgaaaggcgggcttcgatataacggcccgcggcggcttcgtcgcccgtgaggatgttgccccagttaccctgacagtcgatcagcaggtccttctggcccagctggaccagcgcatccttgatcgacgcgtcgccgtgcgggtggtactgcatggtctggcccacgatgttggccaccttgttgtagcggccgtcgtccacgaccttcatggcgtggaggatgcgccgctgaacgggtttcagaccgtcttcgacatggggcacggcgcgttcgaggatcacgtacgaagcgtaatccaagaaccagttcttatacatgcccgtcagtttgcgcacgcccccctcgtcctgcgtcagccggtcgaacttgcccgccttgccctgaggcccggcggcaggggcttcgccggccgcgtcgccggccgtttccggggtcgatgcgtcctcgttgagcggctcttcccgcccgatgatatctttttcttctgccatattcctttaactgattgcaaggtcctgctcgacgatatcctcctcgatgcgcaggttgtcgatgatgaagccctgccgctcgtaggtgttcttgcccatgtagaactccagcaggtcgtggatcgggtcgtccttggtgatgcggaccttgtccagccgcatcccctcgccgatgaattcgcggaactcgtcgggcgaaatctcgcccagacctttgaatcgcgtgatttcggcgttggcgccgcagcgggaaacggccttcaggcgttcgtcctccgaatagcagtagtgcgtctccttcttgttgcgcacgcggaaaagcggcgtttgcagcacgaacagatggccctgacggatcacgtcggggaagaactgcaggaagaaggtcatcatcagcaggcggatgtgcatgccgtcgacatcggcatcggtggcgatgatcaccttgttgtagcggaggttgtccatatcctcctcgatgttgagcgccgcctgcaggaggttgaactcctcgttctcgtagacgacctttttggtgagtccgtagcagttgagcggcttgccgcgcagcgagaagaccgcctgcgtacgcacgtcgcggctcttggtgatcgaacccgaagccgaattaccctcggtgatgaagatcatcgactgttcggccagctcgtgcttgtcggtgcggtgtatcttgcagtcgcgcagtttcttgttgttgagcgacaccttcttggccgtctcgcgggccttcttctggatgcccgaaatcgccttgcgctccttttcgttctcgacgatcttcttctggagaatctgcgccgtctcggagtgcttgtgcaggtagtcgtcgaggtgcttgcccagaaagtccacgacgaagttgcgcatcgacacgcccggctcgatctccttcgaaccgagcttgatcttggtctgcgactcgaagaccgggtcggtgaccttgaccgaaatggcggcgatgatcgacgtgcggatgtccgaggggtcgtaatccttgtggtagaactccttgacggtcttggcgatggcctcgcggaacgccgcctgatgcgtgccgccctgcgaggtgtactggccgttgacgaacgagaagtagctctcgccgtaacccgtgccgtgggcgatcgccacttcgatgtcgtcgcccgaaaggtggatcggcggatagagcggctcctcggtcatgttttcgttcagcaggtccagcaggccgtttttcgagacgtagctgctgccgttgaaattgaacgtcagacccagattcaggtaggtgtagttgcggatcatctgctcgacgtattcgaggttgtaagcgtactgcccgaaaacctcctcgtcgacgcggaacgagatgaaagtgccgttcttctccctcacgccgctctcccacgtatcgctctgttcgagtccctgcgcgaaggtcaccgtgcgggcttcgccgtcgcggaccgaacgggccgtgaattcgctcgaaagcatgttgacggccttgacgccgacgccgttcaggccgacggtcttcttgaaggccgagccgccgtacttgccgccggtgttcatctcgctgacggccgccgcgagcgacttgaggggaatgccgcggccgtagtcgcgcaccgaaaccacgttgtcggcgatcgaaatgtcgatctgacggccggcgcccatgatgaactcgtccaccgagttgtccacgacctccttgatgaggacgtaaatgccgtcgtcggcctgcgcgccgtcgcccagcttgccgatatacataccgggccgcaggcggatgtgctcccgcggcgagagggtgacgatggcgtcgtcgccgtaattgtcgttcggattcgtattgagtaaatctgccatagtctattttttgtttcggatctcggcgagggccgcgcacatggcgtcgtgcacctcctgcatcagttcgtgcgtctcggccgcggcgacccgcccggcggagacggggggcagcacccggatcgtgatccggttgccccagttgaacagcgcgttctttttgatgagcgtcttcgtgccgtcgagcaccacgggaagaatctccacgcccgcctccttggccagcgtgaaggcccccgccttgaaacggtgaatctcgccgtccttggagcgcgtaccctcagggaatacggccaccgaagcgccgcgcgaaatccatagtttgccgtcgcggaccatctgctccagcgcttcggaagcgcggccgcggttgatgcagatgtcgccgtgcaggacgaggtactgtccgaagaagggggtcttgaagacctcgcgcttggagacccagcggaaattgagcggaatgtagtaaagcgtcggaatgtcgatcaccgtattgtggttcagcacgatgacgtaactcttcttccggtccacgtactcccggccgatcacccgctgccgccaccggggaggcacggcgaagaagatgcggaccagaatgcgcgacagttcgtgcaccacgcggcggcccttgtcgaaaggatagcacacgaccagggcgacggccgacagcaccatgaaaaaggtgcagaggaagaccagaaagatatagtaaactgcgcttatcataaaaatcagtttttaaggcccggccgccgcaccccgccgcacccgtccggacgccgtatcgggcggaaaacggcatagcggagcgttcggaataacgtcaggggacaatgagccataataattcaatctgcaaatttaggaattattcgcaggaatcctaaatcggggagcaacgatttttcaacaaaatattcacgatgaccgtcgggccggacctttttttcgcaggccgccgaaaaaaataatgcgaaacagttgacccgtccccaaggtcagggtgtatctttgccgcatgaacactgcgcagagtttatgaaaacaacgaaaatcaaattcaaaatcggagaattttccaagctcaaccgggttaccgtcaagacattgcggcattacgaagagatcgggctgctcgtacctagccaagtggacaagtggaccggataccgttattacgacgtatgccagctgggaaggatgaacacgatccgctacctcaaggagctgggattcacgctcgaagagatcggagagctgttcgacgaggggcggacgcgcccgtcgccggaacttatcgcggccaaaaccgcggagtgccgggagacgatgctccggctggagcggcgcatggcggagctggaaaggctgggaaaagaactcgcaaaaccgaagaaaatggaaaaagcatttatcaaagaactgccggcggtcgtcgtcgccagccaccgccgggtcgtcaggggctacgacgaactgttcgacctctgccccaatgtcatcggaccggagatggcgcggctgggctgcgaatgtcccgaaccgggctactgcttcacgatcgaccacacctgcgaattcagggaacgggacatcgacatcgaatactgcgaagcggtgaccgaacggaaagaggactcggagctggttgaattcaaggagctggaggccgtgccgacggccgtgtgcatgtatcaccgcggaaactacgacaccctgccgcagaccttcgccgagctttacgcatacgtcgaaaaagcgggatacaagctcgcgggaagcccccggttcagctatatcgacggcatctggaacaaggacagcgaggaagagtggctgaccgaaattcagattccggcaggcaggtaaccccgccgtcctaccctttcggacctccgtaccctgccggtacggaggtcttatttatatatgtatcaaaattttctgcaaaaatacagtactatgcattgcaaagtataaatatttttacatatctttgccacatcaactaaaatgcaacgcagattacaattaaacgcagaatattatgaaaaaacttatcctccttatcctgctgctcgcaatggctgcggcgaacgcaacagcggcccgcatgtatccggtcggcggccgcgtcgtggacgagcaggggcaggccgtggagtatgcgacggtggtactgctcaggggcggcgagcaggtggccggcatggcgaccgacgacgccggacgtttcgagctgaaggtcccgacgggcgaatacaccctctcgatccagtatctgggtttcgatcccgttctgcggcaggtgcgcgtcgaagcggacaacgatctgggcgacatcgtgctgaaaagctcctcgacgcagatcgagggcgtggtggtcaaggcgcagctgatccgccgcgaggccgaccgtttcatcgtcgacgtggccaacgccccggcggcgatcggcaaggacggcatcgaactgctggagcgcgctccgggcgtatgggtggacgacgagaagatctcgatcaacggcaagagcggttcgaaggtgtacgtcaacgaccgcgaactgcgcatggaaccggcgcagctgctgacctacctgcgttcgctgcgcgccgacgacatccagaaaatcgaggtcgtgccaacgaccggcgcggactacgatgcggattcgtcgggcggcatcatccggataacgctccgcaaacgccgcgaaaacggcgtggaggggtcgttgtcggccgattcgcggctgggccgctgggtgcggtcggtcaatccccgtgcgcgcgtcagctaccattcgggacggctcgacctctacgggctggcgtggttcaacctcgaaaccgacgaattcgaatcggacgaaaacacccgctacacgtcgggcagcaacagtctcgaagcccactccgaaaaattcgaacgcgaccggaatttcggcgcgagcttcggttcggtgtacgagatcaattcccgccagagcgtcggcgcggagttcgaatactggcgcaaccgcgaaaaaggccccaacaactcctacaccgatttcacggccgcagagggcgtgacccgcaccgacagccgctatgacaatttcacggcgcgcaacaactactcgctgacgttcaactacatccggaagatcgactcgctgggttcgacgctcaaggtgctggccgactacaaccgccgcaccacggacgccgagaacgacaacttcagccgcacagccgctccggcccccgcgcccgccgcagactcgacttaccgcgacaattcggtctcggtctacaacgtgaccaccgccacgctggcattcgacaagaaattctcgccccgctggtcgctgcgggccggagccaagtacacctacaacgacatgcacaacgacgcgctgtacgaataccggaaaaacgacgcatggtcgcgcaacgacgaccagagcttcacgatcaactacacggagaacatcgccgcggcgtacgccatcgcgtcggccaatctcggacgctggagcttggtggcgggagtgcgcggcgagtacacccgcaccgaaggcaaaggacacggcattgcgcagaattacttcagtctgttccccaacgccaacgtctcctatgcgctggccaaggacgggtcctattcgctgatcgcgcagtatgcacgcacgatcgagcggccgcggttctggaccctcaacccgcagcggtaccagatttcggactacacctatcagacgggaaatccgaagctcgacccggcctacaagcacgacgcaagcctgacgctggtgctgaaacacaaatacacgctgacgggcggcatcgtcgtccagaccggcgaaatacagcagacgatgcgtcccgacgccgacgacccgaagcggctgtgcatagcgtgggtcaattacgacacgacgaagagttattacgtctcggccaacgcgccctgccagttcgccaaatggtggaccatgaacctcaacgccacctacatccgtcagggccagcgcgtcgatcagcatacgcccgaagcgcattacaacttctatttcgcgaacgcttcgaccaccttcacgctccccgcgaagttctacatcgacctgtcataccgccttcagggccgcatggacttcggcaactgctgggtggagccgatgcacttcctcaatgcggggatcaaaaaacggttcggcgacaagttcaccgccgcatgctcggtgcgcaacctgatcgaccgaccgcagcatgtcggcgcacgcggcgaagggttcgtccgcagggtggacatgtcccagcaatggaactgccgcgaattccgcatttcgctgagttacaacttcaagtccgggaaggcgttcaagcgtcgggccgtcgaggcgggttcggccgacgagaagagccggttgtagatcgtcggagccggccccgacggagtaaaacggctgctgccgggagcggatcaaaaaccgctgaatacaagcggatacggtacataaattgctgcatggcgggaaaaacttcctgctatgcagcatttcagttatctggccgagatattcgtcgtgggcggcatcgtctcggcgctgattatcgcggccgacctgcactcgtgcagacagccgatgcgtattatgaacagcgtgtggattctcaccggactgtgggccagcgtcatcgggctatgggcctatttcaccttcggccggccgcggcactgcgacctcgaagagcataacggcggccgaaaaacggggacgaagccggaaacaggagcagaaatacgagccgaagcggaaacgggagcaagagcggcagaagccggggctgacggcatgcggaaaatgagcagtacggcaggcatggaaaatatgggtgaaacggcaggtatgccgggtatggctatgcccggcatgaggaacatggcggaagcggagatgccggggcggccgaaatgggagtcggcggtgttgtccacgcttcattgcggagcgggatgtacgctggccgatctggtcggggaatggtttatgtatttcgttccgatcgccgtcggcgggagcctgctggccggggcgtggatcgcggactacatactggcgctggttttcggcatcgggttccagtatgcggcgatccggggcatggaacggacactcggacgcggcacggccctgcggcgggcggctaaagccgacatactgtcgctcacggcatggcaggcgggcatgtacggctggatggcggtcgcaattttcggactcaacgggggcatgccgcttccccgcacttcgttcgtattctggtttatgatgcagatcgccatggcatgcgggttcctgtcagcactgccggtaaacgtcctgctgattaaagcgggcataaaaaaagggatgtagcttcccgccgcatccccttatatccaacacgataccaccctaccgcgcccggcggaaccgcaggtgcggaaagggaatatgcagtgaccgaccggcgatgatgagcgtcacggcggccagaatcagcaccacgcccagcacgatgcgcggcgtgagccgttcgccgaagaccacgacaccgaaaaagagggccgtaagaggttccagcgcaccgagaatcgccgtgggcgtagagccgatggcgcggatggcggcggccatcgtcaccagcgacacgatcgtcgggaagagcgccagcgagacggcgttgatccagagtccgggcgtggggatcgcctgcaggtcggcgcagaagcgcaggcgcacgacatagacgctcaggccgaacagcagggcgtaaaaggtgagtttctcggtcggcaggccgcgcagcgacgagcggttgacgcccacgatgtagaccgcatagcagagcgacgagagaaaaaccagcgcgacgccgagaaaggagagcgtctcaccgccgcccttgtagagcatggcgatgccggtgaaggccagcaggatcgagagcatggtgatccggctcaccttctcgtggaaaccgacggccatgatgaccgcgaccagcacgggatagaggaacaggatggtcgatgcgatgcccgcgtccatgtggttgtagctctcgaacaggaagagcgacgagaaggagaagagcagtcccatgaccgccagcggcacaaggtcgcggcggcgcacggcgaacgactgccgccggacgagcatcagcgcgcccagcatcgccgcagccagcagataacggtagaaaagcaccgaatccactcccatgcccgccccgtaaaggggcagcgtgaagagcggattcaatccgtaactggcggcggccacggcacccagcacgcagccgcgcgacttagcgttcgccattttccttagaactgtacctgcggcgcggcttcggagccttcggccgactcgaagtagggcttctgctcgaaaccgaacattttggcgacgaggttggccgggaagcggcgcacggagacgttataggtccgggccacttcgttgaactgcttgcgggccaccgaaatacggttttcggtgccttcgagctgcgcctgcagttcgaggaagttctgattggccttcaggtcgggatagctctccgacacggcgatcaggcggcccagcgccgagcgcacctgcgcctgcgcctgctggtactcggccagcttttcgggcgtcaggtcgtcggccgacaagttgatcgaggtggccttggcgcgggcttcggtcacctcggtaaaggtctgcgtctcgtgggccgcatagcccttgaccgtattcaccaaattgggaatcaggtcggcgcggcgctgatactgcgtctcgacgttggcccatgcggtcttaacgccctcttccttattgacgaatccgttgtacgttgcatagaagaagatcaccacgacggcggcgactccaatccaaatccattttttcataatcgataattttttatttttaatacacaattttcagtcatatctttccgccttcggccgctgcagccgccttcggcgtcattcacgaatctcaaatcggccctccctaagcccccggcgaaaggagtcgccgcacgcggccggaattacgggcgaagacagccgacggactatcggacagccggacggcggaactaccggtctgcagaaccaaccaaccaaccaaccaacggccaaccgagcaagcgagctgccggaccggagaaccaacgaaccggcggtttcccggaccgacggacgaccggacggcagaacagcagaacggactaacaaccggactaccggacggccgaaccggcagtctccggaccggcgaacggacatccgcccctaccagcgcgatccggcgcctccgcccccgaacgacccgccgccgaaacctccgccgaagccgccgcgcgatccgccgccgaaaccgccgatgatcgtcccgccgccaccgccgaaattgtcgtcgcgcagatttttggcccgccgcttcaccacggccccgcagttagagcagacgtaggtgtactcgaccagccggtagctgggagtcacctgcaaaatacggttcgactgctgccgaagcgtcggtttgtggcacttcgggcagcgtttgcgggcataatagccgagcatgacgacgcccagcggcaggacgacgaatccgacgacgaccaggaagacggcccatgacggaagctccccgtccgcggtatccgtaccgcccagatccagttcgctgccttcgagcagctgcgccgcggcttcgacgcccgcgaccatgccgcggctgtagtcgccctcgcggaaggcgggcagcatgtatttcagctgaatccgcttgcagacggcgtcgggaagcacgccttcaagccctccgcccgtgacgaagcggatttcacgccggtccctgaccagcaggatgcccagcccgttgtcgttctcggcgcgccccacgccccactgcgtaaagagatcgacggcgaaatcgaagacgtcgccgcccgcaatgtcgtccacggccaccacggccacctgagcgatcgcccggtcgcggagcgccccgcagaccgagtcgatacgcgctacggcgccgggcgaaaggataccgtcgggattcgacacgtagcgcgtacggtcggcacgctggacattggggatatcctcggcgcggtagctccgggcctgcgccgcaaggctcgcaaagagcagcaggcaaagaatgataaagcgtctcatattcatcggcaaaaatagcaaatattccggaaccggaacggattccggcgggaagttagcggacaaaatgcaaaaaaaaggccgccctgtcgtgcggcggtcttttttcggcggcgcagaagcgtcagcgggtcaggatgcggtagctccacggcgccatatcctcctcgacgtggccgcggagttcgccgggacggcccgtcatggcgtcggtatacatgccggcgtagatgcccgtatagtaatcggcatggatcgcatagggcgagaggttcatgaccgcgacgacgcggttgccctccgcctcgcggaccgcaatcatcaggcagtcctcggcgttgttgcgtatctcgatcatctcgccgccccgttcgcccgatgcgagcgccggattggcgtgccggagcgccgtcagacggcggtagaactccgaaaagggattggagccgtaggcgggaagcgggtcgcggtcgaagaaggcgaacgaatggtcgtagccgatctcctgaccggtgtagatcagcggcagtccgcgcggcacgacgaaggtgaagacggccatgatttcgcgggcggcgcccatgcgggcgaactccgagccgttccacgaattctcgtcgtggttggaggtgaaggccagccgcatggccgaacggggatagcgccggcggtcggcatagatgtagtcgcgcagcgacgtgacgcggaccctctgctgcgccacgtcgttcatcaggtggtgcatctcccacgcatagcaggcgtcgaaggctcccccgtcgaaaaggtaggtctcctcggcttcggccagcatgaacagaccgggcttcacccgccgcaggcgttgcgccgtctcgttccaaaattcgatcggaaccagcatcgccatgtcgcagcggaagccgtccacgccgtgttcgcggacccagaactccatggcgtcgccctgcgcgcgccacacttcgcgctcggcatagttgagtttggccgtgtcggtccagtcccacggcacggcgggcgctcccgaagcgtcgcgctcgtaccacgaagcgggcttctcggtcacccagcgggcgtcgcgcgccgtatggttggcgatccagtccagcagcaccttcatacccagccggtgcgcctcggcgacgaaggcgtcgaaatcctccatcgtccccagacagggatcgaccgcacaatagtcgcggaccgaataataggagccgagcgagcctttgcgcccctcgacgccgatcggatagacgggcatcagccacacggcgtcgatgcccatgtcgcgcaggaagcccagtttcgcggccgcggcgcgcagcgtgccttcggccgtcagctggcgcacgttcatttcatagagcacggcctgataactccattcgggatgtaacatttccatagcttaaataaaaaggtcggttttcggttttcggggtgtcaaatgtacgtttttttccggacaaacgctccgcccggaccaaaaacagccataattcgacggaaatagctgacgcagggcgcatttatttcatggaaaattcttacctttgcgcacgattataaaaacgccttaatcaaatatgaaacatttacgtctccttatgccggtcatactgacggctctactcgtcacgtcatgcgcctcgcaaaagcgtgcatggtacctgcaggatgcccagccgttcacgcccgaacagatcgccgagaacggccagatacgcatcaagcccctcgacaggctgacgatcgtcgtcaacagcaaggaccccgaactggccgtgccgttcaactcgtcttcgtcgctgagctccctgaccggagccaccaattacggaagcgccaccaaccagtcgctgcagatccgcacggtggatgagaacggacagctcgaaatgcccgtgatcggaaagatcgagtgcaagggcaagacccggagcgaactggcgcaggccatagccgacaagatcgtcgagggcgggtatataaacgaccccacggtaaacgtgcagttcgcggacatgaagatttcggtaatcggcgaggtggcacgtccgggacattacgacgtcacgcgcgacaaactctcgatcttcgacgcgctggccatggccggcgacctgacgatctacggtatccgcaccgacgtggccgtggcccgcgaagtggacggagtgcgcaccatcgagtacctcgacctcacgtcgaaggagctgttcaactcccccgcgttctacatccagcagaacgacgtgatctacgtcaaacccaacaaatacaaggcgcaggccggtgaaatcagccagaaccgaaacttctacctttcgctcgtgggtacggcaatttccgtggcgacgctcatcataaccctgaccaaataagaccggccatgacagaacagaacatcaatccgcatctgctgaacgaagagtccgaaaacacgaacggcatcacgctccacgacctgattcagatggttttggccaactggtactggttcgcgctctcggcgatcatctgtctgggaacggcctattactatctggcaagcaccccgaaaatatacagccggacggcgaccatcctcgtgaaggacagccgcaagggcggcgacacggatctgggcgcgttcagcgatctggtgggattccagaaccgccgcaacgtagacaacgaggtctacatcctccagtcgcaccggctgatgtcggaggtggtcaagcgtctccacctgacggtcaactactcggtgcgggaagggctgcgcacggcggacctgtacggccgttcgccgatcgaagtcgatttcatcaacgacaactccaagcagaagctttcgctggaggtcaccccgctcagaaacggcaagatcgagctgacggacttcgaggacaagttcgtgacgcggcaggagaccaagcgggtcattctggccgaatacggcgatacggtcgccacgcccgtcgggcaggtggtcgtgcacaagaccctgttcatggactcgacctatctgaaaaaacccatcaccgtaatcaagaattcgctcgcggcgacgaccaacgcctaccgcgccgccgtgaagagcgacgtggccaacaagcaggcctcgatcgtgacgatctcgatgaacaattcggtgccgcgccgcgccgaggacgtgatcaacacgctgatcgccgtctatgaggaagacgccatcgccgacaagcgccagctgtcggtggtgacggccgacttcatcaaggagcgcatgcaggtaatcggccgcgagctgggagacgtggaccgcgacatcgaggacatcaagaagagcaacaagatgatcgacatcacctcggaggcgacccgcaccatcaccgagagcacgcgctacaaggccgaaagcctgacgatcgagaatcagataagcgtcgccgacttcatccgcgaatacctcaacgacccgtcgcatgcgggcgacctgatcccgatggtggcctcgatgaccaacaacggcatcgtcgcgcagatatcggaatacaacgaggccatcctgcggcgcgagaagctgctggaaaacagctcggagcgcagtccggtcattcaggaccttgacaacgggctggccgccgtgcgccgctcgatcatcgcctcgctcaactcgcatatttcgacgctggagatacagctcgaaaccatgcgcaaggaggaggcgcaggtcaaccgccgcatctcgaccatgccttcgcaggagaaggtcatgctcgacatcatgcgtcagcagaaaatcaaggaggagctgttcctctacctgctcaacaagcaggaggagacgcagctcaactacgccgtggccgagagcaactcgcgcacgatcgacatggcgtacggaagcgcgcgccccgtatcgccccgctcgacgatcatcctcggcatcagcctgctggcaggtctggccattccgttcggcatactctacctgatcggcatgctcgacacgaccatccgcggccgcaaggacgtggaggagaacctcagcgcaccgttcctcggcgacatacccttcctcgaaggggacaacaagggcggcgtggtggtccgggaaaccggacgcgacgcgctgtcggaggcgttccgcatcctgcgctcgaacatgacgttcatgaacgtctcgtcgggcaaggagatcaagtgcgtgctcttcacctcgtcggacccccatgcgggcaagacgttcgtggcgatgaatctggcaatgacgctggccatggcgggcaaacgggtcgtgctgatagacctcgacctgcgccgtcacgcgctcacgacgcacttgggacgcagcaacagcaagaacggcatgtccggttatctggccggaacgatcaccgacatcgaccagctggtgacgaacatgggcttccacgagaacctcgacgtgatctgcgccggcatacagccgcccaaccccaccgagatgctgctctcgaaccggctcgacaagctggtagagcagctgaaggagcgttacgacttcgtattcattgacagcacgccggccatgtcggtagccgatgcggtgattacggaccgtctggccgacctctgtatctatatcgtgcgcgaaggcgtgctcgaccgccgtcagctgcccgacatcgaacggctctaccgcgagaagaagttccataacatgtgcatcgtgctcaacggcacacgcacacgccgccacggctacgggtacggatacggctatggttacgggtatggatacggttacggatacggctatggcgacgaccatcaggaggtaagctaccgcaagcggatcaaacttttcttcagcaaactcgcacgtaaagtaaagaaataatatggctatacacaatgcattgatcgccgtggatttcgacggcacggtggtaacgcacgcctaccccgaaatcggggacgatgcaggcgcggttgccgtactcaaagaactcaccgacaacggatgccggctgatactctacacgatgcgttcgggcgcactgctcgacaaggcagtcaagtggttcagggaccgggagattccgctctacgccatcaacgaaaacccctcgcagcagcgctggacttcgtcgccgaagattcatgcggacctctatatcgatgacagcaacttgggctgtccgatccggttcgtggacggcgtgaaacggccggtggcggactggaccaagatcagggagcagctggtacgggagggatttctggactgaccggccgcccgcaggttgttagacggctgcgcaacaggttcccaacagttgttaaccaaagataaaaacaggacttttcggagtcctgtttttattttgcgctacgggtgaaaaatgcagaggccctgctctaccctgccggaacggaatagcgccggaagtcggaaaaacaataggacaatgcggggcaaaagataaggggcggctttcgggccgccccttattataacaccgggaactaagcccagagattgcgggggtatttgccctcggcgatcatcttctcgatcgaggccatcagcgcgggtttgtcctccttgtaggtgacgccgtgccaatgggccgccgaacggagcacgcgcagggacgccgcgccctcgccgatgagtttgttgaccatcgtcgggatgtagaactccgatttgaggttctcgcggttctcggcgagccacgtcttgaaatactccttcgaataggcgaagaagtcgggcgtgaagccgaagaggttcatcgaaacgggcgtgtcctcggcaagctcctcgtcggcaccgccgtcgtggaagaggattcggccgtcgggcatgcgctcgatctgcgtacgctcgaccatcgacgtcaggttgccgtcggcatccacgccgcagacgccgcgcgatacggtgccgttgtccgaaagggtccggttcaggtcgtatgcgaccatgcagtagcggtttttgctgtcaccgagctgcgaaaggtagtcgccgatggtctggtaggcttcggcgccgtagaagtcgtcggcgttgatgacggcgaaaggctcgtgcacggcgtcggcggccatcatcacggcatggttcgtaccccacggcttgacgcggccttcgggaaccgaagcgccttcgggcagatagtccagctcctgaaagacgaattcgacggcgatgcggccgccgaaacgctcggccgaaaagacctcgcggaactccttctcgaaggagtggcgaatgacgaatacgaccttgccgaaaccggcgcggatcgcgtcgtaaaccgaataatcgataatggcctcgttattggggccgaccccgtccatctgcttgagcgagccgtagcgcgaacccatgcctgcggcgaggaccagtaatgtaggttttaccatactttttatctgtttttggcgttaaaatcaaaacgattacaaagttaaaaaattcaccgcgttccgcaaaggttttctatgaaattggttatctttgcatgaataatgcaatggtttgatgaaatttttgaagaacatacgggcatggcagcgcaactttttccgcaaacgccgcttcaacatgctcaacgctacggacaacagcgaagagtggcacatgcacctctcgccggccagcattttcgcagcattcgtttcattcgcactgctgctctttatcctcatcctcacgctggtggcgtacagccccgtgctggaattcctgccgggctaccgcaccgaagccgaccgttcgcgcgagagtctggtgcagaacatcatccggctggactcgatggagcgcatgatgaacgacatgctcacctacaaccagaacatagccctgatcatggagggcaagacgcccgtggcgcgggtgctcgccaattcggacagcacgcgggccacgaaggtgctggtgatgccctcgcccgaagattcggtgctcagggcgcagatggagggcgacggcgagtacgccgtcacgggccgcagcggcagctcgcggcgctcggtgcgtgaagcgatcgagctggcgacgcccgtcgaaggaatcatcaccgaccggttcgacatccgcaacggcaacttcggcatacgtattgcggcggcggccagcgaccgcatagcggccgtggacaacgggacggtggtgctgagcctctggactcccgaaacgggctacatggtcgaactgcagcacgccgggaatctgctgtcggtctacaagggactctcgcagtcgctggtgaccaaagggcagaccatccgtgcgggcgagctgatcggctacaacgccgaagccgagcagggcgaggtgagactcttcgaattcgaactctggaacaacggcaagcccgtcgatcccgaaggatatatcgtcttccaatagatccgcatgaaacaacgattggcaatactgggttcgaccggttcgatcggcgtgcagacgctcgacatcgtacgcgagaaccccgattttttcgaagtgcgcgcgctgacggccaacagcaactggcagcggctggcggcgcaggcgcgggaattcgacacagacacggcggtcatcgccgacaaacgatattacacccggctgcgtgacgcgctggaggacaccgacgtcaaggtttacgccggagaagaggccgtggcgcaggtcgcggcgggcggcgacaccgacgtagcagtcaatgcgctggtcggctacgcggggctggcgcccacggtggccgcactcggagcgggcaagaaactcgcgctggcgaacaaggaatcgctcgtcgtgggcggcgaatacgtgatgcggctggcggccgagaaacgtgcgccgatcctgccgatcgactcggagcactcggcgattttccagtgtctgacgggcgaacagtcccccgtgcggcggctgataatcacctgcagcggcggcgcgctgcgtgacctgaagcgcgaagagctggccggagtgacggccgagcaggcgctgcgccatccccagtgggagatgggcgcgaagatcacgatcgactcttcgacgctggtcaacaagggtttcgaggtgatcgaagcccactggctgttcggcacgccggccgagaaaatctcggtggtgctgcatccgcagtcgatcgtccattcgatggtcgaattcgaggacggggcgatcaaggcccagctcggaacgcccgacatgcgcatgccgatcagcctcgcgctgatgtatccccgacgggcgaaccgtcccggcgagcggttcgacttcctgaagcatccgcagctgacattcgccgaggtggaccgggtgaaatacccggcgctggacatcgcctacgactgtctgcggcggcgcggcacggcggcctgcacgatgaacggcgccaatgaagtggccgtcgcggcgttcctcggcggcaggtgcgcatggctcgacatcgtgcgcgccatcgaacatgcgctgaatcgcgcatcgttcgctgcggcccccaccctcgcggactatacggcggcggacggcgaagcacgccggctggccgcggaatttttagccttgtaaccaaaacacgaacatggatattatcatcaagatcattcaatttttcctctgcttcaccattctggtgggcattcacgaactgggacacttcctcatggcgcgggtcttcaaaatccgcgtcgacaagttctatatcttcttcgacccgtggttttcgctcttcaaattcaagcgcggcgacaccgaatacgggctgggctggctgccgctgggcggatactgcaagatcgccggcatgatcgacgagtcgatggacaaggagcagatgaaactgccccccaagcccgatgaattccgcaccaaacccgcatggcagcgttttctggtgatgatagccggcgtggtgatgaacgttctgctggccatcttcatctacatcggaatctgctacacgtggggcgacaactacttctcgaacgaagatgcgcgctggggatacaccttcaacgaagcgggccgcaagctcggattccaagacggcgacaggatcgtttcgatcgacggcgaggcggtggacaacgtgaacaagatcgtcaatgcgctgattatcaccgaaggcgaacgccgcgtggtggtggaacgcgagggccggcaggtcgagctgacactgccgctgggcgagctgatcgaaatgcgccagaacaaaggttacgaagacctgctggcgctccgcatgccgttcctgatcgacagcgcggtgtacgaaacggcgtcggcgctcaggcgcggcgacgagatcgtggcgataaacgatgcgcaggggctggaataccccgcttacagggagtacctgaaggcccatgcgggagaggatgtgacgctgaccgtcaaacgcgaaggcgacatgctgctggagctggtcgttccggtgtcggacgagggaaggctgggcgtgacggcgctcaatccctacaagctccgcacgcagaaatacaccttctggcaggcgattcccgcaggaatcagcaaggcgggcaaggtgatgtcgtcctattgggaacagctgaagatgatcgtacagcccaaaaccaagatgtacgaggagctgggcggcttcatcgccatcggcagcatcttccccggagactggaactgggaggatttctggatgaagacggcgtttctgtcaatcatcctcgccgtgatgaacattctaccgataccgggactcgacggcgggcacgccatcttcacgttctgggagatgattacgggccgcaaggtgagcgacaagatactggagggcgcgcagtacgtgggactgtttatcatcctgcttctgctgctgtacgccaacggcaacgacatataccggtttttcataaaataagatgaaaataacaaattgcgcagatgccttgcggcggcaccatttcgaggttgagacggtccgggacacggacgaagctttcgcagtgataaaggccgccgtcgaaacggagcggccggaaacggtatcgttcggagattcgatgagcatgcgcgccacgggcgtcatcgaatggctgcgcggcgacggaaggtacaggctgctggacggattcgaccccgcgatgacgtacccgcagcggctcgaaatacgcaggcaggcgctgatgtcggacctcttcatcacgggcgtgaacgccgtgacggcagaaggcacgctccactggctcgacaaggtgggaaaccgcatcgctcccgtggcgttcgggcctcgcaaggtgattatcgtggcgggacgcaacaaaatcgtcgcaaaccgggacgaggccgaagagcgcatccgcacgatcgcagcgccgcagaacatagcgcgccaccccggattccgcacgccctgcgccaagaccggcgtatgttcggactgcaattcgcccgaccgggtatgcaacacccgcatggagatgctgcgctgctggccggacaagcgcgtgctggtggtgctgattgaccaagatctgggactttagcgataatacggactatgggaaaactgaaaatactgacagcgctgcttcttgcagccgcactcacggcctgcggcgacgattcggacgtcttctacacgacctcctaccccgtcgcccggatcgaggtatccgtaagcctgagcgaaccggaaaagccggatcctgaaaaccctgatccggagaatcccgatcctgaaaaccccgacccggagaatcccgaccccgaaaatcccgatccggagaatccggacgcaggaacttcgcagacggaagagccggagaatccggaaaatccgttgctggaggagatccggaacgacgcgctggccaaggctcccgtgcaggcgggcggcggctaccggctcgactttacgcaccacaacggcggtccgctcgtcgtccggcctgcggccgacgccgaaaccgtcacgggtacattcataaaagagccggacaaaccggaggagctgcacttcacgttcggagaacaggcctacacctgcaaggtttcgggctatacggacaccgacgacctacgcaaaacgctgttcagcgtcgatctgaccgaggagtacaaacagctctatcccgatgcgggcgtcacgcaggtgatccggaaggaatacacgtcgcacccctattaaccgacacgcgatggcaaaagtcaaaaaggcatacttctgcaaaaactgcggattcgaagcccccaaatggctggggcgctgtccctcgtgcggcgaatggaacaccttcaccgaggagatcgtcgcccgcgaaagcggctcggtgccggccaatgtcgcaggctccctgcccgcagccaagcctcagcgcgtacgcgacatccgcgagagcgaacaccgccgcatggacctcggcaacagcgaggtgaaccgcgtattgggcggcggcatggtgccgggatcgctgattctgctgggcggagagccgggaatcggcaaatcgaccctttcgctgcagctcgcgctggcggcgaacggactcaagacgctctatgtttcgggcgaggagtcggccgagcagatcaagatgcgcgcgggacgcatcggcatcggcaacgacgaatgtctgatctatcccgaaacgctgctcgaaaacatcgtcagccagatcggcgaacaccggcccgatctggtggtgatcgactcgatacagaccatctataccgacctgctggactcgtcggcgggaagcgtgtcgcagatacgcgaatgcgcggcaacgctgctcaaatacgccaaatcgaccggcacgtcgatcttcatcatcggccacatcaccaaggacggaaccatcgccggacccaagattctggaacatatcgtggacgtggtgctgcagttcgagggcgacagcaacaacatataccgcatcctgcgcggcatcaagaaccgtttcggcgcgacgttcgagatcggggttttcgagatgctcgacaacggactgcgcggcgtggacaacccgtcggagattctgctcacgcactacgaggagccgctgagcggcatcgcggtaggcgcttcggccgacggcgtgcgcccctacctgatcgaagtgcaggcgctggtgagcggcgcggcgtacggcacgccgcagcgtacgaccacgggctacgacaccaagcgcatgaacatgctgctggccgtgctggagaagcgcgtgggaatgaagatgtttcagaaagacgtcttcctgaacttcgccggagggttcaaggtcgccgatccggggctggacctcgcggtcgtggcggcggtgatctcctcctactacgaccgtcccgtggccgaaggcgtctgctgtgcgggagagatcgggctttcgggcgaggtgcgacctgcgccccggaccgaacagcgcatcagcgaggcggcacggctgggtttcaaacgcatcatcgtctccggctacctcggcaagggcggcaaacgtcccaaaggaatcgaaatagtcacgataaacagcatcgatcagctgccccgcgcgctctttgtggaatagattttgctctgtactcctgcaaaaaggagtaaaagatgcaaaagcgaattgtcatattgggcggagtgggatttatcggcacacacctctgtctgcgccttctggaagagggccacgaagtgttttgtgtcgatatgcgcgacgccgtgaattcgccgctgctgcgcagcgtattgcagcatccgctgttccggtacgtccaccacaacatcatcaatacattcggaatccgctgcgacgagatttacaacctcacctcgccgtcgcgcgtgcgctacaacaaggcgctgcccgtcgagacgctccggatcaacatgcagggcgcgataaacgccctcgacaccgcgcgcatggagcatgcgcggatattgttcgcctcgtcgggctgcgtatacggcgcgggataccgcgatccggcgaccgatccggcggcgggatattcggggcagtacattctgagcgaaggcaagcgcgcggcggaagccctgcaccgggcctatcaggaggagctgggcgtggacgcacgcatcgcacgcatcttcaatacatacggaagcggggccgacatcatggaccagcgcgtggtgatgaagatgatcgtggcggcgctgcagaaccgcgacatcccggtcaacggcagcggcgaacagatgcgcaccttctgctgggtcgaggacatggtggacggacttgtacggatgatggaagccacgccttcggagcagacccgcaccttggatctgggcagcaaccacgaaatctcgatacgcgcgctggccgagaagatcatctccctgacgggaagccgctcgcggatcgtacaccgggcggcacgtccggacgatgcgcggcggaggatacccgacatttcggccgcacggcgcgaactggactggacgccccgcacgccgctggccgaggggctgcgccgcacgatcagctatgccgaaaaagagctgacagacaaggtctatacggagcttacatgggcggaaatgaactaaacacgacaaatatgacagcaacggattttgacaagattatctggcgagacgcactgacgttcgtggatttcttcgcaacatggtgcgggccgtgccagatgatgcaccccgtcatagaccggtttcaggagaagatgaacggccgcgtggatgtctacaaggtggacatagacgaccgggacatgctcgaaatcgtacaccgctacaacatcatgtcggtgccgacgctgatgtttttccgccgcggcgaggtgctgtggcgcgaaagcggccgcatcggctacgaccatctggcgaacgtactcagggaattggaacagcgcgagcaggtaggtcagcgctgacaggcggaagctatgcttccagacgccaagtaagctcctcgtggacgtagtcttcggcagggagcttacccagagaaccggctgcgcggagtaccgcctgccggttctcctcgttcaggccgccgacggcagacagcagcgcgacggccccctgcgcgatcaggcgggcggccgaagatgcggaaagcggagcggcaacaggttctccgagggtctcggcggcgcatacggcggcgcggcggaccgcttcgacggcgggcgcgatccatgccgccgtaagaagatcgctgcgggcggcggagtgcaaggcggcgtatcgaagcagcggattcggggcggcgatccatgcgtcgaacaaggccggaagcgctgcggagcggctcaggaaagcgaaagcggcttcttcggcgacttcggaattgacgatcccggccgcccatgccggaaattcatcgggcgtaagcgattcgggccgggcgatatgcagcgccgcaaggcgcagttcgcggacctcctgcaaataaagataacgggcgaaatcgtggtcgggagtctcggcgcgcgcgagtttgcgcagcgtcggcaggctcacgccgtagttgagaccgtacggcgcaccgtaacagcgcatcgcatcggcgacggcgccgttccgctcgcggcgcagctcgccgagcagcgccaccatacgcgacgtgaagtccatggacgagattatttgcggcggggaagcgccacgttgatcgtgcggccgaactcgaagagaggcagcaccgcacgggcatattcgcggccgccggcgatgaccgtgcagaccgaaggatcggccacgcggcatacgacgacgttggtctccttggccgaagcttcgagcgcattggaggtgttgcccgaaggttcgatctgcaacagcaccatgtcgcccgaaagatcgctctcagggagcagacctgcggcagggctgaagcggcagacgatatactgcttcttgtcggcctgaggataaaccacatagcggcgcgtttcggtagtcaggatgcgcttgccgagaaacagctcaagatagctctgctccagacgttcgatctccgcaagggcggatttgagtccttcgccgaagacgttttcaccggcttcgcccgtaatcagttcgagacggtgcttgcggagcgaaaagatcgtattggcagcttcgcgggcggcgtcttccagcgccagcaccgtcatgtcgttcttgtcggcctgcaggcgggcaaattcgtcgtcggacgcagcatgggtcatgacgcggcgcgaaggctcggccggtgcgggtgcatcgaggcatgccttggcatcgagcagagccacggcggctccggtaacggcccagccggtcttgtcggtgagcggagcgcgaacgccgaggaatttctgcgcataacgggcgtaaggaccgctgagggtcacgtccttctcgacggtgacgtccacggccagcaccgtgcggggctgggagacgacgatgccgtcggcggtttcgttcgcgccctgcagggcgatgtatggattctgcgccgccgcgccgccgcatacggcgagggcaagggcaagaagtctgagtttcatggtctcgaagtttttattcactgatacaaatgtaatttattttgccgtgctatcaaaatttcaggtaaaaatcacgggttaaggcccggtattcgggggtgtactgctcgtgttcgcccgtgccgacgaccagttcggagcagacgggaggagaatcggagcgcaggccggagcaggcgttttcgtgcgcaaactccatcagcaggcgtttgaccggacggcgtggcgtggtgcgtacgcccatagagcgggtcagcgcgaggaatccgcggcagacgtcggtaaaacgccgggcttcgtccgtcggcagaatcacggcgaagcggccctcggcggcgagcaggcgcacgaccgcgtcgcgcagctggtcgaagggcaggcgcacggcgtggcgcgccgtggtgcggccttcgtcggggcaggtcagcgaatcgacgaagaagggcggattggagacgatcaggtcgaagcgttcgtccggcgtgaattcctgcacgggacattgcacgaacgccaccctgccgctccacggcgacgcggcggcgttttcgcgggcctgagagacctcctccacatcgacgcccgtaatccgggcttcgggagcgcgctgggccatcatcagggcgatcagcccggtgcctgtaccgacgtcgaggatgcggcggtccgcaggccgcacgccggcccatgcgccgagcagcacgccgtcggttccgaccttcatcgggcagcggtcctgacatatggtgaatcgtttgaagcggaacatcgtcaacactctttcagataaccgtcgatgccggcgccgaaaagcgagaaatcgtaacgcacgggatcggcggaatcgaatccgcgaagcgccgccgtgacctcctccacggcccgccagtcgttctggcggcgtgaaagcaggcccagcgcgcgggccatgtcgcccgtatggaggtcgagcggaatgtaaagggccgacatcggaatccgcgtccacaggccgaagtccacgccccgctcgtcgcggcgcaccatccagcgcaggaacatgcaaagccgcttgcaggccgcgcccctgtcgatcgacgagaggtgtttctcgcagcggggcgcatggtcgcagctgaaaaattcgcggcggaattcggaaaggaccgccggaatactctgcacggccgcatagcgctcctcgaaaaagacgccgaggccgccgaaacgtcggtccatgcggcgcagggccagcacgaaatcgcgcaggtcgcggccgttgaaggtgcggtggacataggtttcgagcgtcgccagctcccggtcggaagcattgcgcacgaagtccgccggagcgtcgtccatgcagcgcatcatgcggtggccgctcgtgacgatcgccctgcggttgccccacgcgatcgtggcgacgaggaaccccgcgatctcgcggtcggctcggtccgtatagcggtgcggcaccgaaatcgggtcgtcctcgataaactcagagcggttgtatttgtcgtggagccgttcgagcagctctttcagttcgtcgtccataaaacgccgtattacagaatccggccgtccgacatggtgatcttccggtcggccatcgccgccagatgctcgtcgtgggtgacgatcacgacggtctgccccagccggtcgcgcagctcgaagaaaaggcggtgtatctcgtcgcggttgtgcgaatcgaggttgcccgaaggttcgtcggccagcagcacggcgggcgaattgacaagcgcgcgggcaatagccacgcgctgctgctcgccgcccgacagctggccgggtttatggccgcggcgcggcgtgaggttcatcatctccagcagttcggcggcgcggcgttcgacctccgcacgcggacggcggccgataaaccccggaatgcagacgttctcgaaagccgtgaattcgggcagcaggtggtggaactggaagacgaagccgatacgttcgttgcggaagcgggacagcgccttgtcgcccagcgaaaaggcgtcctgtccgtcgatctcgacacggcccgcgtcggggcgcgaaagcgtgccgacgatttgcagcagcgtggtcttgcccgcgccgctggcgccgacgatcgagacgacttcgccttcggcaacgtcgagcgagacgcccttgagcacttcgaggtcgccgaaacgcttatgtatgtcggtaacttttatcatgcggtttcgatggttatttgcaattccgttcgtacgcgccgaagagcctgaccgtatcgacggcctcctgcacatcgtgcacgcgcaggatcgaggccccctgacgcaggcactcccagccgagggcgacggtgcccgcgagcgattcggcgggcgtggcgtcgaggacgcggtagatcatcgacttgcgcgaaaggcccgccagtacggggtagcccaatgcgcagagacggtgcaggcccgcaagcagctcgtaattctgttcggtggtcttggcgaagccgaagccggggtcgaggatgatgttttcgcgtttgatcccggcagcgagcaggtcggcggtcttcgtttcgaaataggccgtgacctcggccgtgatgtcgcgtttgtagtcggtgagggtctgcatggtccggggatcgcccttcatgtgcatggcgacgtagggcacgccgtagcgcgcggccgtggcgggcatctgcgggtcgagttccccggcagagatgtcgttgatgatgagcggaccgaatttttcgatcgcacgggcggcgacttcgctgcggaaggtatcgaccgaaatcaggacgccgggcgccagacgccgcacggccccgatgcccagctccacgcgccgccactcctcgtcggcagggacttcgtcggcgccggggcgcgacgaatagccccccacgtcgatgatcgaggcgccttcggcggcggcctccttcacgcggcgttcgacatgcgtcgcgtcgggcatgcggctgccggcgaagaacgagtcgggggtgacgttcaggatcgccatcacctgcggccgggagaggtcgagatcaatgtcgtgctgcttcatggctgaatatgcggtcgagtttgacaacggcgggttcgaggtcctcctcgaagatattgacgatcgcgtagtcggcacggccgctcagcgtatcgtcgtccagctgggcggcgatgcggcggcctacctcatcgggaccgcagtcgtcgcggcggcaggtgcgctcgatgcgcagttcgcgcggcgcgaggaccgcgacagtcttgtcgacgcacgtttcgagaccggcttcgaagagaatcgcgctttcgagaatcacataaggcccctcctgccgggcggcccacgcatcgaaatccgccatcacgacgggatgcaccagcgcattgaggtcggcgagcgcctgcgggtcgctgaagacaacgcctgcgaggtagccccggtcgagctgtccgtcgcggaaggtgccggcgccgaaacgttcggtgagccgcacacgcagcgcatcgtcctgctgcatgagccgtttggccgcggcgtcggaatcgtagaccgcgacgcccttttgtgcgaaaagacggcatacagtgcttttgccgctgccgatgccgcccgtaattccgattttcatcatggtttctgttcgggataatccagttcgggaacagccccgatggagaccaccttgatgtcgctgtagcgtaccgaaatggcgctttgcaacgactgggggtcgatcaccaccttgccctcgtgcccctcctcgcgcgaacgcttgtatttgagttccgaaagcgggatgcgcagcgtcttgttcatgtagacccggtagccgaacaggttggtgccgacgccctcgacgacgcacgtcacctcgaacggctccccgtccacactcacacgcacgacctgctcggtggtataggtatagctcagtttggcgatataccacaaaatgaacgacgcgacgagcagcgccagaaagaccggcgagacgtagcggtgcatccatttcagcaaattatccaatgtgcgttgaagttccatgatgcaaaggtaaaaataaaatggactgcaacaaaccgtgcagtccattttattcgaatagatataaggtgtattacgcctccttgtcgagtttggcgcgtttggacatcaggtcgtaggcgatcggggtggcgatgaagatcgtcgcgacggtacccacgataacgccgacggtcagcgcgaagatgaagccgcggatggtctcgccgccgaagaagaagatcgccagcagcgtcacgagcgtcgtgcccgaagtgttgatcgtacgcgacagcgtcgagttgatggcgttgttcacgttctccttgaggttgcgcttgggatacatgcccagatattcgcggatacggtcgaagaccaccacggtatcgttgatggcgtaaccgatgatcgtaaggatcgcggcgatgaaggcctgattgacttcgaggttgaagggcacgaagccgtaaagcatcgagaagagaccgatgatgaacagggcgttgaccgcaagggcgatcgtggcgcccgaagcccactgccagcgcttgaagcggaaggtgatgtagagaccgatggcgatgagcgagaagagcaccgagtagatggcgttccacgtcatgtccttggcgatcgaggggccgatcttgtcggccgtcaggataccgttgacgtcggtctgggtattgcggaactgctcgaacgaaatgtcgtaggagtagagcgacttcatggcgtcgtagatgatctgctcgacttcggccgtagcttcgtccgacgtgtcgtcgtaacggtactgcgtcacgatgcgcatctggttctcgttgccgtactgcttgacctcgaagctgatcgccgaagcgtcggcgtcggcatgctgcgcgaagacctgacccagattctgacgaacctcctcggccgaaacgggcttgtcgaagcggatgacgtaggcacggccgccggtgaactcggcgccgaggttcagaccgcgggcgacgaacgagatgcacgacagcgcgagcagggcgaccgcgacggtgtaggcgaccttgcggacccggatgaagtcgaaatgcgtattggtcaggaagttctcggaccacttgcgcgagaaggagatattgccccacttggcgacgatccactcgatcaagaggcgggtgatgaacacggcgctgaagaacgaggtgatgataccgatgatgagggtcgtggcgaagccctgcacgggaccgttgccgaagatgaagaggacgataccggtgatgatggtcgtcaggttaccgtcgatgatggccgagtaggctttcgagaaaccgtccttgatagccagcgaaaggcccttgccgccgcgaagctcctccttgattcgttcgtagatgatgacgttggcgtcgacggccatacccatcgtcagcacgataccggcgatacccggcagggtcagcacggcgccgaacgacaccagaacgcccatcagcaggaagacgttggtaagcagggcgatgtcggacatccagcctgcggtcttgtagaacagacccatgtagagcaggacgaggatgaaggcgatcaggaacgagagcatacccgcattgatcgactcctgtcccagcgagggacctacgacggtgtcctgaatgattttggcgggcgcgggaaccttacccgaattgagcacgttggcgaggtccttggcttcctgaatggtgaagtcgcccgaaatttcggaagaacccttgtcgatcttggtgttcacgcggggagccgagtagacgtagccgtcgagaacgatggcgatgcacttgccgatgttctcgcccgtaagacgcgcccactcctgcgtgccttcgccgttcatcgacatcgaaaccacggcgttggcgccgcgctgggcgtactgctcgcgggcttcggtcacgacgctgccgtcaagcggagccttgccgtcgggcgtcgagatgcggatcgcatagaggtagaagcggccgtcgatcttgtcgtcgcccttgacgccccacttgaaggcgatgtcggcggggaagagttcgcggaccgcaggattggccagatattcgtttacggcagccatgtcggccttgtaggccgcaccgatggcggcgccgcccgcaaaaccgggatcgagaaccgcgaagagcgggttcttcgcacggtcgtaacggtcggtgtgctcggcttcggcaacagccgtggtgtcggagccgatctcggcgagaaggccctcggcttcgcctgcgggagtcccggcggcggcagcggcctcgacggaagcgacttcgggctgtcctgcggcgggagcttcgctcagctcggccttgatgaacttatcggcggcggccagtgcgggaagcacctcgcgggcgtcataagtgagccagaattcgagcgaggcggtaccctgcagcaggtcgcgcacacgctgcggctccttcacgcccggcagctcgacgaggatgcggtgcgagttgggcaggcgcatgatgttgggctgcgtgacgccgaagtggtcgatacggctgcggagcacgttgaacgacgcggcgatggcggcgtcggtctcgcgtttgaggatcttctcgacgtcggcgtcggagctttcgagcgtgatgtccttacggtcggggctgacgaaaaccgccgccagcgaaccgccgttggagagacgctggtaagccttcacgaagtcggagatatagtctttcgaggtgccctccttcagcgcggcgttcgcctcggcgatggcttcgacgaatgcggggtcgttctggctgtcgccggcaagcgccttgatgacgtcctcgacctgcacttccagcatgacgttcataccgcccttgaggtccagaccgaggttcagctccttctccttgcactccttgtaggtgaatttcttgaatccgaggttatagaccccgacattctggaccgaatcgaggtaatgctgctccgcctcggactgctgtccgacggggaactgcgcggcgtactcggccgcttttttctctacactccgcgttttgaacgtgaaggagagctggtaaatacacgcaagagccaaaaggaccgcgagtaatttaatagcacctttactttgcatttgagttgaaaaattttgttattatttgttgtaattattgtcattacgcataatagcacgcaaagataggaaaaaagaattgaaaatcggaaattaagaattaagatttgcgcccggacggcaaaaaatctgtatttttgggaccgtatgataaaatataccgaatacaagtaccatgcagcggcgctgttcaccgtggcggtatggggcgcgacgttcgtatcgacgaaggtgctgatcgcccattcgctgacgcctgcggagatattcctgctgcgtttcgccttggcctacgtctgcatctggcccctgtcgaaaggccgcctgcgggcctacggatggcgcgacgaagcgctgctggccgcggccggggtgacgggcggatcgctctatttcctgaccgaaaacatggcgctggaatacgccccggcgtcgaacgtgtcgctgatcgtctgcacggcgccggtatggaccgcgctgctgctgagcctcgcataccgcggcgagcggatgacgcggcggcagatcgggggatcggcgctggcgttcgcgggcatggtgctggtggttctcaacggccgtttcgtgctgcacctctcgcccaaaggcgatctgctggccctgtccgcggcgctgctgtggatggtctattcgctggcggtcaaacgcatcggaggacgctaccccgccgttttcatcacccgcaaggtcttcttctacggactgctgacgattcttccggtattcgccttccagcccttctcggtcggcgcggaggtgctggcgcgtcccgcggtgtggggcaacctgctgtttctgggcgtcgtcgcgtcgatgctctgctacatcctgtggaacgccgcgatgcaccggctcggagccgtaagaaccacgaactacatctatttcaacccattggttacgatcgtcacggccgcgctctgcatcggcgaacggatcaccgcggcggctctcgccggagcggcgctgatcctctgcggcatgtggcgggcggaacggcggcccgcatcgggcaataaaatcccgcggcccgacgttccgtgataaacccgcaaagtcagcatgctgaaattcctactcgtctgcgccgcattcgcggccctgccgatacaggcgcaaacactctccggacgcatcgtcggagcggacgcccgaccggtcccctacgccaacataggactcaagaaccgtcccgcgggaaccatatccggacgggacggctcgtttacgctccgcattcccgacctgagcgtccgggacacgctgcgcatatcctgcatcgggtatgccgcacgggagattccggccgccggacacgacgcacggccgctggagatacggctgcaggagcagccccagacaccgctgagtcccgtgataacccatattccccgcaaacgctacaccttcggccgcagcatcggcagcaaccggttcagcgcggcattccgcgccgggcaggaaggcggcgagatgggcgtgaaatgcaagctcggaaacctcaggggagagttgcagcgggtgcggctcaatctggcgggatgcaagggcgtggatacgctccatatgcgcataaacgtctacgccatgcggggcgaccgtatccgcaaaaacctgctcgcggaaccggtctatttctcggttccggcgtcggaggcagacaagacggcgaccgtagacctgcggccctacgagatattcgtaagaggcgacttcctgatctcggtcgagaacctgacgcacatgccggcgggggcgaaatactggattcgcgcccggctgctctcgcgcacctacacccgctacacgagtcaggcgccgtggaagatgcgcaaggccggggtcgggctgagcgtcgacgtgctggtggagccggaataggaaaccgcgccaccggctccgtccctgcggcggagcgtccggcccttcattccggtcattcgacggcggaggcattgtgcggattgcaaattatttgctaaatttgtccgtatcaccaaacccgaccgtcaccatgacccgattcttcacctccttctgcgccctcgtgatcgccacgggcgccttcgcacaggccggctaccgcccggcccccgaaaacctccagtcacgcagccaattcgccgaatgccggttcggcatattcctccactgggggctttacgccatgctcgcgcagggcgaatgggcgatgaccaaccacaacctcaactaccgggagtacgaaaagctcgcgggaggattctatccctcgaaattcgacgcggacgcatgggccgaggctttccgccaagcgggagcgcgctacgtctgcttcacgacgcgccaccacgacggcttctcgatgttccgcacggcgcagacgccctacaacatcgtcgatgccacgcctttcgcccgcgacgcggtgaaggagctggccgacgcgtgtcaccgccgcggactgcgcgtccacttctactactcgctgatcgactggtggcgcgaagacgccccgcgcggccggacgggactcggcacgggccgcccggccgaaaaggaggacgccgacgcctatttcggcttcatgaaggcgcagctcaccgaactgctgacacaatacggcgacgtgggcgccatctggttcgacggcatctgggatcaggacgagaatcccggtttcgactggcggctgggcgaactctacgggctgatacacgcattgcagcccggatgcctgatcatcaacaaccaccatctcgcgccgttcgaaggcgaagacgcgcaggcgttcgaacgcgacctgccgggagagaacacggccggatattcggggcaggagatcagccgcctgccgctcgaaacgtgtcagacgatgaacggcatgtggggatacaagatcaccgaccaaaattacaaatcggcgcagacgctcgtgcgctatctcgcaggggcagcaggacgcggcgcaaacctgctgctcaacatcggtccccagcccgacggcgcgctgcccgcggcggctctcgaacggctcgacagcatgggacgctggctgcgcgcgaacggcgaaaccatctacggcacgcaggcaggacccgtaagcccgcgcagctggggcgtgaccacgcgccgcggcgacaaaatctacgtacacattctcgactggcccgacgaagagctgttcgtgcccgtcagggacgaacgcatccggcaggcggtacgcttcgccgacaaacgcgcggtcgccttctcgcaggacaaggcgggcgtgacgctgcgcttgggcgaaaagcctgcgggagcggactgcatcgtggaactgacagtcggaaaatagcacgaaaaagatgcggtccggaaatccggaccgcatctcgaaaaatatatgtgagccttacggctgaagtgttcggaacacttcgggattacttcacctcctcgaactcgacgtcctcaggctgcgagctgtcaccgttcgacgcattgccggcgttagcctgcgactgctggccggcatcggctccgggctgggcgccctgcgcctgctgctgggcgtagatgtcctgcgaagcggcctgccatgcggcgttcagttcggcgatagccgtgtcgatagccgcgacgtcggcgttcttgtgcgcctccttcagcttggccaaagccccctcgatcgccgatttcttgtcggcaggaagtttgtcgccgtactccttgagctgtttctcggtcgcaaagatgttcgagtcggcggcgttgatcttgtcgatacgctccttctcctccttgtccttcgcttcgttggccttcgcctcgtcgcgcatgcgctggatctcctgctcggtaaggcccgaagaggcctcgatgcggatcttctgctccttgcccgtacccttgtccttggccgatacgttcaggatgccgttggcgtcgatgtcgaacgtcacctcgatctgcggcacgccgcgcggtgcggcgggaatgccgtccaagtggaagcggccgatcgacttgttgtcgcgggccagcggacgctcgccctgacaaacgttgatctcgaccgaaggctggttgtcggcagccgtcgagaagacctccgacttgcgggtcgggatggtggtgttggcgtcgatgagcttggtcatcacgccgcccagcgtctcgatacccagcgacagcggcgtaacgtcgagcagcagcacatccttgacctcgcccgtgagcacaccgccctgaattgcggcgccgatggccaccacttcgtcggggttcacgctcttgttgggcgtcctgccgaagaactcctccacgatcttctggatcgcgggaatacgggtcgaaccgcccacgaggatcacctcgttgatctgcgaggcgtcgagacccgcgtcgcgcagcgccagtttgcagggttcgatggtcttgcggatcaggtgatcgcagagctgctcgaacttggcacgcgtgagcgacatcacgaggtgctgcggaatgccgtttacgggcatgatgtacgggaggttgatctccgtcgtcgtcgaggacgaaagctcgatcttcgccttctcggctgcctccttcagacgctggagggccatcgggtcctgacgcaggtcgatctggtgctcggccttgaacgcctcggccatatagtcgatcagcacgtggtcgaagtcgtcaccgccgaggtgcgtatcgccgttggtggacttcacctcgaagacgccgtcgccaagttcgaggatcgaaatatcgaacgtaccgccgccgaggtcgtacacggcgatcttcatgtcgctgttcttcttgtccataccgtaagccagtgcggcagcggtcggctcgttgatgatacggcgcaccttcagacctgcgatttcgcccgcctccttggtggcctgacgctgcgagtcggagaagtaggcaggaaccgtgatgacggcttccgaaacctcctgtccgaggtaatcctcggcagtcttcttcatcttctgaaggatgatcgccgaaatctcctgcggcgtgtactgacgtccgtcgatatcgacgcggggcgtattgttgtcgcccttgacgatttcatacggagcgcgtgcgatgtcggaggccacctgatcgtaacgctcgcccatgaaacgcttgatcgagaagaccgtgcgtttggggttggtgatagcctgacgcttggcggggtcgcccaccttgcgctcgccgtccgccgtgaaagccactaccgacggagtcgtgcggtgtccttcggagttgggaataactacaggctcgctgccttccatcactgccacgcaggagttagtagttcctaagtcgataccaataatctttgccataatcgtatatgagtttaattgtttatattttttccgttttctttccgtgccgccggaattcttccgccctgcgggtccggagcgccggtcacgccctgaatttgaacaaaggttgtaccaaacggcaatctctgccaaattgtcagcagaatggcaggccgggccgggaatatcgccccggaaagcaggatgcaaggtgttattttgtcagaaacggcgcggcgaccaaggtacggagggcggacgcatttttgcggaaagaccgaccgacggaacccgatgcggaacgacacggcaagcagctcccgcagacacgcaggccgggattccgcggatacaaaagccgtgatccggaccgaagggcagcggaaagaggcgcggcacggcgacggggtacgggcgacgcaacgggcgatgaacagcgggcggcaagggatggacaacgggcgacggacaacaaacggcggacgatgaacgatgaacggcgcaacgagcgatggacaacaagcggcaagcgctggacgatggacggcgcaacgggcgacggacaacaagcggcgagcgatggacgatgaacggaaaaacaagaaatgacagaagaaaaaccagacggaatacagacgaaggaggacggcccgacaaagctggcgagatgcgggctgagagaaacacggacagagggagaaacgggcagagggagatgcgggccggcaagagaaagacggaagacgggaagaaagacggggcaaagagcgatgcggcgaagacagacaggacagcggagtccggcggcaaaaaaaacaggcctgcgcaaccgcaggcccgacgacacggcccgaaggccggcatacaatatttatttctgctcgcccagaatacgcatcgcaacgtcgagaatcgtcgtatcgtccagcgtaaccacgcctccgtccggccccggctcgaagtggacacccacgcattctttcgcctcgtgtttccctccgaaatagttgcggacagtgtctacatcgattcctaactcatctgcaatgcgctgcgagctgccgctgggcagtctgtccttgatacggcgcaactcgttaaatgtgataatcatatccgttgaattttaagttgaagttctgcatcactaagttaatacatttttgttgaactgcaaaatttctgccttaaaaatgtgcaataaaaacgaaacggggagataataaaaaagaaaccgcactttccgtcgggaaagtgcggtttcagttttcgtatccggcgccggattactccttcggctcgatgtaaagctggaaaataagcggcgtgaacgagggaatctcggtgctgatggtcgtgaccgtagttcccgtgctggagctgtcgtagtcgctgccgtacatgtcgccgtaataaccgccgtagtagccgccgtaaccgccgtaataattattgtagtaaccgccgtaatagccgccgctgccgtaatagctgttggcgtaattcaggtagttcaggtagtcgtaatagctcgacgaataaccgctcgtgcccgacgtggaggagctggtcgatccggtcttgcccgacgagccgtaggcattggtcgaggtggtgatcagctcggcccactggccgtacttgaggttggggatcgtgtagtagaaggcttggatcatgcctccgctcgacggcgtataggagagcgccgaaccggcggactgcacctcgccgtagatgatcttcttcacctcgtcgatgttcgtatcgaagatgaacccgtcgaggaaacggccgatataccagattttggccgtaccgtcgagcgtcaccgaatcggcttcgagtttcacgacgccttcgtacttatcgtcttcatcgggatagaaacgctttttcagcgcttcggcgatccgcttgtctatatccgccatcgccccgtcggtatacggttcataggcagacttatagggttcggggaaggtcaggcagtcgccgtcggcctgcgtcggatcgtagcgcacattgacgtagagctgcggaatggtatcgcaggcgctgacccagcggttggccgtaacgtaggcgtggttcgcatcttcgggatcggtcggacgcacgacggcacccgtcttgtcgtcggcttccttgccgtagaccagacggcctccgttgtcgtcgcagaacccgtccacatccccgccttcgcgttcgagcgggttgttgaccgtatcgcggatctccatcgtgacgatgaacggccgcttggagctcagcgtatactgtccttcgtagccgccggtgccctcgacgccgttgccgacgaccgacgacggcatgtaaagctggattttggtgccgtaacgcagctgcagttcgggcgaccggagtccgagacggtccttgttcgcattataatacttttcgcccagtttcagcgtgttgcgcatggccagccacgtaccttccatcagccccgtattttcggtgccgcaatagcggtagaagggcacgtaatgggtgtatttggagaaagtcccggccagtctggccgaatcggcgttgcgcgtgaggatgatattgccggccagatcgcgccccgtgaagtcgaacgacacccagatcggctccttgccgatcgggtccagcgactggtcgccggcctcgatcacgtcgatataatagccgccgtcggactggtagttctgaaccagatcggaccggtgctgggtcatccacgcttcgagcgcctgattctcgaactgaacgtacgattcgtcttcgtctttcgcgcaggatgtcagcgccagaaggccggcaaccggcacgcataaaaaacgggtaataaatttcatattttcggtttgtattttactcgacactgtttaccgtaaaaaaataagcgacgggactctccttcgggatcgtactgaagttgatgtcgccgtaagccatattgtaggtcatgtaggattcgacatagtcgccctcacgacaaccaagtaacgcatcgtaaagcccttttattatgccggaaccgcgcatatctatctccagcggttcggacgaccacgcgcccggcgtcagaccgggaccgttttcgggatcttccatcgccgcgatcagcaccggatcgttcgaataatagggcatcgtaaggttggtggaggacgtcgcgggcgtcacgatattggcaaaggtgaagacgtaggcgctgaaagtgacggtcaccttcgaagtgcgcgtcacctcggtccaattcacgcggtcggggttgttgatccccgcgatgtagcggtagaccgcgttgcccgaagtggtgaagtaaggctcgtcgctcccctcctccagctcctcataggccacgagcttgggcgaatgggtgccggtcaggtaggagacgatcttcgtcttctgcgtgggcaggatgtcctcctcgtcggagcatccggccagcagcaccagcgctgcgaatatggatatgaaaactctgctcatcgtcgtataatcgtgcaaatttacaaaaacaatccgattttacagcatgaaacgcaaaaaaagccccggttagcatgccggggcaaaaaaaagacggccgaagccgtcgattatgctaccgataatagtctttccggggatttttgagacgttgaattcgccgttgcttcagatatatgacgcctacaccgatcaggaaggcaaaggcgaacacccctagcaggataccgataaagccaagagggatttgttcttccataaatcaataatatcaagtaacgggtgcaaaggtatagcaaatatcttaccaaaccaaacaaacggggggggg

SEQ ID NO: 12059 - DNA, 71129 bp, Unknown
  gut microbiota DNA sequence
atcctcgaccgaagcccccggattttcgcgcagaatgccgcgaagagccttctcggcggcagttttggcaaagccgagcatgaccagcgccgcgagcgcctcttcgagcttttcgccgttgccggcagccggcagggcggtgtcggcttcgcccagtccggtgagcttgccgctcagctcgacgatgattttctgggcggttttcagccccagccccttgacgtttttcagcagcacggcgttgcccgaagtgatgatgccctgcaattcgcgcggcgaataggtcgaaaggatcatccgggcggtattgccgccgacgcccgacacgctgatcagatggcggaagagttcgcgctcggttttggtcgcgaaaccgtagagcagctgcgcatcctcgcgcacgacgtaatggacgtacagacgggccgtctcggtgtgctcgatggccgaaaacgtttcgagcgagatatggaggtaataacctaccccgccggcatctataactgcgtatgcgggagcgacttcggccaccggaccgctgatgtattcatacatggagtcaaaatttacaaggcgtggggcaaaaataaagatttttttttacctttgtgattcaaaagcggaatatttaactaaacccgataaaaaacgacatgaaaaaaatgctttttacggcgcttgttgcggcttgcgccatgacggcctgcggtacgaaaaccactgagacggcggccgccgcagaagaggcgacccgcgaaatcggctcaagcgacatcgcctatgtacaggtggaagccgtgctggctcagtgcgatcttttcctgaacgaaggcaaggccctgcaggagaagacccagaaggcgcagaagagctgggcgcagaaggagcagaaccttcagtccgaagccgcccagttacaggagaagtatcagaagggactgattacgaccaacgacgcgcaggcccagcagcagagcatcgaaaagcgcgtggccgcctaccagtcctcggcgcagaaagaggcgcaggcgctcgacgaagagaacttcgtattcaccaaccgggcgcaggatctgctgcaccgcgccgtgcaggatatcaacgccggcaagaagtacaagctgatcatcaactcgacggccctcatcgacgccgacacgacgctcaacatcacccccgccgtgctggcgaaggtaaacgagctgtatgcggccgaccagaaaaacgtgaagaaataaggaatccgattccgctgcatcgatacgagccgtccccctgcgggacggcttttttcgtgggcgcgcctgcgtaagaaaccgccgaaacatgccagccgggctgcggctgccggcaggccggcagcacatcggcacgacttattgagaccggaccgaggaaaagtccgtatttttttatacatttgcaggaaaactaaaaagcaacgcacacgcaatgggtttcgttccgttcacattcgtcgatttcatagacatcattctggtcgccgtgatcatgtactggatctaccgcatgaccaaaggcaccaacgcgccctatattctctcaggcatcatcgccatctacctgctatgggtcgtcgtgcggacgctcaacatggaactgctctccacaattctgggacagctgatttcggtcggagccattgcgctgatcatcgtcttccagcccgaactgcggcgtttcctgcagatgatcggcatgcgccagaaacatttcaacttcatcacccgcatcttctcgacgggcgacgatgcggtgcagaccaacgtcgtgccgatcgtcacggcctgccgcgagatgtcggagacgaaaaccggcgcgctgatcgtcatcggacagcagagcgacctgcggctgatcgccgagggcggcatcgcactcgacgcaaaggtttcgacgccgctgatccgcaatatcttcttcaagaacgccccgctgcacgacggcgccgcaatcatcgaaggcgaccgcatcgtggccgcgaagtgcatcctgcccgtaacgcagagcgacgtgcccaaatcgtacggcacgcgccaccgcgccgcgatcggcatgagcgagatttcggatgccatcatcgtcgtagtctccgaggagacgggcggcatttcgatcgcgcagggcggcgaactgcgccgcgacatcgacccggtgcggctgcagcagaccctgcagcgctacctgacgatcaacacccgcaaacgttcgaaaaaagaggtggccgagtaaggccgcaggaaaggagggggggggcggcttccttcgggccgcagaagagcggacaatcggacaaacggcagatccgggccgctaaagagcggatcatcggacaggcagttggagccggactgctgttgaaaagcggacgggttccccacaaagcgaaatacggcaggacagaagtcccgaccgaataaaaaaagaggcggacaaatgtccgcggccgggagcggtaaacgcccggcagacaactgcagtcggaagcagccgatccggttccggaaaacacacggcggcggggccggcggcgatgcaaagccgagatccgaacggcattcggaatacggcatcaacattcatcaatccaaaacagaatttgcgagatgatttttccagcacctacaccccggctcgtgctgcgcgcatggcgggaagaagacctcggaacatttacggccatgaacgccgacccgcgcgtgatggagtactttccggcaccgctgacgccggagcagtcggcggaattcatggaacgcatacgcgaggagttctcgaccgagggattcggcctgtacgccgtcgagcggcgcgaggacggcgcgctgctcggatatacgggactgcaccgcgtaacgtttacgggcatgaaggataaaatcgaaataggctggcgccttcgggccgaatgctggaatcagggttatgcgacggaagcggcgcaggcctgcgtagcgctcgccgcaaagctgggcatcgaagagctggtagccttcacgaccgtcacgaacctgcgttcgcagcgggccatgcagaagctcggcatggagcttttgtgcgagttcgaccaccccgccctgcccgaaggccatcccctgcggcggcacgtactctacctgatcgggactgaaaaatagaagcggcgaaacaggagctgccgggaggccggtcccgtcgggcaaccgcaagagcgggcagcccgtccggccatgcaccggaattttatttcgaatagtatttttcaattccgccgaatccccgtatcgtcttattttccttcgtcttgcaaatgaagtggttcagccgcttcccgaactcttcgggacgcgacctcgcagcttcgatataggcaattcggatgcgtttataggtttccggaaaacggaggtagtttctccagaccgtccgatcttccttcagccggtcgattatatcgtccggaaatacaaaaggaacggaaagcaccttctgtatcttctcctcgaatttcgggtgtatcattccattttccaagagccatttaagccgctccctgttggcctgcgagtaagcgctcttggggtttctgggagtgaagcgctgaattttatgctctgcgtcgagcggtcttatcgtgctgtcgatccaatcgaaacaaagggcttcttcaaccgcatcattatatacgatgcttttcttgcccgacgacttatgcgggaatacgaaccatatctcacgggccgtatcgaaattatccgtcagccatctccgccactcctcccggttttcaaaatactttattccactttccgttgtcataataaccgatttatccgccacgggcggttgtcctgctcccaatccgtcgcaggaatacggccgaatacgggaaaaacgaaaagccgtggaaaaatccacggcttgtaaaatatcagacagcacccgcatcggccggaaccccgttcctcgcggccggcactgtccggctgaaacccagcccctattcggccgactgctcggcgggaacttcggcggcgggaatctcggcctgcggcatcgtggcgggagtttccgactcgataacgcgctcctgaagcgccttaacgtccttcgaaatctcgctgttgctctcggcgacaaggcctttgtccatggccagcgtagcgaccagactcagcacgacaatggcaatggccatcgtccacgtgaatttctccaaaaagtccgaagtctcgcgcacgcccatcacttggttcgacgcgccgaagttggcggccatgccgctcttggggttctgcaccaataccgcaaggatgatcaatacgctcgcgatgagtatcagggcaatgcaaatcgtgtataacatatcgttgaattttaattattgttttccaatttgccaattagctcggcaaagtaaacacttttttcgggatttagcaaacttaatttgcgataaatcgctattgctttgtcacaaagcccctgcgcgagatagatttcggccagctcttcgctcacgatctcgtcgtcgtcgtccagctcggcggccgtgcggacctcctcctccggttcgccgtcggccgcgacgatgcgcaggtcgtcctcctgcagaaagcggtcgatgatgtcgtccgacgaaagccgccggacggcctccgcgtcgatcggtcggcgcagcagcgaactctgcgcccgccacggggccgtcacggccagccgcggatcgcatatcccggtcacgatctcccgtgcgatacggaccggagcgaaccattcgtaacgcgccgcgagggcgtccagctccccggcggaagggcactccgctgtagcgggcgatgcgaggtattgtctgaaatccgtcatgccgcgcaggttttaccagttggaggccgaagcctgaaaaatatccgtaaccagtttatcgacgatctgggggatcagctcgccctcgacctcggaaagcagccgcgtggattcgtaatcctcgaaagccgtgaacgtccggttgaacgacattttttcgtcgagcgcattcgtgaagcgcaccttgacggtgatcgaaaggcggttgagcaccgcgtagtcgtcggtcgaaaccgacgaggtcgccgacatgtagttggtgatctcgccctcgaaggcgaagtcgccgccctcctcgacctgcatcaggcgggtgcggcgggtgaacatgtcgaccagcgcatcggtgagcgtcgaactgaggatcggcgcgaccatcgtggcgttgttggggaaataggccacgctgaaggtcttggcgtcgggcggaatcgaagcgcccgaaagcgaatatttgatggccacgccgcagcccgtcagcagggcggcgcaaagagccgtgattgcgaattttatcttcatgccgaaattctatcgttttattccggttcggaaccggttattttcagtgcactccgccggacgatccggggagggccgtcagccgtcagttctcttcgatgcccagctccttgatcttgcggtagagcgtgcgctcggacatgaacagctcggcggcggcttcgcggcggcgtccgttgttgcggcgcagggcgcggatgatctgctcgcgctgcatgtcggccttggtcatctcgcgcggcggctcgtcggtcacctcctcgctctcggcgaagaccgggaccgagcctgctgcatagacgggcgcggagctttgcgccgtggtcggcagcagcgccttgatgtcgcggaccggctcctgacaggggttgtgcagcagctcggacatcatccgcttcaggtcgttgatgtcggcgcgcatgtcgaaaagcaccttgtagagcagttcgcgttcggtggacatcgcatcgtcgaccggcgccccgcccatcatgacgggagcgcccccgccctgcggcggcaggtatttggccagcacgtcgggcgtaatgagacgcgtctgctcgatggccgatatctgttcagcaacgtttttcagctggcggatattgccccgccagtaataatgcatcagcatctcgcgcgccgcgggatcgagcgtcacggcgggcatgcggtactgcacggccacgtcggcggcgaatttgcggaacagcagcggaatgtcctgcggacgctcgcgcagcgccgggacggtgatcggcaccgtgctcaggcggtaatagagatcctcgcggaagcggcccgaagcgatggcctgctgcaaattcatgttcgtggccgcgacgacgcggacgtcggtcttctggaccttcgacgacccgacgcggatgaattcgcccgtctgcagcacgcgcagcaggcgcgcctgcgtcggatgcggcagttcggcgacctcgtcgaggaagatcgttcccccgtcggcctcctcgaagtagcccttgcgggcttcgagcgcaccagtgaaggagcctttctcgtggccgaaaagctccgagtcgatcgtgccttcgggaatggccgcgcagttgacggctatatatttattgtgtttgcgggccgagtaagcgtggatgacctgcgggaaaaactccttgcccacgccgctttcgcccgtgacgagtaccgtcaggtcggtcggagccacgcgcacggcgacctccagcgcccggtccagaagttccgaagcgccgatgatgccgaagcgttgtttgactgtggtgatatccgtcatttattccgtaatgggttgttctggttgtgccgcatcgccggacgccgcggtatgggtgtcggcaggctgttcgaggtactgcatctcggtctcccggtccttcgcctcgcgcagatagccgaacgcgatggccgcgacggcgagggccgcggcgatcagggcgatccagatgaagcggtccgccttgcggcggcgcggaggacggtccacgtaagtataggcgtcggtgtttttgggcggcttgccgtagcgcaggccgcgcaccgaagggtcgggagccatcttggccgaagtcgaaacgcggggttcgtcgatgggtttaccgacgggttccggcttcccgccggccgcaggcgccttgtcggcgattacgggagcagccccggcaatgcgggattcgaagacgaaggcgatggtgccgttgggaccgggcttcatcacgccgaaaccgtcgagccggaattcggcgccgtgctccacggcgtggcgcacctcgaagacgaagcggtcgatctcccccgccgcttccagttcgctcagccccccgccgataagcagacggcggagcgttccgtcgtcacgtttcagaagttccgagaaaacgatgcttacgcccggctccttgacgataaacgtcccaagctggggaacgacgagccgtttgtgcgactccagatattgcgatatggtgtgaatcaacacgattgaaatcttgcttgaaatttgcaccaaaagtaccttttttcgaagaaaaaaccaaaattcgggggagtttttcaaaataatccggcaaagtgttggttatacgaaaaatattcgcctactttgcatcccgttttttcggaaaatccggacgagctacattgcccgaaaatttccgatgtaggcgggacggattgtaaaaaccacgacaaacgagccatgaaagacaagtacatcgacctcatcgaacagacgttcgacttcccgcaggatgagttctcggtcgaagacaacgagctgaatttccacgacattccgctcatggagttgataaaacagtacggcacgccgctcaagataacctatctgccgaagatctcgcagcagatcaaccgggccaagcgtatgttcaacgtggcgatggccaaagtggactacaaggggtcgtacaactattgttactgcaccaagtcgagccacttctcgttcgtgctggaggaggcaatgaagaacgacattcatctcgaaacgtcgtcggcatacgacattcatatcatcaacgcgctctacgacagcggaatcatcgacaaggaccgctacatcatctgcaacggtttcaagcggccgcagtatgtggagaacatcgcccagctggtcaacgacggcttcgtgaacaccattccggtgctcgacaacaaggaggagctggagctgttcgaggattcgttcaccaagaaatgcaaagtcggcatccgcatcgcctgcgaggaggaacccaagttcgagttctacacctcgcgtctgggcatccgctacaacgacatcatcgacttctacaaggccaaactcaagaacagcaagaagttccagctcaagatgctgcacttcttcatcaataccggcatcaaggacacggcctactactggaacgagttgtcgaagtgcatcaacgtctactgcgagctgaaggccatctgccccgaattggacagcctcaacatcggcggcggattcccgatcaagaactcgctcaacttcgagtacgactacgagtacctgaccgaagagatcatcgcccagatcaagaacatctgccagcgcaacgacaccgaagagcctaacatcttcaccgagttcggctccttcacggtgggcgaaagcggcgcatcgctctattcgatcgtcaaccagaagcagcagaacgaccgcgagaactggtacatgatcgactcgtcgttcatcactaccctgcccgacacatggggcatcaaccagcgttacatcatgctggcggtgaacaactgggacaaggagtatcagcgcgtgctgctcggaggactgacctgcgacagcgaggatttctacaacgccgagtcgcacaccaacgccatcttcctgcccaagctcgaaccgggcaacacgcagtacatcggatttttccacacgggagcctatcaggagtcgctgggcggcttcggcggcatccagcactgtctgattcccgcgcccaagcacatcatcatcgaccgtgacaagagcgacaacgagtattacacgcgcctgttcgccaaggagcagtcgtaccgctcgatgctgagaatactcggatattagtccgcacgcgagacgcggcatcaaacaaataatgcccgaccccgttgacaataaatccgaccctttccaacggggccggatttattgttgccgtctgagtcccgttcttccgatccggggttccgccttttatccggccgaaggcgattccagtacgaccgtccgggtaattccgatttcacgggtgaaattgtcgtcgtgggagacgaccagcagggtgccgcggtaattgcggaccgtgcgggtcaggatcgcaaggctcgaaaggtcgaggttgttggtcggctcgtcgaggacaaagagatcggggacgtggttggcgatcatcaggcagcagaggcagagccgcatccgttcgccgccgctcagcgtgtcgcaccgcttgtcccacatctgctgcgcaaacagcgcacggtgaagccgcagtttgagttcgtggtcctgcagattgccgcggttgcagctctgcgccagtttcagcacgctctgcgaggtgttcacccggctgtattgctgatcgagacagacatacgaaaagtccgcccggccgatgcgcccggcagtgggttccagttcgccggtcagcagccggacaagggtcgttttgccggtaccgttgtcgccggtcaggcggatgcgctcgccgctgcggatctccagcgaaagcggttcgcgccacaacgggcggccgggcgcatattcgaaattcaggccgtcggcccggaccagcagtttgccttcgtgaagctgcgcgtcgtcgaaatctatcttcagctcgcactgcgtccgctgccggcggcgcagttcgcccagacgctcccggctgccctcgatctgttccgcatgtttgccgacgagctgcgcctcggtccgttcgccgcagtccttcatcgtccggcgcaggatgcgcggaagctggtccttgtgccgttcgccctgacgcatccgccgctcctgacgctcgcggacctcctgcgcctttttgcgggccagccgcagggccgcccgttcgcaatcgacctgctgggccagcgcctcctcctcgatccgtttgcgttctcggtaaaaatcatagtcgccgccgtagactttcagccccttcgcagaaagttcgcaggtcgtgccgagcaggttgagcagcgcaacgtcgtggctcaccgcgacgatcgtcgcacggctggcacggatcaggtcatagagcctgcggcggcccgacgtgtcgaggtgattggtcggttcgtcgagcagaatgacggaggggttatggaccgaaatccccgccagacagagtttcgtccgctcgccgccgctcagcgcatcgaccgggtcggtcaggccgacatgcggcagtccccaatggtcgagggcggcgcggcagcgggcttcgacgtcccagtcatcggccaaaacgtcgtaacagcggggatcggcagtgccgccgcagattgcgcggagcgcgtcgagtttgtccgcgacgcccaaaacgcaggcggcggagatgccggcggcgacaagctgctggggcacatagtagggatgcgaggagcaggcgatgcttcccgcggcgggagcgagttcgcccgcgataagtttaaggagcgtcgatttgccggcgccgttgtcgcccacgacggcggctttggcgcccgcggcgacggacaggtctattccttcgaacagaaattgctgattgcggtagcggtacgaaacaccgctaaggataatactcatatgaaaacgattaatagcggtcccgcagaaaagggacctgttaaacctcagaccgggttgctttacggcacggcgtcggtttaatgaaaccgacctactaatcgtttattctcatcggagcggatattggttcgggaacaaagatagggacaataatcgaagaaaccaaattaccggcgctccggctccggcaatgcaatcggagcgggcagaatatcgcatcgcaggcgggattttttcgggttatcgctttgcgctccggcaaaaattcgtatcttgtgcggtcaaaacggggataggccattatggattgcacaatacggaaaggactgaccggacttcttgcggggagcatgctctttctgtccggcttcgccagagccggagaggcggcggacgaaaaccgcggctacccggcgacgcaggatgcgacggaaattccggccgttcaggcgggcggaaactccgcagcaagcggtttcgacacaagttccgaaacggacggcaacacccgcacggacagtacggcagcattcccccgccgccgcttcgtccacggtatcgggctggaactccgcccggaatacgtgtgtccgaccaatccgttcctcgcgggcgacaatctggcccggcagccgatcgacctgtcgctggccgcccacctgcgctactcgttccgcttccagcccggatcgcgtcccgaccggatatacggaggcgcctatcagggagtcgggttctcctactacagtttcgaaaaccgggaggagctgggcacgcccgtggcattctatattttccaaggggcgcgcatcgcgcggataagccggcggctgtcattcaactacgaatggaatttcggactgtcgttcggctggaaaccctacgacgcgcagatgaacccggccaacataatgatggggtcgaagataaacgcctacatcaacgccgatttctacctcaacgtgacgctcacgcgcgagctggatttctcggcgggactctcgatgacccacttctcgaacggcaacaccaaatttcccaatgcgggactcaactcgatcggcatgaagttcggcctgctctactgtttcggccgggccgacgatccgctcgtaaaaccgcgcaggccgcttctcgcgcccgatttcccccgccatttcagctacgatctggtgctgttcggatcgtggcgccgcaagggcgtggaggtcggcgacaagcagtacgcttcgcccaacgcctacggcgtggcgggcttcaacttcgcgacgatgtacaacttcggctacaaattccgcgcgggtctctcgctggacggcgtctacgacggcagcgccaacgtctacaccgaagattatatcgtcgaggtcggaggccgcgatcccggctacacgttctacaccccgtcgatcgaccggcagatcgcactgggaatatcgggacgcgccgaattcgtcatgccctacttcacggtcggcatcggactgggagtcaacgtcctgcacaagggcggcgacctcaagtcgttctatcagatgctgacgctcaagatcgccgccacacggcgcacattcgtccacataggctactgcctcaaggatttccagaccccgaactacctgatgctgggcgtcggattccgcttcaacaacaaatacccggtactaaggtaacgcagcccgccgcagcgcccacttgcggcgcaggcgccggaccgccgtgaccagaaatcgcacggggacgacgcacagcgtgcagaaccactgccgcagtcccggaacatggaggtcgggcaggccgaaatcggcgaaccggcggccgcagagcaggggaatataccacactttgatattgattcgaaaatcgttgctgacattgtcctcgtgcacgatttcgagccacttgcccctatcggtggcaaggtagaccgtcggctgctggcggacggctttggtatgacggtaggaaacgatggtttcggagtgcgcatcgaacggctcgacgagcgtcaggaagtggttgttcgtgtagcgcattttgagcgcgaagcgcctgtcggtgaaatactggtaaccgtaaagaaggctgtagatgcgtttgccggccgaggggcggatttcgcgctgaagcagttcgacggcgtcggcggccagtgcgtcgtcgttatcgagattggtagtgatcagcagctgcggagggggggggtgacatgcccttcacgcccggccagcaggtccgaaatcgtggtgcgcagactttcggtcaggcgtccggcctgcccggcgctgtaaaatacggcacggaactgcggacagacggactggtaaccgccgatgcggcggcggtaagccgcgggcgtcgccgcgtcgaaaagacagagccacctgaaattcgggttggtctgcgccgcgaccgaaggcaggcaatagcgttcgaaaacctcgaaacgatgtgcgagccagcgttcggtgcgcgtcggagcgtcgtgtttgtcccgcgcatagaggttcagattgaaccgcgtgatgattaaatgttcgaaacttttcatattgtgtttattgagcggacaaatatacgaaaaatccgcatgcgccggacagggaactgcacggcacatgcggatcggtcggatattccggcccgtcagaccccgaacaggaagacgaagggtttgtcgctcctgcggaattcggccgtggcgtcgcccgtgtaggtccggccgccgaccagcttcaacacccgttcgggcgtgcccttgccgaagtcgatcttcgccagatcgacccggaaggtctccatggccagcgtcggctcgaaatagtagacccggtttttctggtcgcagaccgtgcgccagcgcgtcgaagagatgtggggcttgtcgggcgtcgagataccgtaaggcaccgagacgttgcgcatgaccgacatcacggccgggacggcgatcttaggatcgggactcttcacgacggcgttgatgtagaacgacgcgcgcacgaagcggtccggagcgcggttggtgccgggaagcatcgtcaggccgccgatctgccgccaatagtcgaggatcgccagctgctggtcgtagaagggcgaattggtcatcacctgatactggcggccgtggtgaatcaccagccggccgtcgatgtattcgaagatagcgctgtcgcccgaaggatcggagacggccagatgcaggcgcgactgcacgccgttcggaaggtcgggcgcgtcgatgcggaatttctccttcgagagttcggcgaccgcctcgtccaccgtggcgaaattgtcgagtacgtactgcgtccagatgctcagccccatgacgggccgcgtgtcgcccggccgctcgtaaaccgattcgggcaggaagagcaggttggcgaccagcccggcctcgttcatgccgtcggtgatgccgatgtcgtagcccgcggccgaaagggagccgtatttcgacgtccagaagacggtgtcgtccgtattggctccgcggcgggcggtgccgcgcgggaagatatagaggttggtcagcgggtcttcgcgccagtccatggtgcgtcccgtgacggtcatgccgtcgggaccgagatagacggcgcgcgtgcaggcttccggctctgcgggaaaaacggccagcgcagcggcgccgaacacggtcagaaattgtgttttcataagcatagatgtatttactccgatgcaagatgcaaatcggatgctaaaaggtacgaaaaattaccgggaatagcaacggaaaaagtccgaaaaatctgaatatccggtttttagtctgcatttaccattgccaccggagcctgcgccgcgcggtcacggcggaagggaacaccggacgaggaacgccggacacaacgccggacacaacgccggacacaacgccggacacaacgccggacacaacgccgggccggattatttggcattcaggggaggttgtattacctttgcggaaaatcccgaaaagtcatgaagcaatatttttccgtcgcactggcagttctgttctgcgccctgatgccggcggcctgcacgacgcagaccacggccgtgaaattcatgagttacaacatccgaaacggccgcggagcggacgacgtacaggacctcggccgcatcgccgaggtcatcggccgggtcgcgcccgacgtggtggccctgcaggaggtggacagcgtgacgggacgcatgaacggctgcttcatccccgaaaagctgggccggatgacgggcatgcacgcccgcttctgccgcgcgattgattacgacggcggaggttacggcatcgggctgctgtcgcgcgccgagccgctctcggtgcgccgcatcccgcttccgggacgcgaagaggcgcgcgtgctgctgatggcggaatttcccggctatgtggtctgcgtcacgcatctttcgctcacgcccgaagaccagcgagcatcgctgccgatcatccgtcaagccaccgacacctgccgcaaacccgtgctgctggcgggcgacttcaacatggacgacgccggggaggtgctcggcgggctgggcggcgaattcaggccgctgtcggacaccgcgcagcttacgttcccctcggaccgtccttcgatacgcatcgactacatactgggccgcggcctgccgcagtcggcgaaaatcgccgaacgcacggtggattacaccaccgtcgcctcggaccactgcccgctgtgggtgtcgctcgtctggtaagcgccgcactctccgttccgaaataaaatgttatctttgccgcaaactccgacaacatgcagatcaacaaagccgaattcaagtgcagttccgagcgtatttcgcaggtgcccaaagacgcgctgaaagacatcgccttcatcgggcgcagcaacgtcggcaagtcatcgctcatcaacatgctcaccggacggcaggggctggccaaagtatcgggaacgcccggcaagacacggctcatcaaccacttcctgatcgacaacgcatggtatctggtcgatctgcccggatacggatacgcccgcacgtcgaaaaccaaacgcagcgagttctccaaaatcatcaccgactatgtgctcaagtgcgagaagatgcacttcctgttcgtattggcggacatccggcttgaaccccagaagatcgacctgcagttcatcgaaatgctcggcatgaacggcattccgttcgccgtgatattcaccaaggccgacaaactctcgaaaacgcagcgcgaaaagagcgtcgaacgctaccgggcggcgctcgcggagcagtgggaggagctgccccggatgtttgtctcgtcgagccagcacggcacgggacgcgaggagatactcggttttatcggcgaatgcctgaatgtttaaccgattgttgaaaaaaggtcgtccggagggaacgttttttcgccgcattgtcctatatttgcaccatcaaaaatccatcttctatggctatccacaaaatcaaaattttctcaggtcgcggctcggaatatctggccgagaaaatcgcggcaagtttcggtacgacgctcggacaatcggaagtcctgcgcttcagcgacggtgaattccagccctgctacaacgagtcgatccgcggctgcacggtattcatcatccagtccacgttcccgccctcggacaacctgatggagctgttgatgatgatcgacgccgcacgccgcgcctcggcctacaaggtcgtggccgtgatcccctacttcgggtgggcgcggcaggaccgcaaggaccgtccccgcgtaccgatcggcgccaagctggtagccaacctgctgatggccgcaggcgtggaccgcgtgatgacgatggaccttcacgccgaccagattcagggattcttcgacgttccggtcgatgcgctctacgccagcggcatcttcattccctatatcgaaagcctgaaaatcgaggacctctcgatcgccgctcccgacatgggcggcgccaaacgcgccaacacctacgcaaaactgctcggcaccccgatcatcatttcgcacaaggagcgcgccaaggccaacgtcgtgggcaaaatgaccgccatcggcgaggtcgaggggcgcaacatcctgatcgtagacgacatgatcgacacggcgggcacgatctgcatggccgccgacatgctcatgtcgcgcggggcgaagagcgtccgcgccgccatcacccaccccgtgctttcgggtccggcatacgaacgcatcaatgacagcgcgctggaggaggtgatcgtgacggacaccattccgctcaaccccgacaaggacctgcacaaattcacggtgctgaccatcgccgacatgttcgccgacgtgatcgagcgcgtacacaactacaaggaaatttcgtctatattcttcaaataggaataccccggaagacgaaccggttcgggcgggatgcatggcgacggagattcggccggcgcactgcgacgaagattcggacgaaacgtccattcggagaaggcaatccggcaaaggtgcggttcggcggagattcggccggcgcactgcagcggagattcgaccggcaactccaaagagaagattcggcgtaaatgcgtttcggagccggaacgcatttcgcaaaccgtacagggcggaacgcatcacaaatgcgttccgcttttttcaaccgaaagagggaggtttcggaaattcttattacatttgcgctgaggcggagactccgccccgcaacgaacgaaaaccgataaaacaatgatgttcatccacccgctgtttctgggcaaaatcggcctgacggaaatactggtcatcctgctgatcgtcgtcatcttcttcggcggcaagaaaatacccgaactgatgcgcggcatgggccgcggcgtcagggagttcaaggacgccatggaaaatcccgcggcaggcgacgacaagaacgggaaagagcaggccgcgccgcaggaatcccggaaagaaacccccgaagaaaagaaataagcccgcatgtccggccaaaaacgcagcgacacggacgaaatgacctttgccgagcacatcgacgcgctccggccccatctggtgcgcggtgtgctggcgatactggcgctggccgtggccgcattcctctgcaaagggctgctgatcgacggagtgctgttcggccctatgtcggccggatttccgaccaaccggctgctggtatggatggccggactggcagggatcgaattcgtgccggggatcgagcgcatgcagctcatcaacacggcgatggccgggcagttcaacctgcacctcaaaatctcgatggtcgcggccttctgcatcggattcccttacctgctgtgggagttgtggcgcttcgcgcgtccggcgctcaccgagcgcgaactgcgcggatgccggaggttcgtgttctatgtctcggcgggatttttcgcggggctgctgttcggctacttcataatcgcgccgctgacgatcggattcctgtctcagtacagcgtcagcgagcaggtgaccaacatgatcgacgtcggctcctacctctcgaccgtgctcaacgtctcgatcgcctgcgccgtggtgttccagctgccgctgctggtctatttcctgacccgcatgggactcgtaagccccgatttcctgcgccgctaccgccgccacgccctcgtcgcgctggcgattctctcggcggtcatcaccccgcccgacgtattcagcatgattctggtcctgctgccgttgttcggattgtacgaatacagcatccggatttcggaacgaacactgcggagaagctccggaacggagggagtaacaacggaggagaaatagactccgaacaaacaaaagaggcgtcctgaaaacaggacgccttgtctttcagccgtgccggacatgcaaccgcccggtccatttccgctccatttttcgccggagtccggagctatttcaggggcgaatcgggttctttggacatcaccagatagaacattctgtcgaggaaacccggcgcgaatttcttgacgaaatgggtggcgcgaccctcgctctccatcaggcagagacgcttgcgcttcaggacgccgcgggcgacgatccgagcgacctcggcggaagtcatcatcttggcctcgttacgcggggtttcgccctgcgccgacccgtcggccgtgagggccgagaagcggacgttcgaagccgtgaagccggggcaggcgatcatgacgtgcaggccctttttgagattctcgatgcgcagggtttcgagaaaacccgtcatggcgtatttcgacgccgaatagcccgtccgccccggaagaccgtgcagccccgcgacggacgagatgccgacgatggagccgcgtgaccgctggagatacggaagtgcgaatttgcagcagttgaccgttccccagaagttgacgtccatcaggcggtgaagcacgccgaggtccacgtcgtcgaagatcgcacgcatcgaaagcccggcattgcagaccagcacgtcgattccgccgaactcgttcacggcggtctcgatcaaccggcggcactcgtcgacgttcgtcacatcgacgccgcaataggcggcctgcccgccctgtgagcggatttcgcccgcgatgagctgcagtttctgcacgctgcgcgcacccagcactacccgcgcgccctgcgcggcgaattcgcgcgccatcgcctcgccgatgcccgacgaagcgcccgtcacgatgacgactttatccttaaagtttttcatatcaatcgtttatttcaatttccaaagtatcgtaggccatatgcacatggggcggaagcgtcggctccgtctcggcgtgcaggccgatgtcgtgggacatatgggtcaggtaggcttcgcgcggcgagacacgggcgatcagctccagcgcctcggccacattgaagtgcgaataatgctcggcaaaacggagcgcattgaccaccagcacgtcgagaccggtcagtttttcgacttcggcgtccgcaatggtcttgaagtcggtcaggtaggccagcctgccgatgcggaatcccgtcactgcaaagcgttccgaatggtgtcccgaaacggggaggatttcgacgcctttgacgctgaaaggccgcgtaacgtcgatctcgtgcagttcgatttccggaacgccccggtacttgtcctgcgcgaaggcgtagtcgaaatccttgcgcacgacatcgagggtgcggggagccgcatagaggtcgatgcggtggatcgtcggcgggtaatcgacgaaattgaaggcccgcacgtcgtccagcccgccgatatggtccttatgttcgtgcgtcagcagaatggcgtcgatacggcggacgccggtgcgcagcatctgacagcggaaatcgggtccggcgtcgatgacgatgcgcacgtcccccgcctcgaccatggccgaggtgcgcagacggtcgtcgcgccggtcggacgaagtgcagacccggcagcggcatccgatgacagggacaccctgcgaggtgcccgttcccagaaaggtaagtttcatgcagacaaaaatagtaaaaatatggcgactgcgcacccgcgccggaaagattctccgcacggattttcggataaggcgcaaaaccggatatgaaagaacggagcgtcaaggaggggcggtgcgtgggaagtgggcggagcgtcggccgcagaaaagcggacaaatcgtcagccgagaagaaacgaggaaccgtcagccggagaaagcggacaaatcgtcagcagggaaaagcagacaaatcgtcagcagggaaaagcgggcgaaacattacccaaaaggaagcggaaaaccaaagaaaagcgggcggagcgtcagccggagaaaaggcggagcatagcaccaaacacccctcggcgggaacaggcggcgaaagcgaaaaaagccgcaggaaaaatcctgcggcttttctgcatttccggacagcgggcggaacgcccggcgatcagtaggtctgctcgatattccagacgaaggcccgcgagccttgcagtttggtggcggcgtccatttcacggaaggccgccatcagcggcgcgaccttttcgtcgtcgacgatcgccatgatcgaagcattcatcgagggccacgcatgcgtgccgtaatgcggttcgccgtcgacggagccgcggccctcggtcagcgcccagcgggtgaagccgcggatgccctgctcgtcgaggatggcgttcacacggtcggtaagcgcctgattataggataagaatactgctttcataatcgttttaccttaattaatgcacactcgcctgatgttcggccgagagacgggccagtttctccttctccttgcgctgggaacggttcacgaataccgaatagagcgcaggaatgataaacagggtcagcagggtcgaacaagtcagaccgccgatcacggcgatacccatcggctgccacgtctccgagcctgcgcccgtgccgatcgccagcggcagcatgcccagaatggtcgtgaacgaggtcatcagcacgggacgcagacggctcttgccgccggcgatcacggcgtcgaagacgcccgaaccgcgctcgaccagcaggttcatgtagtccaccatcacgataccgttcttggtcacgatacccaccagcatgatggcgccgatcagggcgatgagcgacagcggcgtggaagtcatccacagcgcgaggaacacgcccgtgaaggcgaacggaatggtgaacatgatgatgaacgggaacagcagcgactcgaactgcgtggccatcacgatatagaccagaatgacgatcaggatgaacagcacgcccaaatcgccgaaggcgtcgccctgatcctcgaccgtgccgcccacttcgaggtccacgccgtcgggggtgtggtattcggagatcagcttttcgacctcggccaccacgtcgcccagcgcgacgccggcgcccagcgtcgattgcaccgagatcacgcgctggcggttctcgcgctcgatcatcggagcggcatactcctcctgcacccggccgacctccttgagtttcacggggcggccctgcgcgttgtaaagcgtgatgttctccacgtcatcgaccgaggtgcggaacggctcgccgtagcgtacgacgatgtcgtattcgtcgccgtcctcgcggtatttcgacgccacgagaccgtcgatccggtttttcacggcctgcgacgcagtggcgctgttcatcccgtaatacgacaggcggtcgcggtcgaagaccacgttgtattcggggcgcaggtcgtcgcgcgaaagtttcacgtcgcgcacacccttcatcccgcgcatcttctccttcaggtcgttggcgatggcgttcgtgacgtccatatcatagccgaagaccttgacattgaccgtcgccgagccgctcatgctgcccgacatgccgcccggcgtcaccgtatactgacgcacttcgggaatccggtcgaggtcttcgcgcagcaggtcggaaacgacgtagatcgaacgctcgcgcccctcgacatccgtcagacgcatgttgtagttgatgatatgcgatccggtggtctgcatcgcggcgaaggcgttgtccgaagagttggctccggccgaagccgacaccagcacgatctcaggatatttcgcatagatgatgctgtctatctgccgggcgatgcgcgccgtatactccacgccgatattctgctccagctcgaccatcgccgaaatacggctgttgtccgaaggcgggaagaactcggtcggcacgcgggtgatcagtcccagcgaaacgacgaaaaggcccatcatcgagaagatcgtgatgcggcggtggcggaccacccagttcaatgaacgggcgtagatgtcgtcgagccattcgagcgcacggtcgatcggcttgtagacgatgccgacgcctttgtagtcgtgtacgcctccgtcgagtttgaggaggtaggccgacatcatcggcgtgagcgagatggccgccgtcgtcgagacgcagaccacgatcgtcacgatccagcccagctcgcggaagaggataccggccatgcccggcaccatcgtcagcggcaggaacacggcgacgaccaccagcgtggtggcgatgaccgacagccacacctcgttggtggcgtagatggcggcctccttgggactcgatccccgctcgatatgggtcgtgatattctccagcaccacgatggcgtcgtcgacgaccataccgatggcgatcgagagcgacgagagcgaaatgatgttcagcgtcgatcccgtggcgaagagatagatgaacgaacagatcagcgagacggggatcgtcatgcagatgatgagcgtcgcccgccagcgtccgaggaagatcatcaccaccagcaccacgaagataaaggcgtacatgatggtctccgagagcgacccgatggcgtcggtgatctcctgcgagccttcgaaaatcaactccatcttcacgtccttgggcagcgtcttctggatttcgggcagacgcttctggatttcgtggacgatattcacggtattggcgcccgactgtttctggaacatcacgcgcacgccgcgctggccgttcacacgttcgtccatggtgaatttttcgagcgtgtcgcggatttcggccacgtcggagagcatcaccgtgcggcccccggcgttcgacaccacgaccttgcgcagctcgtcgctgagtttgaactcgccgtcggccttgatgttgaaggtgttgttgccgatgtcgatcgtgccgctcggaatattgacgttctcggcggcgatgatctggcccagctgctcgaccgtcaggttgtaggcgtcgagcttggcgggatcgacattgacctgcacctcgcgttcgggcgcaccgataacggagacggcgcccacgccgtccacgcggttcagcacgttgaccagcttgtcgtcgagcagtttgttcagggccggatagctctcctcggccgtgacggcgatcatcatcacggggatcatcgaggtcgagaacttgaagatcgtcggatagtcgatgtcgtcgggcagcatggactgcacgcggctcaccacgtcgcggatctcgttggcaccctcattgaggtcggagccgtactcgaactcgacggtaatcatcgacacgttgtcctgcgacttggaggtcagcttcttgaggttgctcaccgtattgaggttgtcctccagcacacgggtgatgttggtctcgatctccgcggcgttggcgccggggtacatcgtgatgaccgaaatctgcggaatctcgatctcaggatactggtccacggccagattcatcaacgagaagagtccgaagaccatcacgccgacgaacagcagcaccgtggagaccggtttgcggaccgcactttcgtaaattttcatatgcgtcggggcgtttaattctgtttgacttcgaccttggcgccgtcgaaaagcttcgacaaagccgtcacggcaacccgctcgcccggagcgacgcccgaaagaatgtccacgcgatcgccgacctgacggcccacctcgacccggcggcgttcggcgacgctgtcacccttgatgacgtagaggaaccgctcggcggtgcccacctgtttctggaccgccacgtcgggcaccatgacgccctctttctcgcccatgttgaatcccgtgcgggcgaacatgcccggacgcagcgtacgcttggcgttgggcaccttcacctcgaccttgaacgtgcgggtcgcgggatcgagcgccggatagatcagcgacacggtgccggggaaggtctcgccgggaaagatgtcgaccttcagatcgacgggcatgccgaccttcacgttgcggaaatactgctccgaaatgttggcgacgaccttcagcggatcgatctgcatgatatgcaggataggctgcgcggcgaacaggtcgcccgactcgtagttgcgggccgtgacgacgcccgtaatgggcgaatggacctcgatattcttcttgaggttggcgaccacttcgcgctgcacgtcgagctgggccttggcctgctcgatctgctgggccgagattccccccgcctcgtagaccggaagcaggcggttgtagtcgtcctcgacggtcttcagctgcacgagctgctgggtgtactgcgtggggtcgagcgtcacgatcagctgaccctgacgcacgggatcgcccacctcgaccagaatccggtcgatatgcacgcccgacgccgcgggcgtgatgtcgttctccttgtaaggttcgatttcggaggtgaactcctcggcaagctgcaccggagcggcgacggccgtctcggttttggtcagcacacgggtctcctgctggacgtcggcggtttttttgcccgtgcagccggcgagggctgcggcggcgatcaacataactgttaaattcttcataggttttatctgtttttcgattttatgctaattctccttgccgacgatgcggtcgtactcggccttggcggtcaggtagtcgaagatcgcctgcgaaaagttcaactcggcctgcgtctgcgccagctgcgcgctgttcagttcgaggatcgtacccgcgcccgcacggtagcgggtgtcggagatgctgtaagccttgcgggcctgcgcgacggtcagctcctgcgcgtacatcgtctcgcgcgcggtgagcaggtcgttcagggccgcgcggacctcgacgtcgatctgctgccgggcatagtcccgctggagacctatctgcgaaatctggttcttgatctcgcgcgacctgttcatcttcgtaaggcccgaaaaaatagggatcgaaacctgcaggccggccgacatcgggtgctgccaccagaatttggaaccgtcgagcacgtcgcccggctgtcctccctccgcgccgccgaaattgagcttcgtcatgtcgatatcgttaccggtataggtcgccgtaaagaatgcggtgaccgtgggcatgcgtccggcgttcgccactttgagctgacgtttgagcaaatcctcctgcagttcgagcgtacgcaggtcggagttatcctgcacgtcggtcgtcaggccgtcggttcccgccagcaccgcgtcgcgcatggcgtccagctctccgacgacttcgatttcgacgttctcagggatcgaaaggtacattttgagcatcagcttggccaagcggatcgaattctcggtctgcaggatcgaaggcttcaggttgctcagctgcacctgcgccgtaagcaggtcgtattccgacgcaagtccgttgtcgtactgcaatctggtgtcgtccacggtgcgctgcacggtggcctgagattcgcggagcacttcgagcgactgctcggccagcaggatgttatagaaggcctttttgacttcggcgaccagcgtaatccgcgacgagcgcgccgactccacggcggcggcccgctgggcgtcgttcatcttcagcgtgcggaacaccgccggggcgaagagcgtccacgtggcgtcgccctgcgccgccagcgtattgtcggctccgaacgaaagccccttggtcatgctctgcttgacgatcgagcgggtataggtgccgccgaccgaaatctggggtatccagctaccccacgtctgccgcttcacatagtcgaagcgctgcacctccatttcggcgaccttgacggtcggattttcgctcagcgccagatcgagggcctcaccgagcgtgagacgcatttgtgccgcagcgccgaaaacgcccgccgccgtaaggcacatggttaaaatcagttttttcataaaatatcccaaattcaatttttatttgccgtacttggtcagttcgtatcttttcaggttgtcgtcgatcatccgcagccccttggccgtcgaaatgccgcggaagaaattgctgattatctgcacgaaggcttcgcgctcggtcattcccgcaggcagcatcagctccttgcgggccaccagcgcggaggccgtgtagtaaagcaccgagatcgccagatcgatattgatgttatcgacgaacaggccgtcgacgataccctgatcgagcatgccgcgcaggctgcgccggttcttttccatgccttcgcgcgtcagtttgtcatggacggcgggatagaatttcttgaggttgtccatcatgcggctggacacctcggccttgtccatcacctgcgccagcaccatgaacatggcttcgaggacgttgcgggcgttggcggtaagttcggtccaacgctgccggtcacgctggaagtagcgctccatcgccagatagagcagcccttccttgtcgccgaacagttcgtacagcgtacgcttcgatacgccgagatgctgtgcgatatcgtccatgcgcacggatttgatgccctgcgtggcgaacatctgcatcgcttggtcgataatgcgttctttctggggaggggtcatgtcttcagtcgttttattcgagacaaatataacaagaaaactcacggaaccaaaaaagttttctgttttttgcagtttttccagccgattatgtcccgaacaagcagaaacggagacaaacagaacaatccggaccgggaagaagggccggaaaggagacgtatcgaataataaaacaggaaaggaaagagattgcaagaggtggcttcgacaaggcaacaaaagagcggcggggttacaagccgacgaaccgagcagctaacggggcgaaaagccaacgtgccgcaaaggcaacagaccgaaaagccaacgggccgagagaccaacggaccgagagactaacggaccgagagactaacgaactgagagggcaacggggcgagaaaccggcgcttcggcgttacggattccggatcaggcagacgtttcgggcaggtcgaacggcacttcgaaaatcatgcggcagcccgacgcatactccggatcgacgaacagacgtccgcccagtttagcggcgataagccggcagatgggcaggccgagtcccgtcccctgcgaaaagggatcgattttcacgaaacgtccgaagacctcttcgtgccgaccggcgggaatgcccggtccggtatcggtcacggcaaaccgcagcagacgctccgcgggcaggcattcgtacgtcagcacgatacgcccggagcgcgtgaatttggcagcgttgcggagcagatgcagcagcacctgctcgatacgcttgaggttggtgcgcaccacgggatcggagaccggaagttcgtccagcaggctcacgccgggatgcagttccggcagggtgctctccacgcagtcgttgcagaggttgttcagcgccgtgacgtcgcagcgaggcaggtcgcccgtctggtcgaggtaggcgacttcgagcacgtcgtcgaaaagccgcagcagggtcgcgctgttggcttcgatgatggaggcatactcgcccgtggcgggcttgtcgcggaattcggacgccaacacctgcgaaaatccgacgatcgaattgaggggcgtgcgcacctcgtgcgacatatgctggataaattcggtcttcatgcggctggcctgctcggcctgctccttggcttcgagaagctcctcgccgctgatccgcagatgctcgttctgggccagcaccgtcgcttcggaggccttgagacgccggttgagcttcatcatgcgcgcatatcccacgccgcccgtcaccagcactcccgccagcaggcagataatcagataggtgttgcgcaggcgtttgcgctggaggtcgtactgcagctccttggtttcgttgtgcaggcggctgatttcgagaattcccgaaaaatcgtccgtcgcagtgcggatttcgcggttgcgcaccgagtccgacagacggatgtattcccggtaattggccgcggcccgctccatctcacgcaggtgccagtagacgtcgccaagctccttggtcagcgcatagttgttgaacccggaagtgcggatcaccgtgtcgcgctgcgtctccagaatcgtctccaacgccttcccgtactggcccgaagccttgaaataggccgttcgcagatagctcagcccggccgtatggaaccgcagcgaggggtcgcggcggaacagctcctccgaagcctccagccgtttcttcgcctccgcgaaattttcagtccggatatagtaaaggccgaagcccttattgacggtaaattcctgataggtggtccgcttgggcagcgatgcggccttctgcagcgcgacgaacgccgaatcgggcatatccagctccagcgcgcactgcgccagcgaagcgtactgcgtcggcaggttgatgtcgtcgatgccgttgtgttcgagcacctcgatctggcggcggaagttgtcgtaagccatccgccacgcgccctgcgtcaggtagaggttggcgagcatccggtagcaggcggcgacgccttcggaataatcgtcctcctcggcttcggcgagcatcttgcgggtctcgtaaatcgccgtattgggttggttctgcttgatataataggtaatcaggcggctcgaccagacgaagtaatagaaatagcgcaggtcctccttgggatgcttgcggcagaattcctgcacgcgccgcacgccttcgaggatttcagcccggtcgttcttgtagtagaaatggtcgagacggacgcaaagcgcgacagtctgcatgcgcacgttgcccgcagcggcagcccgccggaagagcgtatcgcacatggcgggagcctcggcaccggcgcggtgcgctttgcaaagtctgtaataagccgtcaaggcgctgtccgccgcatgcgatgaagcaatctgcatcgtccgttcgcccgcccgcaccgggagggcataggcgcaagcaaaaagcatgcagaccgcaaaagcggcgagagatgacggaatgcgcatgtaaaaagtgactttaagcgctacaaagatagcattttcaaccggagaaccaacagaaaaagtccattttatcgaatttgcaaaaaaaaccgccgcgtaaaattacgcggcggcaaattcggcggaacagcgttccggccatcgggcgatccgtccggaaccgcggaaccgagccgtcctctccgacgtcccgtccggccccgcgaaacggtcccgtcctgttatcgggtgacccgttcgagccagcgtaccatcgacagcatgacgagcatcgacagtccgcaggcggccacgaagacgaaccacgtagcccacatcggggtgtgcagatagagccatccgcccacgaacaacagtgcgttgcccacggccgtggcagccagccagaagccctgcatcagaccctgcatatgcggcggcgcgaccttcgacacgaaagccagtccgagcggcgagatgaacagctcggcgaccgtcaggatgaagtagagtcccaccatcacccacggcgtaaccagaatcgactgcatctcgtcggccttcatgcctgcgagggcggccttgtcgggcagcgccagcgagaagaacatcaggaagaggtaggccgtggcggcaatacccataccgatggcgatcttcatcggcgtcgagacctcgacgttgcgtttgcgcagccagccgaaaaaccacatgatcagcggcgtgagggtaaccacgaagaacgggttgacgctctggaagatttcggcgcccttgatgaccgtgaagcccaagtcgatgttgatgacgtccagattcacgtagtcgcgggcgaagtaggtcagcgaatagccgttctggtggaacgaaacccagaagaagatcaccacgccgaacacggcgaaaagcgcatagatgcgctggcggatctcctgcgccgacatcgtgatctcggcggcggaagccttcccgcccttggcggcagccttctgcgagggatcggggaagcgtttcttgttcgacatgtagatcatcagcgagacgagcatcatcacgatagcggcgatgaaggcgtagtggaaaccgcggttgaaaacgtcgaggtagctgttgcagaaagcgtgcaggtcaccgacgggcgaaccgtcgaggtaggccgaattggcatacgaggtgaggttggcaagcccctcgccggccatgtcctgccctttggcaaggtattcgtggcagagttcgggaagtttggcgttatagtcgaaattattgaccttgagccaccagttgcgcacgccgatggccacgaacggcgcgaagaaaccgccgatgttgatgaacatgtagaagatctggaaacccgactcgcgcttggcgctgaactccttgttgtcgtacatctgccccaccaaggcttggagattgcctttgaaaaggccgttgccgaaggcgatgaccagcagtccgagacaggtcagcgtcaggtagagcggcaggctgggaaccggcgtgggcgtgggaatggcgatcagcaggtaacccagcgacatcaccaccagaccccacatgatggtgcccttgtagttcttggtcttgtcggcgatgataccgccgacaagcgccagcaggtagatcgaagcgtagaatcccgaatagatgtaacccgccgtggcctcgtcgagaccgaacttggcggagatgaacagggtcaggatcgccatcatgatgtagaaaccgaatcgctcgcccatattggccaaagccgcggcgatcagtccttggggttgtcctttcataagttaatttttggtgttagtaataaatgattcgttttttgtttgctgacaaagatagaaaaattttccatatatttgtataaacacaaaaccggttatggaaaaaacgacccgcaggcttccgatcgtcgaacgcgacgagtggctgctccccgcagagcgggagctgaacaaccgtcacgagcggtatatggacaaaatgaacgcaatcgtgcaggcggcggggtcgctcgtcgattacgccaacggctaccgctatttcggctggcagcgcgacgaggtgctcgacggctggtggctgcgcgaatggctgcccggagcgcacgacgtctacgtcttcggcgatttcaacaactggcagcggaccgaaatccgcatgcagcgcgaccgccacggcgtatggagcgccttcttccccacggcgatgtaccgtgacaggctggtgcacggctcgctctacaagctccacgtccatggcgacaacggctggctggaccgcattccggcctacgcgacgcgcgtggtgcaggacgaggcgacgaagaactacacggcgcagttctgggcgccggagccgttcgactggcggggcgacgcattcgacatttcaaaaaacgggaacctgctcatctacgaggcacacgtgggcatggcgcaggagaaggagggcgtcgggacctaccgcgaattcacggagaagatattacctataataaaaaaggacggctacaacgccgtgcagctcatggccatcgccgagcacccctattacgggtcgttcggctatcatgtgtcgagtttcttcgccccggcatcgcgctgcggcacgcccgaagagctgaaggagctggtgcgccgcgcccacgagctggggctgggagtcatcatggacctcgtacacgcccactacgtgaagaacctcaacgaaggcatcaacgagctggacggcacagaccaccactattcgctgcccggaaaggcgggctaccagccctattgggactcgatgctcttcgactacggcaaggacgaggtgcagcatttcctgctttcgaacgtcaaatactggctcgacgaattccatttcgacggctaccgcttcgacggcgtgacctcgatgatctaccaccaccacggctacgtcgatttcgactgccgcgaacgtttcttcgacgcgggggtgaacggcgacgcgctgacctatctgacgctggccaaccggctggtgcacgacttccgcgcgggcgacgtgaccatcgccgaggacgtgtcgggcatgccggggatgtgcattcccgacacggacggaggcatcggcttcgactaccggctggggatggcgattcccgatttctggatcaagcagctcaaggaggtgcccgacgaggagtggaacatctgggagatgtggaacgtgatgaccgaccgcctgcccgaagtgaagacggtggcctacgccgagtcgcacgatcaggcgctggtgggcgacaagacactggcgttcaggctgatggacaaggagatgtatttcaacatggaccgcgcgtcgcagagcgtggtgatcgaccgcggtatggcgctgcacaagatgatccgcctgatgaccatttcgacgggcgggcaggcctacctcaacttcatgggcaacgagttcgggcatcccgaatggatcgacttcccgcgcgagggcaacggctggagctacgcccacgcccggcggcagtggtcgctggccgggaacgggttcctgcgctatgcatggctgggggatttcgacaaggcgatgatcaaactggtgaagcggtacaaggtgctggccgacagctacgcgtggaatctcgtgatggacgaatgcaacaagacgatggcctttgcccacggcgacctgctgttcgtcttcaactggcacccctcggcgtcgattcccgactacgagctgcccgtgcaggcgcccggcaaatacgtgcccctgctctcgaccgacgaacggcgtttcggcgggcaggagcggcaggcgatggacggcgagcacttctcgttcccggcgcaggacggggataacaccgagcggccgcatatccgcatctacaatacttcgcgcacggcgacggtatatctgagaaccgacggacgacaaccctccgccgtggccgggaagtgaacggtccggagaaaggacgaggccgggagcaacagcacggagaggaagcaagaggccgggaggaaaccggaacggaacggcgatggaaaatcctattgcggtaaagggaaacgccgaaaaaacaaggctggaaagcaaaagcacggagaggaaacaaggccgcaaaagccggggaggaacggggctggaagaccgcaaaaaaaacgataacgattaacggcagggaatatccctgccgttaatcgttatcgagcaacacgaatcggcggaagtcagcgcgccccgtcggcgggatagaccacgcccaactggcggcgcacttcatcgatgatctccagcgtcgcaagcgaattggcgtggctgttgaccgccgattccgggcggccctgttcgatcaaatcaatgaactccgcgatttcgtaatagtaacggtcccggtccggctccacaccgaccgattcgccgacagtctccgggccgcggtccgaagcggcgcctcggcgcgggaaacgggtcacacggcgtatgtcgtggatcgtatccagcagcagcgtaccctcctccccttcgatctcggagggcaggcgcgaatcggcgatcttggagtagagcaccgtggcgttcatcccctcgtaacggaagttgacggctccctgaccgtccgcccccgaagagagcacgacaccctgcgcatcgacggcctgcggccgcccgaaaagcgcgaccatcgggtaaaccgtatagacgccgatgtccatcatggcgccgttggaaagcgacggatcgaaggcgttgagcacgacgccctccctgaacttgtcatagcgcgaggagtactggcagtagctggcgaagtagcggcggatcgttcccagacggggaagctgctcgcgcacgatccggaaattgggattgagcgtcgcaatcatggcctccatcagcacgacgccgtatctgcgcgcggcttcgatcatcgcacgggcttcacgcgcattggaggccagcggcttctcgcacagcacatgtttgccgccgctcatgcagaggatgctctgcgacgcatgcagggcgttgggcgaggcgatatagacggcatcgacgagcggactgcgggccatctcttcgagcgaggtgaacgtatgcggaatcccgtgcttcgcggcgaaagcgtcggccgtagcctgattgcgcgaacagatcgccgccgcctcgaagcgcgcatcctgccgggcgccggcaagcacccagtcggcgataaagcccgtgccgaccattccgaaacgaatctttcctttcataccaatgctgtcaatatattgttataaagtacgttcgtaaatccgggactccgcatcccacgggtgatagccctgtccgatatagcggaagccccacttttcgtacagcccggcgtgatcggtgctgaggtagagtttgccgaatccggcgcggcgggcgtcttcggccgcacggtcgagcaacagccgtccgtaggcgtgtccgcgcatatgttcggcgacatagagggcgcagacccacggccacaggtccatgcggctgataaagtcattggcgatcaaccctgcacaaccgaccggctcgccgcccgacatcagcagataccactgcggaagcggacctgcggcgctgacagcgtggcggatgcagtcctcataaagaacgggcggcacttcgggccagcaggccgaaatatagctgatcgcggcatccgcgaattcggggtgctccctgacggagacgattctcatggtcggacggttatttcgccgtgatgcgtttcacggcggcggcgactgcggcatagagcgcaggcaggtccacgcccgccacacggcggttttcgaccacgatgcggccgtcgaccatgaccgtatcgacatccgacgccttgccgcagtagacgatattcgacaccagatcgtgaacgggctgcaaatggggtttctgaaggtccacgacgatcaggtcggccaatgcgccctcgcggaccacgcccagttcgccttcggcgtagcccaaagcgcgggcgccgttgaccgtcgccagcttcagcgcttcataggccggaagcgcgacggggtcgcccgtggcggatttctgcaggaaagccgccgtgcgcacctcttcgaacatgtcgaggtcgttgttggagcaggtgccgtcggtgccgatggtcaccagcgcacccgcggcgcgcagccgctcgacgggcgccacgccgctcgaaatcttcatgttgctctgcgggttgtgcgacacggccacgccgcgcgcggccagcgtcgcaatgtcggtgtcggtcaaatggatgcagtgtgcgccgatggtgcgggcgtcgagcatgcccagcgcatcgaggtgttcgacgggcgtcatgccgtatttctcgcgcacgatgcgcacctcgtcctgcgtctcggcgatatgggtcatcaggtgcagtccgtaccgctcggccgtctctttgccgcgccgcaggttttcgggcgacacggtgtagggcgaatggggcgcgagggcgatccggatccggtcgcagccggcggcgagttccaccgcctgccccacttcgggaagcacctcttcgacgttgctgtcaaaatagttgcagcccagcatcgcgcggatgcccagccgctcggccacttcgacgcagcggttctcgtggtaatacatatccacgaacgaggtcacgccgcccaacagcatctcgacaatgccgagagtcattcccaacgccacgtcgtcggccgtctgccgcgcttcgaacggccagatatagtcgtgaagccactccatcagggcgatatcgtcggcataactgcgctgcagcgtcatggcggcgtggcagtgggtattgacaagccccggcatcacaagccggcccgtgcagtcgatgatccgcgcgtcgggatgcgcggcacggaatgcgtcggcttcggaagcggacgccgtgaccagcgcgatgcggctgcccgcgacgcccacgaaacccgtaaaggttttgggagcgccttcgtccgccgtcatcggcaggatcgttgcgttggaaaaaagaattgccataaatagcgtagttactttattgtagtgtatgtattattcggcccgcggatcgactccgacgggcgttgccgccgccaaaggcggcgtttgcaagtctgttccctgaatcccctcctcggagaagacttcccgcatgcgggcggattgcgggcggaaacttcggccgccccccccgaaaccgtcaagcccccggaaacccgaaaacccggcccccggaaacctgaaaccaccagtccccggaaaggctatcctacttatctttcttatactttatcttcacctccccggtcttgaccttgcggggttccggatcgatcgagttgccctgcacggtgattacgtcgcggccgtccaccgaattcgagtaaatctgaatcaccttgttgaacacgcccggttcgctcttgtggggttcgtagatgatgctgatggttccgctctcgcccggagcgaccggccgtttggagtacgacgccttgagacacgaacacgaggtgatgacgcgcgtcacgaccagcggcaccgtgccgtcgttggtgaaggtgaattcgcgcaccagatcgccgcccttgcggggcacgtcgccgaaatcgtggctcgcgacctccatatgcagatgcgccccctcgatcttcgcgggctgctgggcgcggcccgccgcaaaggtcaggcatccgaaaagtgtcagtaataaaaatcgcattgtctttcgtttcaaaaattactccatacggaaaacataggtgatcgttccgccctgcaccgccgcgcggctctcggtaaagcgcgccttgcgcgccgcggctttggcggcttcgaccagttcggcggcgtcggtggtcgagcctttcggttcgtaggccgcactcgtgacccgtcccgaagcatcgaccgtcacgcggacgatcaccttgccgctcttcgaaccggggtacgaaggtttgggcaggtcgcccaccagtccgcgcccctgcaagccctgatccagctggtccagcccgtcgggattgagtcccggaccggtgccgctggccttgtcctcgccttcgggagcgcggggattgcccgcgttgtcaggttcgtcggcgccgcccttgttcatgttgaacagcgcgcggggattgggcgtctgcgtcgtctcgtccttgccggagacctgcgccgtctgctcgacgggagccgtgcggtcgtgcacgcgcggctcggtggccgtcctgacgcgcggcttgggcggttcgggcgcaggcggctcggtgaagtcgatcgtgatcgtatcgcccggcttgtcgtggatctgccggaagtcgaacgagaccagcgcgaacgaaccgatcagcagcagcgcgtagaccgccgtcgcaaccgtcgcccacctgcggggattcctgttatttggatcgtaataatacataaaacctgattttggcgacggctgccgccgccggacggcgtccgtcaattcggcgccgtcgccagaattaacttgtaattgttgtccttggcgatattcatcaccttgaccgtctcgcccacggctaccgtctcgtcgcagtgcagcgacacggtggcgtccttctgtccgtcgagacgcgtcttgagcgcacgctccacgccctcgatcgagccgacctcctgcagttcgacgtaatagcggtacttgccgtggcccgcatcctgtatcgaaaccgtggtcatcgccttgtccttaagctggttggagcttttcggcagcatcagcttcagggcgttgggattgatcagcgtcgtagcgatcagcagaaacagcagcagcaggaacatcaggtcggtcatcgacgatgccgagaaggacttatcgaccttcgatccgtgtttaattgccatagcgcgttatttttgaacgggttgattcagaatgtccatgaatgcgatcgagttggcctccatctggaaaaccagcttctcgatgcgcgcaacgaggtagttgtagccgaagtaggcgggaatgccgacgataagacccatcacggtggtcaccatcgccacatacataccgctcgaaagcagtcccagatccaccgtgccgcctgcggccgacatgtccatgaaggtctgcaccataccgagcaccgtacccagaaaaccgatcatcggggcgccgccggcgatcgtcgccagaaacggcaggccgttttcaagcttcgagacttcgaggttggcgacgttctcgatggccgtctgcacgtcgctcatcgggcgtccgatgcgctcgatgcccttctcgatcatgcgggcgatcggcgtgtcggtcttcttgcacagattcacggccgtctggatcttgccgtcggaaatgtagtcgcggatgcggttcatgaagttcatgtccaacaccgaagccttgcggatagccatgaaacgctccacgaagataaagatcgtcaccccgcccagcgccagcagcggccacatcagccaaccgcccttggtaaacagcgtccacaatcccatacgggtctcctcactggtggccaccgcctcggcagcctgcaaaaaagtcatcatagtgttttagaaattatagaagtttgtcattgaattttttctgtttccggttccggccgatccgtttcacggcgcgggcgcatccttttcatgtttaacgtatcggaacgcctgcagcgtatccgccgccgcacgtcgaagctccttttcccggcgtgcggcctcgcggcgcgcttcgcgccgggccttgcgcttcttgttggtgaaacgctcccggatgcgtcgccgcaggtcgcggaagttgtcgaaatcctccttgaagtagatgccgacaccggtctcctgaagaccctgattctcgtcgaaacggtcgatggtctgcgtaaaggccttggccttgagcgttcccgcccggtcgatcaggtaggtgatgtaggcttcgcccatgaagttggacatcgagctgttgatggcctgtttgttgtcgatcaggtagttgccctcgacctcgacgaacagacggttgtttatcaggctcttcgaaaggccgaaatccacttcgtcgctggtcagctccgacttggggcggtagcggatgacgatgttgtagtcgtcgttcgagagcaggttgctgaccatgttcgagaggaactccagccccgtcgcggccgaaaccgacgcgccgatgttcgacgaggcggcgttgttctcggacatgaagctattgaacagcagcaggtaggcgaactgcgtatcgaccgtctcaggggtggtcagcgcattggcgaccacggcctgcgtctcagggtcggtgccgggcacgttcacgtcgaaggtgatggccgggttcgaaagccggtcgccgaggtggatgatgcactcgacgggcaccgagcggtcggccgtcacgttttcggccgtgccctgcagcagcggctgcagcgaggctttcaacttgtagatggcgtcgatattgagcatggcgtccatcggcgaaccggtccactggatcgtcgagccgttttcgatgatgaacttcttgttgatgatgttctggagcgagaaaaggaagctcccttcggtgatggtatagtcgccgtacatctcgaagacgttcgagcggggattgatctgcaggttgagcgttccgtctccgcggcccttgagcgtattgcccgacacgctcagctcgacctcgacgccgggacggacgttgagcgccagcgcgatgtccatctggctgccggcgacggttttctgctggcgccggcgttcgaacatcatcttccggcgcgccagattatcgaccgtgtcggccttgggcttctccttgaaggtcacgaaatcggcgtacgagatattggatttgttcgacagcggcatgaagaacgacgaatggtcgtcggtggaggcggcgatgtccatattgacggcgcccttgtcgcccgaaatgcgcgccgtgcccgaagcgtagaccttgccgtagaagaaatcgttgtcctgcgccgtggtgttgagcaccagcatctgctggggtgcgacacgcacgtcgtaggcgatgttggagaggtgctgcaggctcaggtctatgtcgaagcggccccggttgccttcggggtcgaagaccggaacgttcgacgcgcggaagcggttgccccgcacgtcgagcacggcttcgggcatcgaataggccacctgcgtaaaatcgaccttcgtcgagagtcccctaacgtgaatccggcccgtcaggtcggcgtcccggcgctggccctgcagcaccagttcggccgaggcgaggccctcggtctgggaaatcacgcccgaaagcaccgggtcgagcagccccatgtcgagactgtcaatgtccagccgggcgtagtagcgcacctgcgaaggggcgtagaagccccggataagcgtatcgcgcttgttgcggtcggtgacggtcaccccggcgcggttgcgcgagaaatcccagcgcgaagagagcctcagcggaggagccggaatgtcgttgacctccagactgtcaagcaggatgtcggcggagatttcgcccccatggagcacggatttcatcgtcgcggcaccgttggtacgcccctcgacgacgtatcccatgcgctcggcgacctgcatgaagggcgcgaggtcgaagttgcgcaggcgcagcgtcaccgaatcctcgcggctgcgcgaggcgacgccgtccagcagcagctcctgctcgcggttcatcacgaaaaaccggtcgatcacgacctgcgccgtgtcgagctgtatcttgcgggcgtaaatctgccacgtcttcgaaccgcgggtgacgtgcgaaggcaggatgcgcaggtccacgacgcggccgttgggtccgtgttcgtccaccacgtgcgcctgcacgcccagcagtcccgacaccttgcgcagcgtatcgttgaaacccgcagaaacctgcatgcggccctgtttggcgccgcccgtgagcgacagctgcggcaggtgcagcaccccggcgtagagatcctcggccgaagcgtagaccgtgagcgagtcgccccggttggaggcgttgatgctcaggcgtgtggccagcatgcgtttgcgctcgacgtattccgacgtcgccttgagcgaaagctggtcgctggccgggttgaaaagcagctgcatcgacgacccgtcggcgatctgcaggccggccgtgatggcgtcggtgatggggtctatgtgacggatattgaccgacagcagcgaatagtcgttggccacggccgtcttgcggccgcggggcgtcgggtcgccctcgccgcggcgcagcaggggcaggtatttccatgcgctgcggcgcaggtattcgaagacttcgcggtagctggtcttgctgcggaacgtggcgtcggcgaagtccgagcgcagttcgacgagtttgctccgcgccgagttctcgcccgtgacggtcatggtcttcgaggtgatccgcttgtcgttgtagcggtagacggcgtcggtgacgtggatgcggccgttcaggtcgtccagcgagcgccccccggcattggcctcgatacgcgccgcgagctgcgagacggagtcgcggcggttgatatggagccgggcgaggtcggcatggcgcaggtccatcgtgaagtcgtagcgcggaatcgagtcgttgaagtcgaccagccccgaaaaatcgaaatcgaggttgggatcgcgggccgtgacgcgaccgtcgaactggcggttgcgcaggcggccgtcgagccgcagcgagtcgtagatatagtcgttgaagcccagctgcgtgacgttgcccacgacgttggcgtcggtatagcctttgccgaccactccgtcgacataggccgtgagggtcgcgttgcccaacaggtcgcggcggccgagcagctcgcccagacgcaggttgtgcgtctccacgtcgccccgcacgctgctgcgccccgccttgagcggcgtcatccgcaggttgcaggtcacctcgcccacgccggtcgaggcgccgagctgcatgtcgaacgacgaaagcagccccttgaagcgagcgttgatgtcgatctgccccgtgttgcccagtatgccgaccagcttgtcggacaactcgcggccgccgatccccgcagccagttcgtcgacggcttcggcggaggatttgagccgcggaacgttcaggtcgaaacgggtctgccggatgtcgggaagcccccggaccgaagcgtcggcgatgagccacgtaccctcgccgatctgcatgcttttgaccttggccgtgaaatcggcgaccacgcccgcgacctcgacattgacgttgctgaaatcggtatgccagccgcgcagcttgggggcgaaataggcgatgtcgtccgtcgagacggtcgtattgcgcagcgcgccgtcgatgcgcacctcgccgatgaagtccttgtactcggcccacgaatcgcccgccagcgagatgtagggaatctggacgttcgaacggcctgtcacgaccgaaacgtcctcgaaacccatgcagccgttggtcaggtagaaccgcccggcgaagcggtcgagggcgaagccgctgcgctcgcgcgccgagagggtttcgatggtggtgtagatggactgcccgtcgatggtgaagtcattcacatatgccgtgatgccgtagaggtgcatatggctgaagtcgatgccgaactccgggtcgcggcggtcgagccgttccagacagaggtccatattctcgatcgacgccttgcgcagtgacaggcggaagttgcctttcttgggtttgtcggggttgctgatacgattgacgatctgcttgatgttcatctccccgccgggcgtctcgcgcaggtagagcttggcgtcggcgatctcgccgcggctcagcgaaagacccccgccgaagatgcccagtccggtgacgaaggcgtcgagacggcccacgtagagcagcgtgtcgcgctggtaatcctcgacatagaaacccttgatcttgacccggctgaaaagcccgatgtccacgcggtcgatgctgacggtggtttcgagcttcttcgacgccatgcgcacggctttctgcaccacgtagttctgcacggccggaatgtcgagcagcaacgagagcgccagaggcagaattatcagcaacaatacagcggccgataacacctttcccaatatttttatacctttgcgcattgataggtcgttataacctgcaaatttaactataattagttaaaaaaacgaaaaaccgcatggatattactattctgggcatcgaatcctcgtgcgacgacacatccgccgccgtgatacgcaacaacgtgctgctgtcgaacgtcatcgcctcgcaggccgtccacatcaaatacggcggcgtgatccccgaactggcttcgcgggcgcaccagcagaacatcattcccgtggtggacacggcgctcaaggaggccggactgacgcccgaagagatcgacgccatcgccttcacgcgcggccccggactgctaggttcgctgctggtgggcgtatcgttcgccaaggggctttccatcgcgcacaatatcccgatggtcgaggtcaatcaccttcagggacacatactttcgcatttcatcgaccttcaggaccgcgcgctgccgcaccccggattcccgttcctctgcctgctcgtgagcggcggccacacgcagatcgtgcgcgtggattctcccctcgaaatggagatcatcggcacgaccatcgacgacgccgcgggcgaagccttcgacaagtgtgccaaagtgatgggactgccctaccccggcggcccggtgatcgacaaactggccaaggagggcgatccgaaggcgttcaggttcgcacggccccacgtagacggatacgactactcgttttcggggctaaaaacctcgttcctctacacgctgcgcgacgccgtggccaacgatcccggtttcatcgagaacaacaaggcctcgctctgcgcttcgctgcagaggacgatcgtcgaaatcctgctggacaagctggtgcgggcgtccaaggacctcggcatccgcgacatcgccatcgcgggcggcgtttcggccaactcaggactgcgcaacgggatcgtcgaagagggccgcaggcgcggctggcgcacgttcctgcccgaattcaagttcacgacggacaacgccgcgatgatcgccatggcgggttactaccgctaccagcacggcgacttctcgtcgctcggcgtctcgcccgtggcgcggctgcaggagctgtaggagccggacgcgaaaacggcagaaaccggacgccgaagccgcatgagccggatgcagccggccacaaaaaagcccccggccgaacggccgggagcaggtccggaagcggcggaaaaacactccgcacttccgcaaaagcgatctatgttagaatgcaaggatcggacgggcgtagcagtcggcattataccaattggccatacactcgatcattccgtcagtgccgatctcaataaggcaggccgactcgtcgtcgtagggcgtagaagcccacagcgagcagaatttatgtttttcgtcgtcgatttcaagcacatccttgtctgcgtcgggaatttcagacatcacggaattgatacgggccagcgcatcgtagccgaccttctcggagcaataccacgtggcatcgcgtccgagcgtctgccaccctttcatgataacagccacatcgtgtccgcagaaattggcaatcatatcccaaagctggccggtactgggcaggaaccagccgctcgacgaagcgggagccgcaagcgggaagctgttcagcgtccaatcgaaggcgggcatcaagttgatattgtccccgtaagtggcaagtacggtcatcgtatcgtcgtaaccgttgagatgtccgtaccacgtagaagcgagtttggcgcctttcaggcaggagaattccatatcgcccgaccaccatgtggtcgttttgtcgggtccgtgggcgtttttaagagccatcacatacccgtgcgtatagcccttctccttgtcgccggcggcgatccggttttcgtccgtctggcagacgatgccgataacggtcttaccggcaacgggagcgggtttggtgtcggcccagacgggattcagtccgtcggcctcgatgcttaccagtccgccgtcgctccacgtaccgtcggaatagtaatagtcgccgatcttcggcgcaacgtaagccaccgtcaccttgcaggtcgccttgctctcgcctacgctggcagtgatagtggcctcaccggcggcaagagcggtgaccacaccgtcctcgaccttcgcaaccacctcgtcgtcagtagaccaagcaaccgtcacgccatcctgcagggggggggtaacggtcgccacgagcgtttcggaaaacccgacattgagattcagctccgtacggtcgagcgtcacgaccgtttcggggaccttcttctcatcgtcgtcgcaggcgaaaaacgccagcgatgcagccatcagcaaagctgatttccttaaaaagtttctcataaaccaagttttaagaattaataatacggcagtaccgacagcagtctctccggactcacgacaaaaagcccagtaatgttttcgatgatcgtccggcaaaacaccatcaataacctaaccgggagtcaaatataataaaaaatcaacccggtggaacgcggacgccgaaaaaaattcaccgccaaataaaaagcccctaataaattaggggctgaaaagacaggcgtccgggaacgcctgccgaaatattatcccgcaaaccgggagggggcttatcttgcgccgaagagtttttccttcagcgaaaagttatcgtactcttcccggagcgcagccatcaggtcgcgcaccgactgaatcttctcggcgcgccatgcattggcgccgcagaaggcgtagccgttctgcagcttgcctttgaatgcgttgtagagcgccagcatgatgcagtagggactgtgcgtcacgtcgcaggtcttgatgcagtcgaacgggcagttcttggggcgtttaagcccctctttcacccggtcgaggaacgagctgtggatcgcccgccccggcatgccgacgggacttttgatgatctcgatgtcctgcggtctggcgtcgagataggtctgcttgaaggccggatcggcatcgcactcctcggtggtcacgaagcgcgtgcccatctgcacgccgtcggcgcccagctgcatgatgcggtagatatcctcgccggtatagatgccgccgcccgcgatgacgggaatatggcagtcgtgttcggcaccgaaagcgcgcacctcggcgacgatttcgggaacgagggcttcgagcgaaaaatgctcgtcggcgagctgctcctccttgtatccgaggtgaccgcccgccttgggaccttcgacgacgatggcgtcggggatgtacttgtactccgagaaccacttctgacacaacagtttcgccgcacgcgccgacgacacgatcggggccagcttggtcttggcgccctccgtgaggaacgacggcaggttgagcggcagcccggcgcccgaaaagatgatgtcggccttctcggcgacagcggtcttcaccatgtcggcgaagttcgacatggcgaccatgacgtttacgccgacgatgccccgcgtggcttcgcgggccttgcgaagctcctccttaagcccccagatcgaggcggcgcggtagtctttcgaatagttgttgtagatggctccgagacctgccgacgaaatgacgccgacgccgccctgattggcgacggccgaagccagtccggagagggatatgcctacgcccatgccgccctgcacgatggggacggtggcgagcaaatttccgattttcaatgctttcatgttaaattgggattagtgcgaactaaataaccatggggccaaaggtacgaaaaatcggggcgattggttccgcacgggaagataatttaacgcaggcttcacattgcgccgccgcagcggctgccttttcggggcgggaagccgcggccggccggctgtccggaagtgaaaagcggcattttttacaggcaaaaaaacggcggatatcgcttttttttctaacttggaagcgcaaacgtcactcaaccgctaacctttaaatcgacaagcatgaaaaaacttctctttccggctctggcccttatgctgtgtattccgaccctctccgcccaaagcaggggtgacaaatatgtcggcggaataatcggcataacgacgacgtcgatcagcatcgacggctcctccgcatcgcagacgacattcggatttgcacccgaattcggttatttcgcatccgaccgactgcgcgtcggcggctcgatcggctaccaactgatttcatccgacggcgaaacgacgcacgggctgacggcaggtcccagcctcgcctattacgtcagactgtgcgaccgcttctactacacgccgcagctggccgtgggattcgcgttcgcatcgacggacgggaccagcggatacggcttcgatgcaggattgtcgctcggagcgttcgaaatcaggccgtcggcccatatcggactatcagtcagccttctgacgttggactacagctacctgtcatattcgggaacgggtgtgaacggggtctctttccagctcggaatcagcccgacggtcggtttcaaatactacttttaggccgcaaaaacccgatcccgacctacagaaaccgcacgccccgcacgcggctccggctgcggtcggcagcttcgcgttcgacgatgcccgtcaccacgtcggcggcatcgtgccagcggttggcgcggaaacggcggcggtaggtggtcaggtgggcgtagagttcgggccagcggaaattccagccccgcggccaccgcaggaggtgaagcgcagtggccgaattggagaggatgcgggcctccttgttgcctccctgatgaaaccattcgatgcgcacgccgggcgagagcgactgcacggcgcgggcgaagccgcggccgccgttgttgctctcgacggccgcctgccgcgtgtcggagcgcagcagcatctcggcgaccagcggttcggagacctccatcggttcgcgcgtatagacggcgtcggtgatgtagatcgccccgtcggcatcgaccgcgtacgagagcgaacagaggtagtcgtcgcccgtatcggccgtgtcggtatagttgccgcggcggacgatctcgtgcggcaggtcgtcgtactcggcgaaattcagcccgtataaaagcccctcgcgcgaggagggatgcccctgatacatgctttcgaactgcagcggatcgagccgccgcttggcttcgagcagggcgcggccctgctgctgctcccacaacgcctcgcccggcatgcgcgggtcgattccggtcggcggcgaggatttgagcgcttcgaagttcaggtgcagccacgtgtcggcggacaggccgtcgagctgcgcccactccttcagctccgcgaccggttcgcgggccatgagcgtgccgatcaggtcctcttcgtgccagcgggtgaagacgatcagctcacgcgaagcattgtgcatgcgggtgcggaccaccgacgtataccactcccagcagttggcgcggatgagcggcgaattggcttcgagggcgtccttgtagaggtcgtcgaggataaaacaatcgacgcggttgcccgtgagcgaaccttcgcggcccaccgaaagcaggccgccccggcagccgatgatttcgacctcgtcggccgtgcggatatagctgggcggcttggaaccctgcttgatggtcgtcgcagggaagaacgcggcgtattcgcgcgactcgatgatacgctggacacggcggttgaatttcgacgccagcgccccggaataggaggcgatcgccacgcgctgatcggggtccagccccagcacataggccggaagcagggtcgtggcgccgacgcttttgccgtgctggggcggcatggtgacgatcagccgccggacacggcccgcggcgaaagcttcgagcacgcggtaataggcccggtggaaaggctgcaactccagaaagggatagactccgagggcgaaccgctcgaacggaggaaggtcggccgggccggaaactgccgaggtgacgccggaaagcgaggaaaaggaggcagaagcagagtgagcagaatcggacagagcagaaccggaaggagcgaaatccaacggcgcagaatcgggaagaacggaatcagacggcgcaaaaccggacgaagcggaaccggtgccgcaaccacgtgagccgcaagcaccggaagccaaaacatcggaaccggggagaagttcgccggggagcagatcaccggggagcagatcaccgggaagtgatgcaccggaaagcggatcgccggaaagcggatcacggagcaaaaattcgccggcgagagaattcgcaggataatccggagcaagaatgccggccggaacaaaaacctctgcggaatcagcttccgcagaggacaatttggatttcaagaccatttgtagaaattttgaacccatgcgcggcgccgcggcgggaggttcgaagagaaaaagagcgttccggcgggctgcgccgcgccaaggaagggtaaatgccggaacgaacgaggcggggagccggagggcgcacggcctgcggccggggagcggcccgatgcaaagcggggatcgggcggttgcgcacaccggcggcaggacatgcccacggcagggatcagacaaagcgcttcatctcggaaaaatcgaaatcgttcagcatttcgccctccgccgagaaggtgtgaaactcccaccatacgggcacgaggtccgaaacaggctccgcatcgccttcgggctgcgagagccgcgtccggtagacgatgaccgacgccgtaaaacggcagtccgtatcgccgaaacggaatgcgagcgatcccgaaaagtagttttccccgtcgacagcatccgccaaacgcgccgccacctcttgataaagttcaggtgaaaccgaatacatagttgataattagcaggatttttgcaaaataatttgcatgtacaaataaattgtttaactttacagcacaaatataggttcaaaatttgaatttccaatcgaaaaatacaattttttgatataaaattttccgattaaaagctatgaacacgcgggtaaaattgatacgaaaacagctgggcatgacgcaagaacaattggctcagcatcttggcatcggcaaagcggccctttcgatgatcgaaacggggaaagccggactctcggcccggaaccgcaacatattggttcaggaattgaacgtaaaccccgaatggctggagagcggcaaaggcaacatgttcaacgccgaacccgacctgacggcctacagactccgcacggacaattcgctgccgctgcagagcgtgccgctctactcgatcgaggggacggcgggactggtgccgctgttcacggatcaggcgcaggccaaacccgtgaacttcatccacatccccaacctgccgaaatgcgacggcgcgatatatatagtgggcgactcgatgtatccgctgctcaaaagcggcgacatcgtgctgtacaagcaactgggcaacatcgacgacatattctggggcgacatgtacctgctgtcgatcgacatcgacggcgaagagtacgtcacggtgaaatacatccagaaatccgaccgcgagggttacgtcaaactcgtcagccagaatccccaccacgccgacaaggaggttgcgctcagccgcatccgcgcgatcgcgctggtcaaggcgagcatccgaatgaattcgatccgataacggcggcccgccggccggcaccgaaggcccgcaaaaaattcacgccgtaaaaatccgaggggagaggcattcgtgtgggtggggccgggaaaggaccgggcaggaatcagagaagaatcgaggcagatccgggagaagccgggacaggctccgaaaaggccggagccgaaagttcggaacgggaacgatgaggaaatgcggaagcaccgcaaaaaaggcagcgaaacggcagctgaaaaacagaacaaacagaacaaaacaagccgaaaagaccggaacggtccggccggagcaacaatctgaggaaaaaattcgtatcttgccggaaacaaagacgacccaatatggaactctccgataaaaaattcgcggtgctgatcgatgcggacaatatctcacaccggaaaatcaaagacatactcgacgaaatagccaattacggaacgccgacgatcaagcggatctacggcgacttcaccgatccgaaattcgcggcatggaaaagcatactgctggaaaactcgatcaccccgatccaacagtacgcctacaccacaggcaagaacgcaacggactcggcgctgataatcgacgcgatggacatcctgcacaaggagtcggtcaacggcttctgcatcgtatcgagcgacagcgactatacgcgtctggcaagccgcatccgcgaatcgggccgcgaggtgctgggcttcggcgaaaagaaaacgccgaaaccgttcatcaaatcgtgcgacaaattcatctacgtcgagattctcggacagcctgccgctccgacgccggcacttgcgcctgcaccgggtcccgctccggctgcgacacagacaccggcagcgaaagccgcacaaaaaaagacatccgccaaaagacgtcagacgtctgacacgcaggcccccggaacgccggaagccgccgcaggcaaaaaaaccgctccggctccgggacagactccgggtgtggttcccgcttcggagcagcctcaggttacggctcagtcccagatgcaggacccggctcagtcccagtcgatcatccgtccgatagacgacgatttcaaagacctgctcgccaataccatagaagacgccgccgacgacagcggctgggcattcctcggcatcgtcggcagtgtcctgaccaagaaaatgcccgatttcgacccccgcaactacggctacaaaaaactttcgctgctggtgaaagccctctccgaggcaatcgaaaccgaagaacgactgtctgcaaacaaagagcagaagttcatttacgtccggaacagaacaaggtaaacgctccggtcgccgaccacccgtccggcggaaggataccccctcaaacccagccgcacaattacgcggcaaaaagaagctgcgggattttccgccggccggaaccgttccgcccctgccatgaccataatacgcaaaccgccgggcaaagcagcccggcggtccgagtatcgaaacaaatcaacagtccaacgcgacagcaagcgccttcgcatgattcatacggatcacgccttcccgttcttcgacactggacggcggcattccaaaaaaatttaaaaaactccccgctttcggattcgtgcagaaacgggcgttttccgaacgaaacaaaagccggaatacgccgaatccgcacatattatcaccgaaaaaccgaaacgccccgcaaaaaagccgcaggaaagccccgaaaaaagtcgtctccggggaacaaactgacaataaatttatatatttgcaatattgtttttctaaaccctactaatccgaaacaagacatggagaaaaccaatgtacgggagttgcaggatgtcgtgattcgcttctcaggagactcaggagacggcatgcagctcacgggtacgctcttttcagacacttcggccctgctcggaaacggcatctcgacctttccggactaccccgccgaaattcgtgcgccgcagggaaccgtggccggcgtatcgggatttcaggtacacttcggcagtcaccgcgaactcaaccccggcgactactgcgacgtgctcgtagccatgaaccccgcagcgctcaaggccaaccgcaaatggctcaagcagggcgcgacggtgatcatcgacggcgattcgatcaccgaagagcatctcaggaaagcgggattcgccacgctcgacccgatcgcggagcttgaactgaacgaatacaacgtcgtcatccccgacatcacgtcgatgacgcgcgaagcgctcaaggagaccggactggacaacaaggccgtggtcaagtgcaagaacatgttcgcgctgggcatctgcttctacctcttcgaccgccccgaagcgtacgcatacaaatatctggagaccaaattcgcacggaaaaatccggtcgtggcccaagccaacaagctggcgatcgacgcgggctataactatgcggccaacacccatcagttcgccaacacctacaccgtagccccggcgccgctcgaaaagggcacctaccgcaccgtcaacggcaacgtggcgacggcatggggcctgtgcgccgccgccgagaaagccgggctgccgctcttctgcggttcgtatccgatcactccggcgacggtcatcctcgaagagcttgccaagcgcaaggacctcggcgtgaagaccgtgcaggccgaagacgagatagcgggcatctgcaccgccatcggcgcggcgttcgccggcaacttcgccgtgacgaccacgtcgggtcccggactctcgctcaagagcgaagcgctgggactggccgtaatgaccgaactgccgctggtggtcgtggacgtacagcgcggaggcccctcaacgggtctgccgaccaaaaccgagcagagcgacctctcgcaggccctttacggccgcaacggagagtgtccggtgatcgtcgtggcggcatcgtcgcccagcgactgtttccactatgcgttcgaggcaggacggctggcgatggagcacatgacgcccgtgatcctgctcaccgacggcttcatcgccaacggctcggagccgtggcgcattccctcgatgaaggactacccggcgatccagccgccgatcgtagacgatgcgcccgaaggcggattcatgccctacgtgcgcgacgaaaagctggcccgcggctgggcgttccccggcaaggtagggctggagcaccgcgtgggcggtctggaaaaagactgcgtaaagggctgcatctcgcacgatccggccaaccaccagaagatggtctcgacgcgcgccgcgaaggtggccaaagccgcggacgacattcccgcacaaaccgtatggggcgacccggaaggcgacctgctcgtcgtgggatggggcggaacgcgcggacacctgcagaacgccgtcgatcagatgcgcgtcgaaggcaaacgcgtgtcgctcgcacatttcaactacatcaacccgctgccgcacggcgtgcgcgacatcttcgcgaaattccgccggatcgtcgtctgcgagctgaacgaaggtcagttcgccaactacctgcgccaaaacctgcaggagttccgctacgaacagtacaacaaatgcgagggcctgccctttacggtcgtagaactgaaagaaaaattcgaatccttattgaagtaacgccatggcagaatacaaatacaccccagcggatttcaaaagcgatcaggaggtacgctggtgccccggatgcggcgaccacgccatcctcaacgccgtgcagcgcgcgctgcccgaaatagccgacgccaccgacacgccgcacaacatgttcacgttcgtgtcgggcatcggatgctcgtcgcgcttcatctactacatgaaaacctacgggttccactccgtacacggccgcgcaaacgccgtggcgacgggcgtcaaggtcgccaacccgcggctcaacgtctgggtcaccacgggcgacggcgactcgctggccatcggcggcaaccacttcatccacgccatccgccgcaacgtggacctcaacgtcattctgttcaacaacgagatttacggcctgaccaaaggccagtactcccccacttcgaaattgggcaaaatcaccaagacctcgccttacggcacggtcgagaagccgttcaaccccggcgaactggtgatcggcgccaagggcacgttcttcgcccggtcggtggacatggaggtgggactttcgaaggagtgcatggtggccgccgcgatgcacaaaggcatgtcggtagtcgaggtcctgcagaactgcgtgatattcaacgacaagacccacggtgaattcgccgccgacaaggccacgcgtgcggagcgcaccgtaacgctgcgccacggcgagaagatgctgttcggagccgacaagcagaagggcatcgtcttcgagaacatgaagctgaaggtcgtaaccgtcggagaggacggctacacgctggacgacgtgctgacgcacgacgcccaccagcgcgacacgacgctccactcgatgctggcggcgatgaagtaccccgactaccccgtcgccttgggtgtaatccgggccgtcgaggacgccacggtctacgaccgcgaggtcgcccggcaggtcgaggaggtcaaagcccagagcaaaatccactcggtggacgagttgctgcattcgggcgcgacttgggagatcgagtaacggaagacagcgaggacggaagaccggatcacggaaaattgcgggacgaaagcctgcgaggacggcaggccggaccacgtgcgggacgcagcagaaagtgcgtccgcaggccatcccccgaaggacagcgcgacacccggcaggatgctgatgctgaagggagcctgttccgaaaggacattgttccggaagggcgtcaatcccggaaggatgctgtccctgaaaattcgttacagttcaataagaaacagccggaatttccggctgtttcttatttcaaggcatatctcccgtttccggcaaccaaaatgccgcatacgctggttccgacagcaggcatatgggtgaaagggcttcgagaagcgttcgcaagaacaggtcccgcgtccgaacggcatccatcgcaacaaggcggaggttttatgcagagcgggcgcagcctgctgctgcccccaccctccgcaaagtcataaaaggcaagaagcatgtcttcataccgtgtgtccttgcggccgtggaccgattcagtgttcgagaagcgtggtgtcgatgatccggcgcatgtgggcgatctccatggctccgttagcgtgcttcggttcaccggacatgggaataaacaggaacgtcggaatgctccgcacgcggaatatcgccgcaagccgtttttccttgtccacattcaccttatatatgcggaccttcccggcatattcttcggccagcgactccataacaggccccatcatcctgcagggaccgcaccacggagcgtaaaaatcgattacggcgggcagatcgccctcgtatttccattccggattggcgcggaagtcataaatccgcttctggaattccgttgtcgttagttcgattgctttcatagtatgctgtttttcagtcgccgcaggctgccggccgaagctgcaatgccgaacatcagtgcaacagccgttccgatccttgctttccgaatcgttttcatggcccggctctattcaataacgcaaaaatcggagatttcatatgccccggcgacgccgggacccgtcaacgatgagccggcgacatatccggcgacatatccggcgacatatccggcgacatatccggcgacatatccggcgacatatccggcgagggccgtcaatgcagttccctatgcggcttgcatgcagtccgactacagttcggatgcagtctcgctacggttaatgcagctctgtatacaggccggctacagctcggatgccgttcagaagctatcccgccacagttgatgcggctcggtatacggtccggtatacggtccgaataccgccataaacgcatctgaatgcgcacctgatgcagcccagaacggctctgcccgcagtccagatacgatccggatgcggatctgcggcggattttacggtaaaaattcattttcggcgattttttccgagcgtaaattgcagaaataaaaaaatccgattatctttgcacctgcattgggggattagctcagttggctagagcgcttgcatggcatgcaagaggtcacgagttcgactctcgtattctccactattgtaaacaaggggttgcaaaatattgcgaccccttgttttttagcttcctgcaaacaattcgcacacgcattgacaatcacacgactttaaaccgaaagtacaatcctcacggatcgtggcggagcaggtcggtatcgagcgggtggcgggcaccgtcgtcgccgagcaggacaagacgaatctcgccgccgttgtaatcgaaatagcgcagttcgagcggatgcaggcccgcagacaacgcaacctgtccgcttttttcgagcagaggatgttctccgtcgttatcaaccaccaccctgccgccgatacgcaggatggcgccgtcgtcggaagcgagcgcaaaggtgtagatcccggttgccggaatgtcgatatacccccggaaaatcatcccgacggcccggcggccggcagccgcacgagggaaacagaccgaatcgacgacacaacggccgccggcagcgtaaagagtctccggaacgccgatcgcgtcgcaaccgggaaaacggcggaagtaccaatcgacgcacaaaccgggttcagtgtcccgcggctccaaaggccgcgcataatcctgcttctcatagcggacggttatccagtcgcccgtacggccgtcggcatggtagggccggatgtgcagcgtacaatcgtcgcggataagcagcggggcgtcgtaacgcggcgagtttacggtcggcaccgagccgtcaagtgtatagcgcaaaacggcaccgggcagcggacagacgacggcagtccggaccgaatcggtgaagacgctgacagcatgataattcgtcagcgacggaatccgatagttgacaccctcgtcatccagccgtcggcaatagtccagcagccgcgacatgaaagcgtcctcgtcgaacttgcccggctcgcgccaccctttctcggccagaacgagcaggcgcgggtaaaacatatattccgcacgggaccacgtggggattttttcggtccagaggttgccctgcacgcctttgatctgtcttttctgcgcatcggacagcgagtccggcagcatatcgaagcgacagatgcgcgcgagcgagttcgcgtcctcttccagcgagaaatagaaccacgactgcggacagaggacgacctcacagccctgccgggtagccacactcacggactgcggttcccacggccgccaccacatgaccgtggcgccgggaacggctccgccttccagtatctcgtcccagccgatcatgcggcgtccgcgggcttcgcaaaagcgctgcatacgatgcatgaaccacgcctgcagagccgcttcgtcgggcagcccttcggcacgcatacgggtctgacagtcgggacaacgtttccagttgctcttatcgacctcgtcgccgcccatgtgaacatattcataggggaaaagttcgaaaagctcttcccagacactttcgcagaatgccagcgtccggtccttgcccacgcacagcggcgaggagaaggattgcccccacgaaccgcgtccgaaacaggccagccacggatagctgtcgatggcctgcaagcaatggccgggcatgtcgatttcgggaatcacgtcgatacctcgaaccgcggcataggccaccacctcgcggatatccttccgtgtataatatcccccgtaaagcgtgtcggcgccatcggtccgcagccgccggacgggaagcaggaaatcgtcgttttgttcccgcgccgcgcggcccatgcacaacgtgtcctgccggttgaaaagccgccatgccccctcttgcgtaagttcgggataacacggaatctcaatccgccagccctgatcgtcggtcagatgccaatgaaatttgttgagcttgagccgggccatctggtccagcagcgtaaaaatctcctctttgtcgaaaaagtgccggctcacgtcgagcatcacgccgcgccatccgaacgccggcccatcggcgatctccgcataaggaatcttcgctccgcttccggctttcgctggcagcagctgccgcagcgtggcgatgccattgacgacgccccggtaggaaccgcccccgatccgtacgccggcgtgcgtcaccgacaggcggtacccttcaggcggcaaggcggccgaatcgagttccaacacgatatctccccggtcgcaccgatctacggcgacagtgccatagggcgccagcacctcgttcacgtagccggccgcggcgatgagagccgtatcggcgatgcccaactgcaaccgttcagggagccggtaggtcccgtcgccccatatcgttttctgcggagcgggaatcagcacgggccgttcatccagcgcaggcccggtgcaggccatgagccacattcccacagccaacgcagtataaatgcgaacaagtgtcatgcgcccggtcacgatcaattgccgtttgcggccgttacacgtccgttcctgcgcagagccagcgtatcgccgtactgagtctgcaggcgcaccagctcctccgtcatttcccgccggggcgcagcatattccggcaggccgtaaaggttccgcagttcgtgcggatcttcctgcaggtcgtaaagctcccattggtcgatgtcattgtagaaatggatcagcttccagcggtcgttacgcacgccgtaatggcgcttgaccatgtgttcggcaggatattcgtaaaaatggtaatagagcgacctgcgccagtcggcgggatgcccgcccttcagcagcggcagcagcgagaggccctgcatatcggcgggcacgggcactccggccagttcgaggaatgtcggcgcatagtcgatattctgcaccatttcggcgatgtcgccgcgggcaccgcccggcagacgcatcaccaacggcgtgcggaacgactcctcgtacatgaaacgcttgtcaaaccagccgtgctcacccatgtagaagccttgatcggaagtgtagaccaccagcgtgttttcggccagccccgactcgtcgagataatccagcaggcggccgacattgtcatcgagcgatttcagtactttcatatagtcacgcatataacgcgtgaatttccattgagccagttcacggccctgcggattgcggcggtagaaatcctcgatcagcggcgtatagaatcggtcccacgccgcccgctgttcgggattcatccgcccgacaaacgcttcgtaggtgcctttcaggcgactccgcttatcgggccgccacattttgaggtcatagatcaggtccatgtccttcataatgctcatctcctgcgctgcggcggccgaacgcccctcgtaatcatcgaaaaaagtatcgggaagcggaaagtccagctcttcgtaaagcgccagattgcaggtgtcggccatccaattgcggtgctgggccttatgatgcaccagcaggcagaaaggtttctccggatcacgccccgaacgcagccaatcgagactcttgtcggtaataaggttggtaatgtacccttcggaacgcaccgtatcacccgtctggcggataaaatcgggattgtagtaatcgccctgtccgggaacgatctcccaatggtcgaacccggtgggcagactttcgagatgccatttgccgacgacggccgtttcgtatccggcctgttgcaacagcttggggaaagtctgctgcgtattgtcaaagacgcaggtcgtgttgtcgtaaaaaccgtttttgtgggaatgcttgcccgtaagcatacaggcacggctgggaccgctcaaggaattggcgacgaaactgttggtgaaacgcacgccctcggcggcgatgcggtcgagattgggcgtcgaagcgtaacgcgtatcgtaacagctcatcatttgcgccgtatggtcgtcggtcatgatatagaggatgttcatcggacgggccggcgcttcggactgccgggcgcatcccgtcgcagcgacggcagccaatccgccgagcagaaagagtcttttttccatattccagtagtttttatcgctgaaaaagcgcaggtacacgctcaggcgtacctgcgcttcatgaaattcggttctaaattagcaaaaaaggacgaacgatgcaaaactacatattgtccatgtcgggcgcccattccaatccggtcgcagggccgtaagactgcgggtcccacaagtcaccggcagtcgaatattcgcattcggcggtattgccgttgcccgtggcgtcttcgaacgtgtaaccgtgcccctcgttcatcttccagtagcccagcaggccttcgctcttgggatcgacgttattcacgttgttcttgagctgagtggaggtgcgggccacgttccacaggcgcacttcgctgaacgagatggtcgtattgcagtagctgggctgcggcagcagggcaaaatacttgaacgtaacggtattgcgcggagccgatttctgtacgacctgctcaccatcgaggtaaaggctcgtcgcaacgccgtcgaagacgatggccacatgctgccacttcttcgcctcgcagggcgtcacggcagtttggccgggctgggccatggtgttcatctgcatccagcgattcaccacatccgaagtggtggacgaagcctcgaagcggacccacatacggttgttgatatttccctcgccgttgtcgaaaccgacgatcatgtagttacgggccgtgaactcctctttgtacatcttgaactcgatggtataggcattgaaggtgatgggcgcatccttcatgttcagcatcacacggttcagtttgctgaagcctccggtccggtattcgctattgaagatcggaacgggaataatcttcttgcgctcgcagacgatcaggaaatcggatgcatcgcccaacatcttcatcccgccgcttacgcagcgcagcgtcacgggcagagcgtagacagaacccgaatcgtccatctcttcggtgaagggcaggatgtcgatttgtgcaggcgcggcagccacttcgccggccggaactatgacaggatcggcaggcagttcaaaacaggtttccggcagctgtacgtacgaagttccgttaagtgcattataacgctccagcacgtcgggattcatctcgaagcggaaagcggtctctgtatcgcccttgccgcccagacgaacggtaagcgaagtcttaccgccgtcatcctcgaccttgacggtcgtactcgacgctttctgagcctccttgatataggcggcattgtcgagcgcaccgagatcggcattgtcgcagccggcaacggaaccggtcagcagcgcacctgcgaataaggcccggcaggtgcggatattcagcatatttttcataatctcattcggttttattattgctggtcgtcagcttccgttccgcccttttccaacttgtccatggcgttgatggcggcacggaaatacttgtaacaatcgttcttgaagtcgttctgcatctgataagcgccgatgccgcccttgcggaatccgttggcaggctgccagagcgccatggcctgcagcgaattggtgtaggtcccgtccggaaggcgacagctcgttccgccgtatttccacatcgcttcgggttcgaaattctcggtaacaagagtgcggttggtgatggtctcctcgtcgattatgtcaccgaaggcgttgaccagcccggccaaacggtaggaatccagcgaagactgggctgtcaaagcgtatgtctgcagaatatagtaatcaaagcattcgattgtctccttaggcatcgacgacaccagtccgtcaacgatcagcagtttgccgcttcctgatttcggaccgagacgtttggagcattcatcgacgaaccacgtcgtacgctgcgagggggaggtgccggcatagatatcgccctgctgggactgattcatcacgatattgccgttgtggtaagaccccaaaccgggttcatagtcgaggtcgagacccgtatagccgtacttgagcacctcgtcgaccaacccgttggcgtatttgcggatggccgcctcgatctgggcggcatctgcatcgtccgtccagccccaatactcgcgcatcaggcgcacctgctcccatgtatcctcgacaccggcggtcacctcttcgggcgtcgccttggcgccgacgttggtcagcaggatggtcacgaccacgtcggtacctttcagcttcttgacctgaacgacctcttccatctgttcgggcgtaagggaaaaagtcgcccagttggccaccagcgaaacgctgtcgggaatccccatcaggctggtcgccgtcgtggcccccgtggggtcccagccgccgaaccaaccgaaggcgattggatggctcttgtcggctttccatgcacgcaggttctcgtaataggatgcgggcttgtgctgcgtgaagtcccgcgcttcgggttcggtccagtcgctgcacgagacaaaggccccggccgcgaggaccgctatcatcagggaaattatcttctttttcatatcacacttggtattttcattttaaggtcttatttcttcgcccaccacacatcggtgccgtgcaggtcactgccgccgagcaattcgacgcccttgagtacgttctcgcggttgttgtcgtactccgactggggatagtgcaggcggcgcattcccttgctgctgtctacattgccccacatgccgccgctcaggttgttgaccacctgcaacaggcggggatagcccgtccggcgcacgtcggcccatgcttcgtggccgatcatatggttggcgatccatttctgggtgatgatgcgctccagttcgttgccgtcgtcagcccatttgaccgatacggccgtaccgaaatccgaaacgttatgcttgttgcgcggatccgcataggagagcgcgggagccgtttcggaagcgatataagtctcgtacgaagagccgtttccccaaagttcgagcgaggttttgacacccgtgttatagaggttttcggccgtgtcgcccatcgtccagcccagcagagcgccctcggcgcgcaggaaccagctttccgaagcgtacatcaccggcacggggtccttttcggcgaagagcggataagagtaggtcgcatagtcggtcggcgtcacattctgaatgcccgcacgcacaccgacgtagatcccgtcgtagcccgacttcgaaaaataggaagcccggcgcggatcctcgtaggcgttcatgtacatcacgatgctggcgttcgaccgcaggtcctgccacgaagtactggtcgcttgcgtgtagaacggattctgacgggaatcggacgagaagctcaggttctcggcattggcgtctatcagaccgtatgtcgccatatcgcgcacagcctcttcggcgatgcggcgcgcttccggctccacaccgctcatgcgaatggccatccgcagtttgagtgtattggcgaagctcacccacagccgcgaatcgcccttgaaagagctgatatcgaaatcgcgcatcagaatgccgtctccggccgacgcgaacgtgtagagcgtctccatcgccgcatccagatcgtcgatcatcgccatgtagacatcgcgctggctgtcgtaaggcaccgagaaggtgccgttctgcatcttcgaatagggaatcggaccgtaggcgtcggtcacgcgcagcatggccgccacgcgcaggatacgggccagctggtaaacgggaccctcgccgccggtctgggtctcgaccttgaagtagttgccgtagaaattggcgaatgtctgctcgaaaatatagtcgttgaatttgtccgacggattgtaggtagcgatgttctgtccttggtaggacttcacggcagaggcgtaaccgcccagttcgtcggccacaagcacatcgtgcatctgcgaagcattgacctgaaaatgggtgacgaactccatcatcgcgggaaaaagaatgcccacgccgacgttgtcgccattcaggtcgtcgtccgacgggcggaaaggtttggtattgtaatcttcgaaattaccggtgcaggccgcggcggcgagcatggccacacaagccgcaaaacggccgaaccgacgaattatagtgtttgctttcatcttggtcaggattttagaattgtaacttcacggtaaatccgatgttccgcaagctgggcagcatgaagtagtccacgccctgcaggaagttgtcggccgtcgagggcgtcagttcggggtcgaacggagccttgttgtaaatcatccacagattgcggcccacgagagaaacggtcattgccatcttctgacggaaccagcgcttgggcagcgtataggccagcgacaactcctgcatacgtacgttggtcgcatcgtaaatgtagtatgcgccggcacccgtgccggcaccgatggtctgatagtaattctgagcgtcgaccatgccgttgtttatccgcacgccgcctgcttcgcgggccgccgccgaacgctccgaaacgccgtagtagtcgaggaacgcctcggtattcgaaacgacagaaccgcccagacgggccgcgaacatcacattcaggttcagccccttccatgcgaagctgttgctccagccgatattgcccttgggcagcaggctggcgaccttgcggcgctcggtggtggtcagttctaccttgttggtctgcggatcgacataaatgtttccgttgaggtcggtgcgcagttcgcggttgatgtaaaggtcgcccatcgtgccgccttcgtagaggatgacctgcggcgaaccggcgtcgccgagggtcgccttctccagatagggcatatcgataggctgtccgtcgacggggctgatgacgccgttggcgagcctgatgatcttgttgcggttcatcgtgtaggtcacgctcgtgttccatgtgaagtcacgccacgtattatggtagttcagcagcatttcgagacccgaattgcggacctgaccggcctgcacgagtaccgacgaataacccgacgtggacgaaggggtcgattcgaaggtctggttgaaggtatccgaacgataccatgtagcgtcgaagttgagcttgccgccgaagaaacgggcattgagacctacttcccacgatttggtcttctccggcttgaggttctcgttggggaagcggtgaagcgagtcccattcgtgcgtctgtcccttgtaatcatagtagggtttggtcaggtaggccgcataggaagagcctacggccgaataggaaccgcgcaccttgaggaaggagaaccattccggcatatcgaccatctcggaaacgacggccgaaagtccgaccgaaggatagaagaacgacttgtatttcgagaaggcgagagccgattcccagtcgttgcggccggtgacggtcaggtaaagcatactcttccacgccagctcgacgttggcgaagatgctctgcgactgaatgtgcgaaccgtcctcacgctccttgtagttggtggtcgatatattggtaatcgagaagaagttgggaatcttgcgcaggtcgccaccccagcccatgaaatccatgcggacgtccttgagcgacgcaccgacattggcgctcaggtggtagtccccggcgaaggtaagatcgatgttggcgatggcatcggcatagatctgacggtcgttacgcttgatgatcgaatacatacccttctcgcccgcgaagttggtgtcggtgccggcatagcgcttctcggtaatgtccatatcggcgttatcgaccttgacgcggcccgtcacgtcgagccaatcggttacgtcgtacttgaggttggcactgagcatataacgacgctttttagtctggttgatcatcttattcatgatccagtaggggttctggaacgacatgtcgcccgaaccgtaatcccatgcctgcgtatagaggttgcgcgattcgtcccaacgctggtagagacgcacgttgtcaaagtcgtcgccgcgcggaaagagatagagcgccggcagcgggttgaagtatttgcccgctgcgatcatgttcttgttgtcctgcaggatgtagctcgcactcagatcgacggtcagcttgtctttgaggaacttggtgacgtcgcggaacgtgaagttgtagcggttgtagccgctgttgggcaggatgttgcgggcattggtcgtcgcggccgaaaaataggtctggtgcttctgcgtacccgtcgagaaggtcagggagttgttgacgttcgaacccgtgttgaagaatccttcgggatcgaagcggcgcaaggttttgtcgccccagctctggtaggacccggaaacattgccgtaggtattctggaagcggggcatcacgaaaggcgacgagaaggtggtgctgttggagaaggtcaccgacgttttgtcggcctgtcccttcttggtgttgatgagcaccacgccgttggcagcgtccgaaccgtagagagccgcggctgaagggccggtcagtaccgaaatcgactcgatgtcgtcggggttgatgtccgccacgccgtccgaccccatgtaattgccctgcaggccgtcgtcattcgagccgaagctgacgttcgacatcggaataccgtcgatcacatagagggcgttgttgtccttgtagagcgatttggcaccgcgcatcaccacgcgagccgcgccgccgacgcccgccgccgaagagttgatctgcacaccggcgaccttgccgttgagggcgttcatgaagttggcgtccttaaccgtaacgatgtcctcggatttcacctgctggacgttgtacgagagcgccttttcctgacgtttgataccgagggccgtcaccaccacgttatccagcgcgacggccgattcgaccatcgtgatacggaaatcggcgcggcttcccacagcgatctcctgcggttcgcagcccaaataattgaccacgagcaccgggtccttcaccgaagcgggaatctgcagtccgaaactgccgtcgacattggtgctgataccgatcgtcgtacctttgataacgaccgacgcgccgataatgggttgtccgtgtgcatcgagcaccacacccgcgacattgtgcagggatgaggatgccgccgcatccgccgaacgcttcgaaagaatgatgttcgaactgttgatctcatacgtcagatcggtgcctgcgagcatttgcgcgagagcctcggcaaccggctgttcgcgcacctgcacgctggccgagcgatcaacgctgatattcttgtcgtaaataaacagaaatttggtttgtttttcgatctcatccattatctgcgtcattttcacctgttgcatatcaatagtcacgcggcctgcctgcgcccggacggtcccggcggcaaggcacaaaaacgcagtaaaaagggagattatcagactctttgattgcctgatactttttttcttcatatctttgtagattaaaggataatagttttggttagtcgcaaatcatgcgagagaccgttgtcctttccgcccggagctgctccaacagtttcgggcttccttttccgggataacggcaaaagatagaatgcgggattatctcataggcaggcaaagttttaaagttatacgttcggtcagtatatggttatcgtgctggtttcttggtcgtatgcgtagtggaaagagcaactgcgctgcaggatgcgcagggcgtgttcgatgccgtccgaaatgcggatcttacccatcgcttcgatatcgggcatacggtcgagcttcacatcgaaacgcacgccgtaacagtgttcgaaccggtggagtatatctgcaaaactgcggccgctcaccgaaataaggccctcggcccagagatattcgttgggatcgtccgacgtacggagcgacagttgcccgccgctcaactgcactttttcgtgggggttgagcacgacctgctgctgcgggtcggcaagggaactcacccggacgctgccgcgcatgagcgccgtagagaatacatcgtgccgctcgtcagcattgacgttgaagcgcgtgccgagcacctcaaccttacaggcgaacgtctcaaccacgaacggccggcgggtgtcacggctgacatcgaacagcgcctcgcccgaaagccgtacctgccgggaatttcctgcgaaaagcgacggatattcgatctcggcccccgaattgagccacacattggtaccgtcctgcagcgtgagattgatgcgctgtccttcgggcgcagccacgcgggtcataagattcgcccagctccgctccttataggaaacatatccccaaccgatgccgacggccaatataacgacggccgccgcctgtacggcatacctcgttacacggcgccaattcagcagacggccgcgcgcggccttttcctccggagcgaacagcagcaatgcattgtacattccgcgttcgcggtcaaagatacgccggttttcctgatcggcatcgagccactccatcagacgccgctgttcgtcggaggtggcttcgcctttataaaaacgatataaggtctctttttccatattacgacacgcccgttccggggctttacattaataaagcaccccggcggcccggtttcccggaaaaaagagcattttttttgattttatcgcagaatgcgctccagaacgcctgcggcaagcaccagtggcaggtaatcacgcaggacttcgcgcagttttccgagcgctttctcaagctcggtctccacacggcgctcggtgatcccgcactcggccgcgatttcgcggtaggacttgccgtggatgcgccgggccgtgaaaacctgccgcgtcagttccggcatttcagccatgcaatcacgcaccagtttctcgatctcgccggcaaaaaggtgttgaggatcacaaagctccagcgagcggatattctcgctcaccacgcgacgctgaaggtcccccacttcgttgtggacccgcatccgcacctgcagggcccgcaggtaattcaggcatttgtggcgtatggtcgtgaggatataggccgcggcattgcagtccgcatcgagccgggagcgattttcccaatagtagatgaaagcatccgcgacgacatcctcggcgatgagcctgtcctgcacatatccgacggcaaaactttcgaaacgggctttgtagcgtttataaagctcgccgaactcggcctccttatgcaggggggggg

SEQ ID NO: 12060 - DNA, 24149 bp, Unknown
  gut microbiota DNA sequence
ttttcagactagaaaacccggttccgaaaaagttgcccccaagaatctccgccggccccctccccgacaggataaagcggcatggaaggttcctgatttccgcctgaaatcgctgaatggcatgcgtccgtccccttccccgtcccactcttatatatatgataaccgcttccggtccgtccggcgaaaaaaagctgcggcgatccgcagtcaactgcaaaataccggctatagacccggattctgccgatgaaaaaacgctgcggccggaataccggagaaaacgatatgcggatgcagacggaagcctacatctgtaaaaaatttgcgaaccggaataaaataattaaatttgtaattacccttatgcgatctaagggccgatccatgacaaaaaaaagtgcacaaatagcgttcgacgacgttctccggcaagtcaccgaagggaacgaagaggcattccagcaactctacctgcactatcacgaccggcttttccagttcgcacgcatgtatctgcaccagcagcaggcggccgaagacgtcgtcgccgatctcttttttcaactgtggaaaagccgcggaatgctcggcggcatcgaaaacttcaatgcctatatctaccgcgccgtgcgcaacagttgtaccaactacctgctgagcggctaccggaaccgtatgtccggctttacacaggtacaactgcaggtcagcatcgatcctgcggtcccggcggacgaggcggttgacttccaactgctgaacagcgcgctgaccgacgctgtggaacagctccccgaacgctgccgcatcatcttcaagctggccaaggaggacggcatgagccaccgggagatcgccgcggcactcgacatctccccaagcaccgtcgaaggacagctggccatcgccatgcgccgtctgaaggccgccgcagcccctttcctgaaaaaaatctgaaaaaatcgcaaatcggcttagtggtttctcaggtccgtcttgtcttatttgtaaacggacaatagacggaacccaatgactgattcgaaacatacgaacgacaacaattcattattcacccgtattcaggtaaaaagtccttgtgcagacgagcgttacagcgcagggaattccctcgcgcgcctgatgacgcgcatccacgccgacgcagtcaataaggctcggccggagcgcaactacaccaaagtctaccgcatctggctggccgcggcatcgctcatgatcgttttcctcacttccggctggctggcgaccgccctgcgtcccgcacccgaaatgctcatccgcaacaacgcatgggaaaaggtggagaacctgacgctggccgacggcacgcagcttacgctcaaccgcggtgcacaactgatctatcccgaaaaattcgccggcaagactcgcgagatattcctgtcgggagaagcctatttcgacgtggcacacgacaaaaaacatccttttatcgttcgggccggggatctgaagatcaaggtgctgggtacgaaattcaatatcgaggcctaccccgattcggaaaccatcaccaccacgctgctggagggttccgtcgaagtggagagccggctcagccgagagtgtatccgcatggttcccagccagcagctctcgtatgatattcagagcggcgaaatgaaactcagcacgatctccgactcgaaagagcccgtacgctggaaagacaacgtctgggtgctgcaccagacgccgttcacacaagtatgccaccggctggaacagatgttcaatgtcaagatcgtgattatgaacgacaagttcatcgggaagaaatttaccggagagttccgtttcggggattcgctggaatcgatcctcgaagtcatccgaataaccacaccgttcacttacgaacgcgaggaggatacgatcatcctcaaataaaaaccgaacctactgcaaacaacctaaaacccgaacctgcctatgaaataagcctgtcataaaaaaacacgggaacctctgccgaagttcccgctcccttaatgaatcaaaaacaaacccggcgggccgctacccgcacggatctatcaatccatcaatcagtaaaggtatgacaaattttgataagttcaagacttattgccgaaaattttgcgttcagacccgactcgctgttcgcatctgcctgtcaattacagcaataacaactttcgccacacaagccgccgcgcagaataatccgcaggaaatacggctcgacttcaacgatgcggcgttgtcgcaggtgctgaaaagcatcgaaacgcaaagccgctacaccttcttctacaacaacgacatcgacgtaacgcagagcgtttcggcgcacatcgccagcagcgacatcaattcggtcgtcacggccgtcctcaagggaaccgacatcgcccataggattacggacaaccgggtagtcctgttcgtgggggggggtgacgccgcagacgatcaggagcgttcgatttccggcaaagtcaccgacgcggccgggctgccgctggtcggcgtgacggttctggtcaccggcaccaatttcgccgccgtgaccgacgtcaacggcggctatacggtccgagttccgggcagcggagccgaaatcgtctactcctatatcggctaccagagccagcagcggatcgtcggttcgcagacggtcatcaaccttgcgctgcaggaaagcaccgcagagatcggcgcggtcgtggtaacggcgctcggcatcaagcgcgatcagaaatcactgacatacaacgtacagcagattgcgggcgacgacatcagcatcgtcaaggacgtaagcgtggtgaacagtctggtcggcaaggtggccggcgtgcgcatcaaccagtcgtcgtcgggtaccggcggttcgacccgcgtggtaatgcgcggcgccaaatcgctcttcggcgacaacaacgtgctctacgtactcaacggcattccgatgatgtcgctccgctcgacccagtcggacaactattacgaaggtgcgggcgtcggcgacagcgacggcatttcgagcatcaatcccgacgacattgagtcgctgtcggtgctgacgggcgcttcggccgcagcgctctacggcaaccgcggcgccaacggcgtgatcctcatcactaccaagaaaggcagtgcggaccactcgacgcacgtctcctactccaacaacacgaccttttcgaatccgttcgtcacccatcagttccagaatacctacggccgtcagtcgggcgatttcaaaagctggggcgagaagctcggcaagccctcgtcgtacgaccccaacgatttctttcagacgggttacaacacgcagaacaccgtcagcgtggcatcgagttcggagcgcagccagtcgttcgtttcggccggttcggtcaattcgtgcggcatcattcccaacaacgaatattcgcgttacaacttcacgatccgccacggacgcgagctggtcaaggacaaactcgaactcgacaccgacttcttcttcaccaagagcgagtcgcagaacggcgtggcgcagggactctactacaatccgctgctgcccgtttacctcttcccgccttcggagaatttcgagcgtctgaagacctacgaaatctacgactcaggccgcaacttcgccacgatgtattggccctacagcaatacgggactcgacgccctgagccagaacccctattggatcaccaaccgcaacatgttcaacaccacgcagaaccgctatatcgtcagcggctcgctcaagtggaagatcaccgactggatcaacctttcgggccgtatccgcatggaccatgccgacaccgactacgagcgtaaactctacgcatcgacgccgggactgttctgccagtcgaaaggccactaccgcgagcagaagatgaccaataacgcgctctacgccgacgtactgctcaacatcgacaaacagctcagcgacgatttccgcctgacggccaacatcggcgccagcctctacgacgaaaaatacgacatgatgggacagagcggcaacctgctgcgtcttgccaacttcttccacgtcagcaacatcaacatgtcggacccgacgaccgaaatgacccgtgaacacatccgccagcagacgcaggccgtctatggatcggtgcaggtaggcttccggaatttcgtttacgtcgatgcgtcggtccgctcggactggttctcgacgctggccggcacgccctccatgtcgtcggtctatccttcggtcggtgcatcgctgatcctctcggagctgattccgcagaacaagatcctcaactattggaaaatccgcggctcgtacgccggcgtgggcaatcccccgtcgccctacctgacctacacctacattccgctggaggaccaaaacatcagcaccgacggtttcgctgccgcttcgcacctcaagccggagcttaccaaatcgttcgagatcggtacggagctgcgcatgttcaacaacaagctgagtctcgaattcacctactacaacaccaacacccacaaccagctcttcaagtacgagattccctcgtcgtcgggttactcctatgcctacgccaacgccggcaaggtcaataaccgcggtatcgagctgaaagcgggcttcaaccagaacatcggtcccgtaaaatgggagacgacgctgacctacacgcgcaaccgcaacgagatcaaggaactgctcgacgaatatgtgaccgaccccgtaacgggcaccacggtcaaggcgccgcaggaattcatcgtttcgacggccgagtcgtaccgcatggtgctgaccaaaggcggcacgatgggcgacatctacgccacacacctcaagcaggaccccaacggctacatctatgtgaacccgatgaccaacggcatcgaaatcgagcctaactcctatgtcaaggtcggttcgatagaccccaaatacacgctgggatggcacaactccttctcatggaagggcttgaacctcggatttttgatcgacgcccgcgtcggcggcgtggtcgtgtcgggcaccgaggcgatgatggaccagtacggcgtatcgaaatcgacggcccgcgaccgcgacaacggcggcgcgatcgtcaacggcggacgcatggacgccaagacgttctattcggtagccgccagcggcaccacgggcgtactttcgaactacgtctacagcgcgaccaacgtccgcctgcgcgaactgtcgctgagctacacactcccggcactggcccgcgaacgcctgcgcatcaccctttcgctcattgccaacaacgtgctgatgctccacaacgaggcgccgttcgatccagaactgacctcaaacaccgggacgtactatcagggcttcgactatttcatgccgccgtcgctgcgttcatggggtttcggcgtaaaagttaatttctaaatcaggagagacaggttatgaaaaaattacgcaatacgatcgcttgcggagttgcggcactcgcactcttggcaacgggcctgacttcgtgtacgggcgacttcgacaatatcaacaccagcaaagacaaacccacccccgaagacgtggaccgcgacaacgcatgggcggcgttcatccaaaccatgcagcgtaacgtcttcgccgagggcgccaacgcctaccagctggccgacaacctgctgggcgacagctatgccggatatttcgggcaggcgcaggactgggacagcggcagcaactcgacctgctacgcctttcccacggccaaatggaaggacgaaccctacaagcaggcctacaacaacgtgatgagttcgtggaacatcctgcgccagaaagtcgattccgcatcggtggtcttcgcgctgggagaggtggtcaaggtgcaggccatgcaccgtgtgaccgacatctacggtccgctgccctacaccgccttcggcaaaatgtcgagcggcctgccctacgactcgcaggagaccgtctaccgcaccttcatcaaggaactggaccatgcgctgaaaacgctcaaggccgcatacgaagccgattcgggcgcgaagcccatcgccgacttcgacgtggtgttcgattcggatctggaaaagtggatccgcttcgccaactcgctcaagctgcgtctggccatgcgcgcacgcttcgccgctcccggcgatgcccagacatgggccgaggaggccgtaaatttccagttcggagcctacaacatcggcgtgatgaccgacaatacccactcggcccagctgctcacccgcacgggcatcggcttctcgtacaaacacccgctcgaatacctatggggcgaatataacgaatgccgcatgggcgcaaccatggagagctatctgtcgggatacggcgatccgcgtctggaaagctacttctcgcccgccgaaaaggacggcgcctaccacggaatccccaacggcatcatctccaaccccaaggactaccagtcgctggccagctgtcccaaagtgggcttcacctcgccgctgacatggatgtgcgccgccgaagtctgcttcctgcgggccgagggtgcactcctcggctggaacatgggcggcacggccgaaaacctctacaacgaaggtatccgcacgtcgttctcccagtggagcgcgccgaacgccgacaaatatctgtccgacagcaaaagcactccggtgaaatatcccggcttgggacaggtcggctcgatcgagagtccgagcagcgtcaccgtcaagtgggccgccgacggccgtgaactcgaacgcatcatggtgcagaaatggatcgcactctaccccgacggacaggaggcgtggagcgaaatccgccgtacgggttacccgaaggtattcccctcgcagaccaaccgcagcggcggcgtactgccctccggcgcgacgatccgccgcgtgcccctgccgcagcaggagtacgacggcaatgccgagcaggtggccaaagccgtaaatgaattcctcggcggcagcgacaactgcgcgcagaaactctggtgggatgccaaataaattacgaacctcaaaaagtctgaaaaccatgaacaaactcataaaattaggatgtatcgcattggcaggcaccctgttgttctcgtgtgagaccgatcccgaaaaactggagattgtcaagccctaccccaagtcggatcaatactatgcagatctgcgcgactataagaacagcgaccacgaaatcgtcttcggctggttcggaaactggagcgccacgggagcctcggcgtccaactacatgaaatccctccccgacagcatcgacatggtcggtctgtggggcggctggcagaccatcaccgaagcccagcgcaaagatatggaggattcccagcacaagcgcggtctgaaagtgatcgccacttcgcttttcgacggattcgaaatgggcgtggcgcccgacggcgcgacggcggccaccgaagaggagatgctggcctactggggctgggaaggtccctaccgctcatacggcaacgacaacctcacggaaggcaatatcgcggctatccagcgttttgcgcatgctttctgccaacgcatcatcgacaacggatacgacggactggatatcgacaacgaaccgaacatcggcaccggcaagaaaccctacggcatatcgggcttccccaaccgctacaaagtcttcatggatgtcgtggtcacctatttcggccgcacttcgggcacgggacgcatactggccatcgacggcgagctgaacgccaacatgccccgcgaattcggcaagtgtttcgactacttcatctcgcaggcgtacggatgcagcggcgattcgaatctcgacggacgtctgcagagctgtgccaactacttctcggaggttccgttcaaggacgttgcccgcaggttcatcgtcaccgaaaatttcgagaatatcacctaccgcaccaacggaggcgccaactacagaacccgcgacggcgagtcgatgaaatcggtggccggcatggcgcagtggcagccgatcatagacggagaaaaggtgatgaaaggcggctgcggaacctatcatatggagtacgaataccgcaatcccgaaccttacaagttcctgatcgaggccatacagattcagaaccccgcccggaagtaatcgtttaacggacaaaaaaagaaattgccatgaaactgaaatatagtttattcgcactgatcgcattggcggtcgcaggctgccagaaagccccggtttacgacgatgtggtctacatcgccggagccgaaggcgaagtccccaccctgtcgctcacactcgacgaccagtttcccaaagagctgagcgtaaaggtctcgtcgtcgatcgtcgtcggacacgataccaaagtccggctcgtaaccgacccttcgaaaatcgaagagtacaacacgcagtacggtaagaagggcgtaatgctccccgaaacgaacttcgtgctcaagaacaccgaactgaccattccagcaggttcgttttccgcagccgaaccgctcgtagtgagcgtaaccaaagacgaagggcttaaggagggcgtcagctatgtcattccgctgagtatcgagagcgtggacggcgatctgaaagtcaaggagggattccggacggtattcgtcgaaatcggccgtatcatcatcggcccggctgccgactgttcgggcaacacctatttcaaggtcgatttcgccgagggcgagcaggacaaatacgacatctacaacttgggcgaagtcacttacgaagcccgcatcaacctgcagcgctggggcggctggtgcaatacggtgatgggcctcgaagagaacttctgcctgcgtttcgtacaggacgacttcaaaggtcagctgcagctctccggatggggcggcacactgatggttcctacgggcggaatcgccgtgagcctcaacaagtggacgcatgtggcggccgtattcgacggtccgaacaagaaggtgagcatctacatcgacggcgtactcgcctgctcggccgacaccaacaagacttcgctggacctcacgcaggtatatcaggacgactcgttccgcatcgccaattcgtgcaacgacggccgccagctgaagggttacatcagcgaagcccgcgtatgggccaaggctctcaacggcaacgacctgaagaacaacatgtgctatgtagacccggcgacggacggcctgctggcatactggcgcttcaacgaaaaagccgacggcaaaaaggtggaagacgacctgaccggacacggatacaaggcgacctactccagctcggccatgaaatgggtggacaacgtccgctgtcccgaatgacgaccgacgtaatatgaacaacaaacaagctgccttttcgggcagcttgtttatttttccgatttccgacttcggattactcgaagcggccgcgcacccggaggtcgcacaacggactgagcgcatcgctcaccaataattcgacgtgcgcgaagtaattcccacacccggccgtgcggccgtccacgcgcagcacaaaggttttcgagccacccgccgcaatctcttcgcccgccgtaatctgccccgtcacccctgcgggatatttcaccgcatggatccgcagcggcgaaccgcccttgttttccaacgtaaaccggcactcggccgtgccgtcggcggcgcacgttccgaaatccagcaacgattcggcaatttccgcctgcggacgtttcccgcgcggcatttcgcgcaattcggccaagtcaccgataccggttccgcgcaccactaccgccccttcgagccgccgtccggaaacggtcagataacacgaatcaacgaacgttccccatacctcggcagcagacaagtcacagatgaaagcgatctctccctccgcaccgggcgccagtacggcaggtgcttcggcccgcagaaagggaagcggttcagcgaattccaccctcagccgcacctcgtacggcgacgtattgagacagcgcaacgtcagacgccggtcatgacgctgctccaccatgcggaagttgacctccttaacgctaaggcggattccgccgccaaactccacgggaaagcggtcggcagccgtttcgggacgcgccgccacactgccgcggatacggagcggcatcatgcggctgccgtcggtatagacgtataccgccttgtcgaaagctcccggacggtccgccggatcgtaagcgatcccgatttcgccgctgccgccgggaaggaccggcgcctgcgaaaaggtcggtttcatacatccgcaggtcacgccgacacgctcgacgacgacgggtttcgtaccgctgttcgtgaagcggaacacatgcacgacaggaccgcccgtttcgggaatcgtcccgaaatcccacgtttcatggccgaacgccaaaggcggacgtgtcgccgtatcggaccggatcgtctccgcggagtgatttccggcattggcaacgatattgacatcggccggagttccaccccgctgccggcaggcaccggaggtcaatagacaagcaatcaacagaaaagttctaatcataaaaacagccgggagccgttttgcgctccaatcttcaaaattagcaattttccgcgtcagacacaagcatccggtccgaattgatcgcgccgggtgagatcgaaatagtccgacaagtttttttcagccaaggtgagaccgtaaaaccgcctattcgttcacgaccagcagcatcgtcagcaaaggcaggtaatccttgagtttgacacgaaggattttcagacactgctggatgcggtaatccaccgttttgggcgatatttccagcacggcggcgatttcttcataggttttgcgctggaaacggctcatttcgaacgcttcgcggtaggaagccgggaggtcggccacggccgcccggatattttcgcgcagttcctcgacgacgtcgaagtcggggacttcgaactgctcgcacatcttattgcggatattgcccagcacgcgccgctcgatggactcgtgccccagataggtcaggcagttattgcgcacggcgccgaacagatatttggggagcgaagtgctgatacacaataccgtgcggttttcccacagccacagcatcaggtcctgcacgatattctcggcggtctcctcccgcttgacatacatgcgggcgtaggtgcagagcgtcggataataacgtacgaaaatctcttcatacgccttcatctcaccgtcgaccaaccggttcagcaagcaggtgtcggatatctttttccgttcgggcatgatgcgaaattaataaaaattcggatttagattccccggaataaaaaaaattgaaattttgtggttttcgtttaggaacttttgtttttgaatagtctgtaatataaaaagcagaaaaaacatgaacaccccgaacatagaaaaactccttgtcagatattacaacgacgaactgccgttcgaccagacggcccgcgtcgcggcgtggatcgccgccagcgaggagaaccgcaaaatcgccgaacaagtctattacatctgtttcgccgccgaaacgcaggaggcggaagccgccctcgacaccgccggcgcactgcggaaggtcaaaggccgcatccgggccgaaaaatggcgccggacactccggcaggtcgagcgcgcggccgccgtcatgctgctgcccttggtcggcctgtcggcctatctgctgatgcaggtgggatacaaatacaacagcatggtcgaaatccgctccacaacgggtatggtcagctccgtcacccttcccgacgacacgcgcgtatggctcaactccaactcctacctgcgctaccccgccaaattcaccggcaaggagcgccgcgtggtgctctacggcgaaggctacttcgacgtgaccaaagaccccgaacgcaaattcgtggtcgaagcgcaatcgaccgagatagaggtttacggcacggagttcaacgtggaagcctatgacgacgaatacatccgcgcgacgctcgtgtcggggcgcatcggcatgaagtacgacgacgccaaccaccgcagccaattggtgcagatgatgcccgaccagcagataacctacaacgcccgcacgggggtaatctacctcaacacggccaacattccatgcaacacctcgtggaaagagggcaagatcgtcctcagcaacaccccgctcaaggacgccctgcgcatgatcggcaacaaatacaacgtctcgttcaacatccgcaacgacgaactgctcggaaacaccttcacgggtacgttctcgaaccagagtctcgacctgatcctcaagcacttctccatttcgtcgaagatcaaattccgacggatcgaccagacggccggcgacaaagcctcggcgggccgggccgtattcgaagtctactgaaaaaccgcacgaaccgatttgcctacaaccataaaccaaaaaaccgaatgacaccatgacaccgacctgacacaaaaaaacatacggaaagacctgcacgtcctcccgtatgccgaatcgttaagatcacccggccgcatgaaacggccggactaacctaaaactcaattcttacaaacttatgaaaaaaatcttttccacccaaattatgggggggggaaatttacaccgtaccccggcagccggagtcagccgctcggtccggtcgtatgcactggcgttgtgcatggcgttcgcaatcgccgccgtccccgtacaggctcaggtaaaaaacatcacgctcaaggcttcgaacacccccgtttcgacggtgatgcagcagatcgaggagcagagcggctacaccttcttctacaacaccaaggatattccgctcgaccggaacgtcaccctttcggtcgcgaacaaggacatccgcgccgcactcgacgaactgttccgcaacaccaacgtcagctattcgatcgacaacaagagcatcatcctctcggcccgcgggggcgcgcagccgcagcaggccagccagatcaccggcaggatcgtcgataagaacggcgtgcccgtcatcggcgccacgatcatgatttcgggcaccacgcagggcacgacctccggcgtcgacggaacgttcgcactccagtccaacgtctcgccggccggcatgatcctcgacgtttcgttcatcggctacaagccgcagcgcatctcggtgaacaaccgcacgtcgctctccgtcacgctcgaagaggacgaccagcaaatcgaagcggtcgtggtgacggcgctgggcatcaaacggcaggagcgcgccgtatcctacaacgtgcagaacatatcggacgaagtattcctgacgcgcgacgccaatatggtcaacagcctcgcgggcaagatcgccggtgtaaccatcaacgccagcgccgcaggcgtcggcggcgaaacgaaggtcgtgatgcgcggttcgaaatccatcgccggcagcaacaacgccctttacgtgctcgacggcattccgctgccgtcgctctcgctgaccaaccccggcgacgagttcaccatcatgcgcgagaacaacctcacgggcgacggcatctccaacttcaaccccgacgacatcgcgtcgatggccgcgctgaccggcccctcggccgccgcgctttacggttcgcaggccgccaacggcgtgctgatgctcaccacgcgcagcggcgaggagggcgtctcggtcaattacagcaacaacacgaccttcatgtcgccgttcctaaccccggccttccagaacacctacggagccaaggacggctactacgcttcgtggggcacgaaactcgccgccaagcaatcgtggacgccgaccgacttctaccagacgggatacaacacttcgaactcggtgggactctccttcggcggcaagaagagccagacctatgtttcggcgggcgtggtgacggccgagggcatcattccgaacaacgaatacaaccgttacaacttcacggccaaccacagctcgtcgttcctcgacgagcgcatgcacctgagcgtgctgggcatgtacatgaacgtcaatgagcagaacatgctctcgtcgggccagtactacaacccgatgatcccggtttacctcatgtcgccgagcgacgacatccgcaaatacgccgtctacgaacgttacaacgcttcgcgcaacttcccggtgcagtactggccgtggggatcgcagagcctgcagatgcagaacccctactggatcaccaaccgcaacatgttcaacacgggcaaggaccgtttcctgttcggcgcctcgctcaaatacgacgtaaccgactggctcgacatcacgggacgcgcccgcatcgactacacgcacatcacggccgagcagaagaactacgcttcgacgctgggactcttcgccggcgacaagggccgctattacaacaacacctacaccacctcgcagcgttacgccgacgtgctggccaacgtccacaagaccttcgccgacggagcgttctcgctcaacgccaccctcggcgcctcgatcgaggactacaagcaccgcgcgatactgctcggcggcgacctgacgggcgtgcccaacctcttcacgctggccaacatgaccaccaacaagagtcaggcgaaggagaccatcaacgaccagacgcagtcgcttttcgccacactgcagctgggttataagaatatggtattcctcgacgtgacggcgcgcaatgactgggtgacggcgctggccaatacctccaagacgtcgatgttctacccgtcggtaggtctttcggccgtgctgaccgacatcttcaaggtcgattcgcgcgtactgtcgttcgccaagatccgcgcatcgtacgccgaagtgggcaacgccccgatgcgctggatcaccattccgacctaccccgtatcggacggcacgccgcagacatcgacctacctcacctcggacgacttcaaacccgaacgcaccaaatcgtgggaggtcggcgccgacgtccgtctgtggggcaacaaactcatactcaacgcaacctactacagttcgcgcacctacaatcaggttttcaaccccgacatctcatcgacatcgacctacagcagcctctacgtcaacgccggccgcgtggacaacaagggcgtcgaggtgtcggccgagctgaaccagaacctcggtcccgtgaagtggtcttcgaacctcgtctactcgcgcaaccgcaacaaggtggtcgacatgctcgactcttacaaactgtcgaacggcacggtgatttcgcaggattcgatggtcatgggcggtacgacgggcgtcaagatggtgctgcgcgaaggcggccagatcggcgacatctacgtcaatacgctcaagaccgacgagcacggcgcgatctgggtatcgcccaccggcagcaacgtcgccccggccaaggacacatggatatacgccggcaacagcaatccgagctacacgctttcgtggcgcaacgaattcaactggaaaggtctctcgctgggcttcatgttcaacgcccgcgtaggcggcgtaggcgtatcgctcacgcaggccgcgatggactacttcggcgtctcggaacgcacggccacggaccgtctgaacggcggcgcactcgtaaacggccagcgcattccggccgaaaactactaccagaccatcggcggcaacggtgccgacgccatcggcgcctgctatgtctactcgatgaccaacgtccggctgggcgagctgaccctcggctacgacatccccgtccagaagtggtgcaagtggatcaagggactcaacgtctcgttcatcggccgcaacctctggatgctctactgcaaagcgccgttcgatcccgaaacggtcgccggcacgggcaccttctcgtccggcatcgactacttcatgcagccgagtacgcgcaacctcggattctcggtaaaagtgaccttctaacttcaacattacagtcttatgaaaaaagctaacggcataaaactcctgacgctggccggtcttatggcgaccgcggcctgcacgggcgattttctgaataaaaacaccaaccccgaccaagcgaccgacgagatgctgtcgtgggacaacctctcgacgggttcggccttcgcgcagatgaccaagaacgtcatcccctccttccagctggtcggcgacaaggagtacggcagcgccaactatcaggtcatcgaggacctcgcgggcaacatcttcgccggctacaccggagtcatcaacaccagcttcacgggcaacaacctctacaacgtcacgggcaaggactggtacaacgccatgttcaacgacgcctacacccgcgtcatcagcgcatggaaccagctcgatccccagcgcggcgaattccccgaagtggtcgccctcgccgacatcgtgaaggtcgccgcgatgcaccgcgtaaccgatacctacggtcccatcccctacctcaacatcagcagcggggacatcaacaaggcctacgatccgcagcaggcggtttacaaacgcttcttcgaggagctggacgccgccatcacgacattgaccgcgttttacgaggcacaacccggcaccaaactgctggaggcttacgacaacgtcttttcgggcaacgtgagcggctggatcaaattcgccaatacgctgcgcctgcgtctggccatgcgcgtggtctatgccgacgcggcgctggcccaagagcaggccgcggccgccatcggcaatccggtcggcctgatgaccggcgcggccgacctcgcggagctgcacaaacccgccaccggttcgtgggaatacccgctttacatgatccagtacaatttcgacgactcgcgcatcggcgccacgatcgaagcctacatgaacggctatcaggacccgcgccgcggcaagtacttcgtggcgacggccaagggcgagtaccacggcgtacgcaccggcatcacgccgacttcgtcctatgccgattcggaagacctttcgcgcgtaaactgcaccaacaacgacaacattatgtggatgacgcccgccgaagcatggttcctgcgcgccgaatacgagttgcgctggggttccgagtcggacgctgcgacctattacgccgaaggtatccgcacttcgttctcgacgctcggcgccagcggagccgaagactacatcgccgacaaggagctgacgcccggcagttataccgacatggtcaccggcggcaactcgaatcaaagcccgctcgcctcgattcccatctgctggaaagcgggcggcaacttcgagacccatctcgaacagatcatcacccagaagtatctggccatgttccccgaagggcaggaagcttggtcggagttccgccgcacgggttatccgcgcatcctgccggtcctcgtcaacaacagcggcggcaagatcagcaccacccggcagatccgccgtctgaactacccctcgacggagtacagcaccaacgccgaagccgtcgcaacggccacgcacacactcaacagcgaatcgtcgaaccccacgggcgacaacggcggcacgagcgtatggtgggacaaaaatccgagattataaaccgaaaacctgaacaaccatgaaaaagacaataacgacccttgccgtcctatttgcggtattcgccggatttacggcatgcgacacggacgccgagccgctgaacctgcagccggcttacaaatactcggaagaatattacgccaacctgcgcgcctacaaggataccttcaaggaacgctcgctctgcttcgtgtggttctcggactacgaccagagctactcgatggcctaccgcttcgcgggacttcccgacagcgtggacatctgctcgctctggggcggctatcccgatccggtcaagaatccgctggcctacaaggagatgtgggagatgcgcaacaagaagggcacccggctggtgatgcccacgatcatccgaatcatggagaacgacaacttcgccaacttcggactcacgcgcgaagacatggtcaatcagacgaccacgatcgaccccgacggcatctaccccgactggtgcgtgctctacggcaaccacctgctcaaggacgtatgggagtacggcatcgacggtctggacctcgactacgagccggaatcctcggacgaacgtacctacggcatctacggcagccgcatgaccctgttcgtgcagtatctcggccagttcatcggcccgatgtcgcccaaccccgaaaaactgctgatcgtggacggacacaccccgcccgcagagacggagccttacctcgactactatgtgaaacagaactacggcagcagcagcgtctccttcacctcgacgttcccctatgagaaacaggtattcacggagaacatcggcgcctactggcagaccggcggcggcatggaggcgcaggcggcggccaaggccccggaaggccatttcaagggcggtttcggcgcattcttctgcctgcgcgactaccacacttccgattcgggcgccgacaaggagataccctacggccacctgcgccgcgcgattcagctgcagaaccctgccgtaacgaaataacctgaaacagaacctgaaccatgaaaaatatcacgaaatacatactcgcggccgcagcggcgttctcgtcgctcacggcgtgtcaggagttcgaagacttcgacaagaccatcgacggcactccgggactggtttacgtccagaccggcacggaaaacctctacacgatccgggtcgtacacaagcccaccggctcgaccggcgaattcttcaccgaattccccgtccgctgcaacaccacgcgccatgcgggcgtcaaggcgaccttcgtctacgacgcttcgctggtcgagagctacaatgccgagcacaagacctcgtatgcggcgctgcccgccgagtacctgacgctcgaaaacacgacgctgaccgtgcctgaaaacgcgacggcatcggccgactcggtcaaggtgacgctcacgggcgacctctcgctgctgaccgaacgcaactacttggcgccgctgcgcatcaaggccgagggcatcgacgccagcgaagtcatgggagcggtctatgtggccgtagcgaccgagatcaacctcatccgcgccatcgaatccaccgacgacatggtcggcttcaccgccacgggccgcagcgcgtggacggccgactgcggcaattacgccaatctgttcgacggcagcacttcgacttcggtcgattttccggaacagtacggcaacgtgctcaatatcgacatgaaggagcagcagctggtgaccggactctgtctgggatacggctccgtgccctcggtgtcgatcgaatacagcgccgacggcgagaacttctcgcaggccggaactcccgtagcgggcgaatacgtgacgggcggctcccggatgtacgccgcattccacggacatatcgaagcccgctacctgcggctgaccgtcggtttttcgagcagctggagcaaaaccctctccgaaatcgacatctacaagatcgacagcgaagatccgaccgtctatgccgtgaccggcacggaaaacctcatcacgggtaaaatcacgcaccggcagaccggttcgaccagcgacgtgaacgcttcgttcagcgcatatgcgacggtagcttcgacaagcggctacacggtgtcggtcgcagccgacaactcgctggtcgccgcttacaacacggcccacggcacttcgtacgcggcgctgcccgccgagtacctgcaactggacaacaacccgctgacgatcgccgccggagcttataaatccgaaggcgaagtaaaggtttcgctcaagggcgacctgacacggctgagcgacctcaacggttatctcgcgccgctgaaactctcctcttcgggcgcaggcaccagcgccggccgcggcgtggtctatctggccgtgaaggtcgagcgcaacaagatccgccccatcacgtcggcagacgacatggtcggattccccgccgcaggccgcacggcatggacggccgactgcccggattacgccaacctgttcgacggcagcacctcgacgcgtaccaacttcaccagccagaacgataacgtggtgaccatcgacatgaaatcgacgcacatggtgaccggcatcgacctcaacagcgcaggcatctcgtccgtttcgttcgaatacagcaccgacggacagaccttcctgacggccggcactcccgcatcgaacgaatacgcgacgtcgggttccaaccgctacatcgccttctacgactacctcgaagcccgctatctgcgcctgaccatcagtttctcaagcagctggagcaaatacgtcagcgaattcaacatctatgagatcgagagcgacgaacccacggtctatgccatgtgcggcagcgacaacgtgctgacgggcgccatagcccacacgccgggcggttcgttcaaccaactcaacgcggcgttcaacgtctactgcacggtatcctcggcaagcggatattcagtatcggcgacaccagacaactcgctgatcgcggcctacaactcggccaacggcacctcctacgccgcacttcccgacggacacctgctgctggagaacaacccctgcgccatcggcccgaacaacaacaagtccgacggccagatcaaagcctcgctcacgggcgacctgacgggcctgaccaacgccaagggctatctcgtgccgctgaaactctcggcgcaggacgcggtgaccagcagcggccgcggcgttgtctacctcgtcatcatcccggccgaagagcttttccgcaagaacttcaccgtggccgacatcacgggcgcgctcgtggccgaccgttcgggctggagcatcaccggcggcgattaccacagcggaagctggccggaggtaatcgacgacagcacggacaccttcatgcgtccgtggggaagtcccatcatgtttacgataaccttcgacaaagagtacgagatgacgggactccgcatcacggcccgcacggacaacgcatcgtatcagaactaccagcccaacgccgtaaccatcgaatacagtctcaacggcgaagactacaccgaactcggcacggcggccagcgccgacggcagtctgctgaaaaacgtcccctcgtcctatgtcgcgctctacggttcgcagaagatgaagtacatccgtatcacggcatcgtacggcagcaacatgggcgtcggcgacttcaacatttacgcaaaataaacctaaacagagctatgaaattcaatcatattctttccggattggcgctctccgcggccgtactggccgccggctgccagaaatcgctggaatattccgacgtggtctatttcacgggtaccgaaaattcgaacatcaccaacatgtacgtcgacggtccttcgtccatgggcgtcaccgtcacctcgtcgtgcaagatggcggccgacgtgcaggtttcgctggcggtcgacgcagcggccgtcgatgcttacaacgccctgcacggcacggactaccggatgctgcccgccggcagctaccggctctccgacgaggccgtaaccatcgccgaaggcaccaacgtctcgacgccctcctcgttcgaaatcgtctccatggacgatttcgacgaaggcgcaaactactgcgtgccgctgaagatcacgggcacctcgaacggcatgggcgttctggaagcgtcgagaacgcagtatatcttcatcagccagatcaccaccacgcgcggcatcaacctgaagaacagctggtatataaccatggacggcatggtggacgatcccgcgctgaaagatctgccggcctgcacgatggaaatccgcatgtatgccaacggctggagaacttcgggacatatgatctcgtcgctgatcggcgtcgaggagaacttcctgctgcgcgtcggcgacgagagcatcaaaaatcccgcgcagctgcagctcgccggacgcggaacctccatcacggctccgaacgccctgagtctgggacgctggtaccacatcgccgtggtggacaacggctccgaaatgacgatctacatcgacggcaacgccgaaatcagcgtagactcgtcaagcagcaaggccatcaatctcggattctactataacagtccgttcgccatcggcatgtccgccgccgacgtccgctacttcaacggttacgtcagcgaggccagagtatggaaacgcgccctgacgccgaccgaactcaagaacaaccagtgctacgtcgatccgacgacggccgaaggacttatcggctactggcgtctggatcaggtcgaagacgacggaaggacgtttgccgatctctccggcaacggctatcacggcaaggcttcgtcgaatcccacatggaccggcgaaatcaaatgccccgtcatcgagtaatccgaatcaatcgaagggtcgggcggccgcttttccggcggccgcccgcaacccttaaaaacagtaaactaatgcgcatgttcaaggcaatggctctcactgcggcaatactggcgccgctgctggcgccggcggccaatccgcggctgctgcatttcgaagagccggtgaagaatctgggaaaggtagccgaaacggacggaacggtaaaactgcgcttcgaatacacgaacatcgcagacagagaggtgacgctgctcgacgtgcatacccaatgcggctgcgcgcgccccgaattcagccgcaagccggtaaagccgggcggcaaagggaccgtcgaagtgactttcgaccccaaagaccggtacggggatttttccatcgggctgacggtcatcgcgggcaacggcaattaccggaaattcaacacgctggtcgtcaagggctacgtaatcagccggattcccgaagccgaaatcagatacccctatgcactctccgcggcgctgcgcgccgacaacagggcgatcggcatgcggcagctgagccgcagcgcccccaaacgcacacggcagctccggctgctgaacacttccgcgaaaaccttgcggctggcttaccggaccgacagcggacacctcgccctgtcaggacccggtgaaatcgcccccggcaaggaagcggtgctggaattcacgctcgatccccgaaacatgccggacggacaattcgtcctgaaatgcaccgtcagcacgcaggacgaagagatcccggtagaggtcaagggaaagatcgtcggccggtagacggcaataaaaacataacagcacggccgtgctcacggcacggactgcggccgtatgccgccggacccgcgaaggccggcgcggctgcgtccgccgcatccgctgtataacgacacgaattatgaaacgcatcatctttctcccggcaatcgccgcgctgctctgcggcgcatgcagttccgccgtgccggaggattacacgcaatacgtcgatccctacatcggcacgggcgaccacggacacgtcttcatgggcgccaacgtcccgttcgggttcgtacagctcggtccgacgagcatcccgcagacatgggactggtgctccggctacaattacgccgacacgaccgtcatcgggttcggccacacgcacctgagcggcacgggcatcggcgacctgaacgacatctcgctgatgccggtcgtcggcgaagtcacgccgggacgcggcacggccggcgatccgtcgtcgggcatgtggtcccgtttcagccgcgccgacgaacggtgcgcgccgggctactatgccacgcgcctgctgcgctacggcatcggcgtcgagctgaccgcctcgccgcgcgtcggaatgagccgctacgccttccccgcatcggacgacgcgggcattgtcctcgacctcgaaaacgggcagggctgggaccggtccaccgactgcggcatcaccgcatgcagcgaccgtacggtcgagggctggcgatattcgacgggctgggccgacgaccagcgcgtctacttccacgccgaattctcgaagcccttcgaacggatcgtcttcaccggcgcggatacgctc

SEQ ID NO: 12061 - DNA, 23746 bp, Unknown
  gut microbiota DNA sequence
gcccttcgaacggatcgtcttcaccggcgcggatacgctctcagccgacggccgctcggcccgcgggcggaagctctacggacgcttcggtttccggacggaggaggccgagcgcatcaccgtcaaggtcgggctttcggccgtctcggcggagaacgcccggcggaacatgcaggcggagtgccccggctgggatttcgaagccgtgcgcgaagccgcccgcagggcatggaacggcgagttgtcgaaaatccgcatcgaaacagccgatccgacggtgcggcggatcttctacacggcgctttaccacaccatgatcgcgccgtcgctcttctgcgacgtgaacggcgactaccgcggcgccgacggagcggtccgccgcgacacgaccttcaccaattacaccaccttctcgctctgggacacctaccgcgcagcgcatcccctgctgacgctcatccatcccgaaaaggtcggcgacctgatcaatacgatgctgcgcatccacgaacagcagggcaaacttcccgtctggcacctgacgggctgcgaaaccgactgcatggtcggcaatccggccatccccgtggtggccgacgccctgctgaaaggattcggcggcttcgaccgagcgaaagcctacgaagcgatgaaaagttcggccatgcgcgacgaccgggggctggacctctacaagaggtacggatatattccctatgagttcaacgaatcggtcggatactgtctcgaatacgccatcgcggactgggcgctggcgcaggccgcacagcgcgaaggcagacgggaggattacgactatttcctcgcccgcagcaaggcttaccgccactatttcgacccctcgaccgggtttatccgcggcagatcggcatcgggcgcatggcgcacgcctttcgatccgttccactcgcgccacatggagcaggactacaccgaaggcaacgcatggcagtacacatggctcgtgccgcacgacatcgaaggactcatggagtgcttcggcggccgggaacgcttcgtcgggaagctcgactcgctgttcctcgccgaaggcgacatgggcgcgcacgcttcgcccgacatatcggggctgatcggccagtacgcccacggcaacgagccgagccaccacataacctatatttacacgatgatcgggcaaccgtggaaatgcgccgagaaggtgcgccgcatcctcggcgaactctaccacgaccgtccggaaggactctgcggcaacgaggacgtcgggcagatgtcggcatggtacgtactctcggcgctgggcatgtatcaggcggagccggccggcggacgctacttcttcggctcgcccgccgtagacggcgcgacgctgcgggtccgcggcggggaattccgcatcacggctgcgaacaactcgccggagaacatctacatacagcgcattacgctcaacggcgaagcgtaccggaaatattacatcgattacgcggagatcgccgcaggcggggaactccgcttcgaaatgggtcccgaacccgcagactggacaaaacagcaacccctatgaaacgacttttactgctgacggcgtgcgcggccgccgcggcatgcagcgccgactggcgcgacgcaagccttccgccgcagaaacgggccgaactgctgacggccgagatgacgctcgacgagaagatcggacagctgacgtcgccttacggctgggagatgtacgaacggcacggcgactcggtccgtctgaccgacgctttccgcgaagcggtgcaaaacagccatatcggcatgttatggggtgcgttccgcgccgatccgtggacgcagaaagacctgcggacggggctgaccccgcagctggcggcgcggctggccaaccgaatgcagcgctacgccgtgcagcactcgcggctgggcattcccctcttcctcgccgaggaagccccccacggccacatggccatcggggccacgacattccccacggcgccgggacaggcttcgacatggaacccggagctgatcgaacgcatgggcaaggtcatcgccgccgaaatccgcctgcagggcggacatatctgttacggtcccgtgctggacatcgtgcgcgacccgcgctggtcgcgcaccgaagagagctacggcgaggaccgttacctgacggcgcgcatcggtgaagcctatgtccgcggcacgggttccggcgacctctcacagccgcggcacgccctctcgacgctcaagcacttcatcgcctacggcgcatcggagggcggccagaacggcggaagcaacctgctgggcgaacgcgaactgcgcgagacctacctgccgccgttcgaagcggccgtaaaggccggagcgcgctcggtgatgacggcctacaactcggtggacggcattccctgcacggccaaccgccgcatgctgaccgacatcctgcgcggcgaatggggcttcgacggcttcgtggtctccgacctgctgagcatcgaagggctgcacgagacgcacggcgtggccggaagcgtccgggaagccgccgtgcaggcattgcgggcgggcgtggacgcagacctgaagggcggcgccttcgcctcactccgcgaggccgcggaagcgggcaacgtcgccgaagcggagatcgaccgggccgtggagcgcgtgctggccctgaagttcgaaatgggactgttcgagaacccctatatcgacgaagctgccgccgcggaggtcggatgcgccgcccactcggagctggcgctcgaagcggcccggcagtcggtgacgctgctcgaaaaccgcagcggcaccctgccgctcgatccccggcgcctgcggcgggtagccgtcatcggtcccaacgcagacaacatctacaaccagctgggggattatacggcccagcagacaacggcgaacaccgtccgggacgggctggaaaaactgctggggcgcgaccgcgtcgtctacagccgcggctgtacggtgcgcggcggcgatcggtcggaaatcgcggcggccgtctccgcggcccgcagcgcagatgcggcggtcgtggtcatcggcggatcgagcgcccgcgacttcgacacggaattcctgcaaacgggcgcggccaaagccgcgcacgacgaggtgcgcgacatggagtgcggcgaaggtttcgaccgagcgacgctcgcgctgctcggagaacaggaagagctgctgcggcgcataaaggcgacgggaacgccgcttatcgtggtctgcatcgcaggccgtccgctcgacctgagcagggcctccgaacaggccgacgccctgctgatggcgtggtatccgggcgcacggggcggcgacgccgtcgccgagacgatcttgggccgcaacaaccccgcgggccgtctgcccatcaccattccccgcgccgaagggcaaattcccgtctactacaacaaaaaacggcctgcgaaccacgactacaccgatctcacggccgcgccgctctatccgttcggttacgggctgagttactcgacattcgaatacggcggcctcgaagcgcggcagagcggcgacaacgtcctcgaagtcagctgccgcatacgcaacacctcggaccgcgaaggcgacgaagtcgtacagctctacatctcggacatggtcgcctcaacggtacgtccgcccagacagctcggcggcttccggcgcatccggctcgcaccgggcgaacagcggcaggtaagctttacgctcggagatgaagcgctggcgcttatcgacccgcagggccgccgcgtggtggaaaagggcgacttcgtcatcgccgtcggctcgtcgtcgcaagatatccgcctgcaaacaaccgtaacactcgaataacgtcatgaaacactttgcatacctgcttccggtctgctgcctgcttttcgcggcctgccggaaagactcccccgccaccgaaatcatcccggcgcccctttgcgtaaaagcgggacagggaacgttcgacctcggcggcggcatccgcatcgccccggccgacccgctgctccgcccggcggccgactacctcgcacaactgctccgggaggaaaacgtcgcggcggctcaggacgccgggaacgccaatctttcgctcgaactcgatccccggttgccgcagcagggctacaccctgaaaatcaccccggcgcggatcgaactgcgcggcggctcctgcgagggcgtcgtttcggcagcggcatcgctgcgccagctcctgtggagcggaaagggatcgctgccggcgctcgaaatcgacgacgccccgcgcttcgcatggcgcggcttcatgctcgacgtcgcgcgccacttcttcaccaaggaggaggtcatgtcgctgacggaccggctggcctgctacaagttcaaccgcctgcacctgcatctgaccgacgaccaagggtggcggatcgaaatcaaacgctacccgctcctgacccggcgcggggcatggcgcactccgaacaaacacgacagcgtctgcctgcggcgcgcggccgacgaacgcgacccgaaattcctcctcccggagaaaaacatacgccgcgaacggggcgaaatccgctacggaagttactacacgcaggacgacatccgcgagatagtcgcttacgcggcacagcgcggcatcgaggtcattcccgaaatcgacctgccggggcactcgctggcggccatcggctgttatccgcagctggcgtgcgacggccgcggcggctggggcaaacacttttcgacaccgctctgcatcggccgcgacagcacgatcgcattctgcaaaaacgtgctgacagagctgttcgatctctttccgtcgcaatacgtccatatcggaggcgacgaagtggagcacacgccgtgggagacgtgcccggactgccagcagcgcatccgggccgagaagctggaaggcgcaggcgaactgcaggcatggttcacccgtgaaacggagcagtttctggcggcacacggcaaaacgctgctcggctgggacgagatcaccgaagacgggctgaccccgcagagcgcggtgatgtggtggcgcagctggatgccctccaccctgaccgcggcgctccagaacggacaccgcgtcattgagtcgccttcggaatttctctacctcaacggcgaactcgaccgcaacacgctcggcaaggtttacggctgggaaccccttccggaatccctgcgggcatgggaagagggcctgctcggcattcaggccaacatgtggaccgaggatgtcccgacggccgacgcggcgggcgagcggctcttcccgcggctgctggccgtggccgagacggcatggagcgctccggagaagcgggacttcgccgatttccggcgccgtctccccctgcacctgcgtcagttggaacgcgcaggctggaactaccggctcgacgacgtcgagggcgtctgcgacgacaacgtcttcatcggcgccgctacggtacgcctgctaccgcccgaatcggccgaactgtactacacgctcgacggaacggttcccgacaccgcgtcgcaacgctacaccgcgccgttcagcatcaccgacagctgcacgctcacgctgcgctgctacaaccgacgcggcgtcgcggcagagattcgccgggcctcgttccgccccacgcgctacgccgaaccgagcgccgatgccgggaacctgcaaaacggactgctggtgcgctggtacgattacgacggcgacaactgcgcggatatcgacgaagcgcccctgcaggcgaatttcatcaccgacagcgtcgttattcccgacggcgtgacgggcaacatcggattgatctgcgacggctatatcgacattccggccgacggcatctattcgttttacacctattccgacgacggaagcacgctcgccatcgacgggcgaacggtcgtcgacaacgacggcctgcactcccgcaccgaacgcagcggacaggccgccctgcggcgcggcgtgcactccttctcgctgcgctacttcgacaccaacggcggcgtactggaggccggaatcatcgactccgaaggccggcgcatcccgttttcgagccggatgctgaaacactgagacaaaaccgcttcccgaaaccgcacgcacggacacgctccctaacggccgcaaagggcaaccgatccgcacggcaggcagtcccgcagagacggctgcttaccctccggaaaatgcaattcacccgcgctgcgatgtgttgcagcgcgggtgaaatcgtaaaatcagaactcgtcagacagcctcttggcattccggccccggattcagtcatctttttttgccggacttcgagccgttcgcggacttctcgcgctcctcgcgggccttcatcacctccttgcgggattcgaatttctcgcggcccgacaacacgcgctcctcgtagcggcgctgctggaatcggccgacccagtcgggcgcaagcacgatcgccacatagaatccggcctgcatcatgcaatagaatgcgatctgaagccacaaactgccgtcaagcatgccgtcgagcagccaatggccgggcagcggaaaaaagcagaacagcaccagcagcagggccgtgtccagccgctcgctgcgcgaccagcccagacgccgccaatagatgaggatgaagagcaggttgaggcacagcatccaagtgaccagcatgcgcggcgaaagcgccgccgtttcgggcctgaacagcacggtccaaagccccggcactacaggaagcagcacctgcatgcacaacaatagaattttccgacgtttggttttcataggcgcacaaaaatcggcaggtctccgcctgcacgaaaagacacccttaaatatatgaaaaaatacggaacggcacaaacattcggttctttttctgcaaactgcgacggcaggcagctccggttccagccgggaaatatccggaagcggacgggatacccgaagttgcgcaggacaaccggtatcggacgagacaacaagagccgaacgagaacaacagacaactggtcggaaacaacagataaccggccgggaacaacaggcaaccggccgggaacaacaggcaaccggccgggaacaacagacaaccggccgggaacaacagacaaccggccgggaacagccggcaccgcaccggaatatccgaaacctatgagaacacaagtcccggcgaccgaaaaggccgccgggaccatagaatgtccgtaaaggttaagtcactgaatcccggacattgcccgtgcgttgcacgcacgggaggataattccggaatacggagcgccggacgccgccgaagcctatcccagcttcatcacgtcgtcgatacccatatccttataagtggtcgcaagctcctcgctgcggtccgaaatgaccagcagtttgtcgcccagcagcagttcggtcttgccctgcggcacgaaatactcgccgttgcggcagaccatcatcaccagcgtattttccggcagcgtgatgtccttgagcatgtgcccgctttcgagcatcgtctcattgacctccacctccgtaagggccgacttcatatcctgatgcatatcgacgctgaaggccgattcgcgctcttcgtaagccagccccagcaggttggccatgccgctcacggtggtgccctgcaccagcagcgaaatgatcgtgccgaggaatacgacgttgaacagcagtcccgcgttttccacatgcgccatcaggggatagatggcgaagagaatcggcacggcgccgcgcagtcccacccacgacacgtagagccgcgccttggtggtgaacttgcggaacggggccatgcagatgaagaccgtcagcgggcgcgccaccagaatcatgaacgcccccaccagtccgcccagaatcagcacacggggttcgagcagttcgttgctgttgacgaacagacccagcgtgaggaacatcacgatctgcatgagccacgtaaaaccgtcgaagaagaccgtcagcggacgtttctgctgcaacttgtagtttccgacgaccagccccgaaaggtagacggccagatagccgttgcccttgatcaggtcggtgaaggcgaacgagaaaaagatgaacgccagcagcaacaccgagtagagcgaatggttggcgaggttgatgcggttgatcgtccagacggccagacggccgatcaggtaccccgacagggcgccgacgatcatctgcacgacgaaaaacaccacgctcatacccatccccacgctgcccgaactgtgcgacaccacgctgatgagcagaatggtcatcatataggccatcgggtcgttcgagccgctctccagctccagcaggggccgcaggttctgcttcaacccctgcttcttgcttcgcaggatcgagaaaaccgaagccgagtcggtcgaggacatcgtggaggcgagcagcagcgccagtacgaacggcatcttgatccccagccacggagccaccagccacacgaacgaggccagtatgaatgccgtcatgaccacccccgccgtagccagcacgacgccgggtccgatgatgggttttatctccgagaacttcgtgtccatacctcccgtgaagaggatgatgcacaaagcgatcataccgacgaactgggtcatctcgaccgaacggaacgagatgaaattcaagccgaacagcatgccgactccgaggaaaagcaacagcgcgggtgcgccgaaacgatacgcgaccttacccgctatcaccgccacgaagagcagcaacgcacctaccaatactacattttcaccactgatgtctatcattccttaatctttttctttcaggcctgcgctttgccgacggccttcggttgcgttttgtccgcgatcttcagctccgtcagcggcttgtactccagatccgcatattcgaaagcctgcatggcggcgaagcggttgccgggcgtgcggtagagggccaccgtcagcgccggaacctgcgcacgtttcatgccgagcagacgctccgcatctccgtccgagacggcctgcatcacgtcgctgcggatgccgcggtcgaaataaagctcctcgtaaagcaggaaacaacgctcctcccggtggaaaggcgccccgcccgaaccgaacatctgggccgcagccataatcatgcctgccactaccagaattccgccgatgaacacgatcgacgaacgcaggttgttcgtgaggtcggcgccatacatgttattcactacgatcatcgctgcgccggcaacaaacagcacggcgggcagcagttggaacttgcggcgtttcaccacaacatttcccggcaaggcgtacagcgcctcgcagattttattcttatccatatctttttcattatcaaacgttagtattttatcagagaaaccggcaaaatacacacgctaaataatgagccggcgcagacggtagacatagtaatccaccgcatgcagaccgacggacaggtcagaagatttgaattccgaggttgctttcgcgcttcccctcgcgtgccggtccgcggcatagcggtcggcggccggaccggattcggcatgaccgccgcgctggaagaccggagcggccggagcgggcgacacctccccaagcacgcggggcaggttcaggtcggcgttgtattcgcgctcgcaaagccacacggcgtcggaggcgcgatcgaccgaaagcgtgacggagacatgccctgcgtcatgcgcaagcgtccggccgccgcccccgcaaaagagcagacagccgaaaaggcccaacagtatgacgacaattttacgcatgcccgattcggtcggcggcaggagacagagacggcgcaggccgcatacaggccgcatcggatcgccgcaggcgaaaccgctctgtccgagccggaatttacttcggcaaagttaacaatttccgcggaatatcccactccggccgggcaaaaagaacttattgcgggataaaaatgtacgtaatcgtcccctgctggcgcgcaggggccgactggtcgatattgaagcgcgaaacccgcgccgcacgcagggccgattcgcgcatgcactcgtcgccgccgctctgcacacgggcgttgaccacctcgcccgcacggttgaccgtgatttcgacgaccacgtcgcctccgccctcgcagcggtaggccgggatattgaggctacgcgaggtgcgcaccggatcggtcagcgaaaaggagaccgtcacgcggcccttgaccttgcggtcctgacgctcctcgtccttccccgcgccgttgcgctcgcggatggcccgctcttcggccagcccctgctcgtaggcttcgcggttggcctgcatgcgccgctcggcttcggccgcggcgtcgttcagcgccgcggcgttggtgccgcggtcgtcgcggagtttctcgttcagggcgttttcgttggaaacctgattctgaacgcttttccagtctatcgggtcctgctgctgccgctcgcggacctgctgttcgagccggtcgcgctccttctccagttcggccagcgtctgcaggtcgataaacattccctgcgtgtggggcctgcggccgacgacgatcttcgacgaaacgaaggcgatcatcagcacaagataggctataatggtcacgcacaagccgatgcggtggtcgtaggcccacacgccggcatcctctttgcggttgtcgaacggcaatttgagacgcggacggcgcaccgtcttgggtttattgtcgggtatattctctgccatcggaggttgtcataattttgagcaaaaatagcgttttttaacgattttttcatatctttgggcgcaaatattcagaaacactgcttatgtcgacaaaacaacaaacgctgaaggccccgatctctttctccggcaagggcctccatacgggtgtcaaagtgaccatgaccgtgaaccccgccgatgcggacaccggaatcgtattccgccgcacggacatcgagggtcaacccataattcccgccttgtgcgacaacgtcgtagacacttcgcgcggtacgaccatcgaatccggcggtcaccgcgtaagcacgatcgaacacatcatgtcggcgctctggacgctgggcgtggacaacgccgtaatcgacatcgacgcgggcgaaaccccgatcatggacggttcggcctgcgcctatgccaaggccatcaccgaagtcggcatcaccgaccagccggccgagcgcaagttctaccacgtgaccgaaaagatggtctacacgatccccgaaaagggcgtggcgatcatcctctaccccgacgacgaattctccgtctcgctgcacgtggactacaactcgaaggtgatcggcaaccaatacgccaccttcaaccccggcgacaacttcgccgacaaaatcgccccgtgccgcacgttcgtcttcctgcacgagctggagccgctgatgaagatgaacctcatcaagggcggcgatctggacaacgccatcgtcgtggtcgagaaccccgttccggacgagcagctggagcacctcaagaagatcttcaacaagcccgacatcgagatcaacgcaggctacctgaacaacctcgaactgcgctgcaacaacgagctggcgcgccacaaactgctcgacctgctgggcgacttcgcgctgctgggcgtacgcatcaagggccgcgtctgggcaacccgccccggccattacgccaacacggagttcatgaagcaactcaagcacaccatccgcaaggccggcgagaagccccgttaccagtacgactgccgcaagccgcccctctacgacatcaacgacatccgccacctgctgccccaccgtccgccgttcctgctggtggaccgcattttccaccgcgacgccacctccgtggccggcatcaagaacgtcacgatgaacgagccgttcttcgtgggacacttccccgacgaacccgtcatgccgggcgtgctgatcgtcgaagccatggcgcagtgcagcggcattctggtgctgggcgacgtgcccgatcccgaaaactactcgacctacttcatgaagatcgacggggtcaaattcaagcgcaaagtcgttccgggcgacacgcttcagttcgaaatccacctgctggaacccatccgccgcggcgtggccgtcgtggaggccaaagccttcgtgggcgaaacgctcgcatgcgaggccgtcctgatggcgcaggtcgtaaaaaataaaaagtaaaggagatgatcagcaagctggcatatgttcatcccgacgccaaaatcgggaacaacgtcacggtcgagcccttcgcctgcatcgcgggcgacgtggttatcggcgacgactgctgggtaggtcccggcgcggtgattcacgacggcgcccgcatcggcaaggggtgcaagatccataccgccgcatcggtctcctgcctgccgcaggacctgaaattcgcaggcgaagtgaccacggccgagatcggcgactacaacgacatccgcgaatacgtgaccatcagccgcggcaccgcatcgacgggcacgacccgcatcggcaaccgcaacctgctgatggcctacgtccatgtgggccacgactgcgtcgtcggcgacaactgcgtgatcgccaaccgcgtatcgctcgccggcgaagtgcatgtcggcaactgggtggtgatcggcggccatgcggccgtacaccagtggacgcatatcggcgaccacgtcatgattcagggcggcgcgctgctggggcaggacgtcccgccgttcatcatcgtgcgcaacgacacgatgcgcttcgcgggcatcaacaagatcggactttcgcgccgcggcttcacgcccgaacgcatcgccgagattcacgacgcctgccgcatcctcttccagagcggactgaactacatgtcgggctgcgaagaggtcgaaaagcagatcccgcaaagcgccgagcgcgacgaactggtgaaattcatccgcgaatcgaagcgcggaatcatcaaaccctatgaatccaaggccaaagaggagtaaaaatttcgtataaatattggtatatcggaatttttcattatatttgcagtgtcgaaagacaaagcgaagcggtaaggggacggtaagtccccttattttataccatatacgaccgaatttcagaaacatgatcgacacgaaaaagataatcgaagcggctgaacgcaaacttcagggcacggatatgttcgtcgtgggctgcacctgcacgcccggcaacgagatcgaactgctgatcgacagcgacacgtcggtagccatcgaagcgtgcgcggagctgagccgggccgtcgaagcggaattcgaccgcgacgaagaggatttttcgctcacggtagcctccgcaggcatcggttcggagctgaaaagcctgcggcagtaccgcaagctgatcggcggcacggtcgaggtgctgctcaattcagggatcaagatgctcgcaaaactcgacgctgccgacgacgagggcatcacgatctcgtacgaggagaagcaggccgtcgaaggcaagaaacgcaagcagctggtgaccgtcacgcgccgctatgcgttcgacgaaatcaagtccacgaaggagtggctggatttcaaataggccgccgtccggcaacgcagacagcaaacacaggctgagaaggcagaccgggagcaggacaaaaaccggaagcaggacgcagatgagaggcaaacgcagctgaggggcggtacgcaggtttggagcgatacgcaggtttggagcgatacgcaggcgagcggccctcagacaagaagcagcccccggaccgggacgctatccggcatgcagacgaaaaaagccgcggattacagaagcataaactaaaaacaagataaacgacacaatggacaatctcaatcttatcagcaactttgccgagttcaaagagctgaaaaacattgacaaaagtacgatgatcggcgtgctggaggacgttttccgccacgcactgcaaaaacagtatgagacggacgagaatttcgacgtcatcatcaaccccgaaaagggcgacctcgaaatctggcgcaaccgcactgtcgtcgaagacggcgccgtcgaagatccgaatgcgcagatcgccgtttcggaggtcaaggccatcgacccgacctacgagatcggcgacgaatacgccgacgagatcaaactctcgtcgttcggccgccgcgccgtgttgtcgctgcgccagaacctcgcctcgcgcattctcgatctggagaaggccagcctttacgagaagtattcggaaaaggtcggcgagatcgtcaccggcgaagtttatcaggtatggaaaaaagaggtgctgattctcgacgacgaggagaacgagctgattctgcccaaggcggagcagatacccaacgacttctaccgcaagggcgataccatcaaggccatcgtcaagtcggtcgagatgaacaacaaccagccccgcatcattctttcgcgcactgccaaccagttcctcgaacgcctgttcgagcaggaggttcccgaaatcttcgacggactgatcaccatcaagaagatcgtccgcatccccggcgaacgcgccaaggtcgccgtggagtcgtacgacgagcgtatcgacccggtaggcgcatgcgtcggcatgaagggttcgcgcatctattcgatcgtcaaggagttgcgcaacgagaacatcgacgtggtcaactacacggccaacccgtcgctgatgatccagcgcgcgctgaatcccgccaagatttcgagcatcaccatcgacgaggagaagatgactgcctcggtctacctcaaacccgatcaggtgtcgctggccatcggcaagggcggtctgaacatccgtctctcaaagatgctgacgggttacgacatcgacgtataccgcgaagtggaggaagaggacgtggccctcaccgaattcgccgacgagatcgacggctggatcatcgacgccctgaagagcgtcggctgtgacagcgccaagagcgtgctggagctgcccgtagaggagatcgcggcccgcgccgacctcgaactggagcaggcccagaaggtcgtagcgatactgaaggcggaattcgaagagtaatcacaagcgaaagaaaggaaaacacacgatatgggtaacgaaagaaaattaaggctcattcaggttgcaaaggagttcaaggtgggactgaataccatcacggacttcctgcagaagaagggtatcaagagcgacggatcgcccaacacgctggtcgattcggagacttatgccgttctggagaaggagttcggggcgaaccgcgccgcaggcaacgcacgcgattcgatccgtgagcgcatctccctgaagcagacgaccatcactctcgaagaagctaaaaagcaggagcgcgaggaggaaaaagaggtggtcatcaaaagcaacgtaatcagcgtcaaggatgaaatccagcagccgaagatcctcggcaagatcgacctgtcgcccaaacccaaggcggctccggctccggcccccgctcccgccccgaaggcggaaccggtgaaaccggccgaacagccccgtgcggcccagcccgcacccgccgctgcgcccgccgaagcgccgaaacccgcagcgaagcccgaacccgctgtcgagaaaccggcagctcccgaagtcaagacggcacctgcggctcccgcagcaccggctgcggccgcggcgactgcggcgcaggccgaaaccggaaaaccggctcccgcggcggtccccgctccggctgcaactccggctgcaactccggcaacgactccggctgcggcaccggcacccaagcctgaacccgcagcgccgaaagacaatatcttccgccccgaaaccgtgaccctgacgggtccgcaggtgctcggcacgatggacgtgtcgggattcgtcgccggcggcaagcataaacgcaaacgtctccagaaagagaaggtggacgtgagcaaggccccgaaaggcaatacgccgggcggcaaccgtcagggcggcaatcagggcggacagggaggccagaaccgtcccggaggtccgggccagaaccagcccagaccgggcgaaggccgccgcaacaagaacaagggcaaggcggctcccaagccgatcgtacgccccgaagtgagcgacgaggaggtttcgaagcaggtaaaggacacccttgcccgtctgacggccaagggcgccaagagcaaaagtgcaaaataccgcaaggacaagcgcgacgccgtggccgagcgtatgaacgaggagttcgaacgcgaggaaatggaacgttcgacgctcaaagtcaccgaattcgtgaccgtgagcgagttggcgacgatgatgaacgtcacgccgactcaggtcatcacggcctgcatgaatctgggactgatggtgtcgatcaaccagcgtctcgacgccgaagcgctcgtggtcgtggccgaggagttcggctacaaggtcgaattcgtctcggtggagattcaggaggcgatcaacgacgacaacgaagacaaggaggaggacctcgtgccgcgtccgccgatcgtgaccgtcatgggccacgtggaccacggcaagacctcgctgctggacaatatccgcaagaccaacgtcatcgagggcgaggccggcggcatcacccagcatatcggcgcctacagcgtcgagctgaacggccagaagatcacgttcctcgacacgccgggccacgaagcctttacggccatgcgcgcccgcggcgccgccgtcaccgacgttgcgatcatcatcgtggcggccgatgacagcgtcatgccgcagaccgtcgaggccatcaaccatgcgcaggccgcaggcgtgccgatggttttcgccatcaacaagatcgacaaacccaacgccaaccccgaccacatcaaggaacagctctcgcagatgaactatctggtcgagtcgtggggcggtaaatatcaggatcaggaggtttcggccaagaagggcatgaacctcgacaaactgctcgaaaaggtgctgctcgaagccgagatgctcgacctgaaggccaaccccaacaagaaggcgcagggcaccgtcatcgaatcgacgctcgacaagggccgcggatacgtctcgacgatcctcgtgcagagcggtacgctccacgtgggcgacgtgatcctctccggaacctacacgggccgcgtaaaggccatgttcaacgaaaacggcaagaaagtggagtccgcaggcccctcgacaccggttcaggtgctgggtctgaacggcgccccgcaggccggcgatacgttcaacgtcatggaggacgaccgttcggcgcgcgaaatcgccaacaagcgcgagcagctgcagcgcatgcagggcatcatgacccagaagcacgtgacgctcgacgagatcggacgccgcatcgccatcggctcgttcaaggagctgaacatcatcgtcaagggcgacgtggacggctcgatcgaggccatgtcgggttcgctcatcaagctctcgaaagagaccgtgcaggtcaacgtcatccacgccgccgtgggtcagatttcggaatcggacgtgctgctggccgctgcttcgaacgccatcatcgtcggcttccaagtacgtccgtcggcttcggcgcgcaagctggccgagaaggaggagatcgaaatccgtctctactcgatcatctacgacgccatcaacgacatcaaggacgctatcgagggcatgctcgaaccggtcatgaaggaggagatcgtcgcttcggtcgaagtgctggagatcttcaagatttcgaaggtcggcaccgtcgccggatgcatcgtccgcgaaggcaggctccagcgcagcaccccgatccgcgtcatccgcgacggtatcgtcatctacacgggcaagctcggctcgctcaaacgtttcaaggacgacgtcaaggaggtcaccaacggtcaggactgcggtctgaacatcgaatcgttcaacgacatccgcgtcggcgacatcgtcgagggatacgaacaggtcgaagtgaaacgcaaatagctacgctatgctgccgaaacgtctgattgttttgctgatgtcgctctgcaccctgtgcggagcggcatcggccgttcagccccggaccgacctcacgcagaaggagcagaaggcgctgcagaaggctcagaagaagaagatccgtcaggaagcccgccgcttcgagagcctgcgcaacgacgccgtagtgcagttcgcccgcgagcaccagccctcggacatcagcaccccttcgttcgtgaacgacttccggatctcgaacgtcatctgcgccggagacaacatctccggcaccgtcatgctgcatttcgacatcacgccgctttacggcggcttccggctctacatgggcggcgaacgcaacggcacctacgcctttgccaaaggcgtcgcctacccttcgtcggaccattacggccgcatctacacgatgcgcagcggccagcccgaacatatcgtggtgacgttctacaacatcgcgccgggcatggagcggctcgaccgcgtggacgtcagcatgggtctggcgctcaacgcgctgaacatcatttcgatgcgtaacgtgccgatcttctggacctactccgacaaagccatcaaaaactacgtacaggaaaacacaaacaaggtaccagctaactaaaaccaatacaaacttaaagtaaaaatgactacccagatcaaatttaccactgccgaagaagccgtcaaggttatcaaatcgggcgaccacgtacacctgagttccgtggcttcggctccccagtgccttatcaacgccatgtgcgcgcgcggcgaggccggtgaactgaaggacgtacacatccaccacctgcacaccgaaggccctgcgccctatgccgacgagaaattcgaaggcgtgttccagctcgactcgttcttcgtgggcggcaacgtccgcaaagtgacgcagagcggctacgccgactacattccgattttcctgagcgagacgcagcgcctgtaccgctgcggcgcggttccctgcaacgtggcgatgattcaggtatcgacgcccgacaaacacggcttcgtatcgctcggcacctcggtagacgcgacgctggccgccgtggagaccgccgattacgtgctcgccgtggtgaacaagcacgttccccgcgccttcggacaagccatgatccactcgtcgaagatcgactatttcgtgcaggacgacactccgctgatggaggcgcacttctccgagccgaacgagaccgagacggccatcggcaagcactgcgcagccctgatcgaggacggcgcgacgctgcagatgggcatcggcgccattcccaacgccgtgctggcgcagctgggcggccacaagaacctcggcatccataccgagatgttcgccgacggcgtgcttccgctggtggagagcggcgtaatcaacggcgaagccaagaatatcgacaagggcaagatggtctcgacgttcctgatgggttcgcagcgcgtctacgacttcatcgacgacaacccggccgtattgatgatggacgtgggctacaccaacgatccctacatcatctcgaagaacgaccgcgtgacggccatcaactcggccctgcaggtagacatcactggacaggtatgcgccgactcgctgggcacgaagttctattcgggcgtcggcggccagatcgacttcgtatacggcgcatcgctctcgaagggcggcaaagccatcatcgccatgccttcggtcaccaacaagggcatttcgaagatcgctcccgtgctcacgccgggcgcaggcgtcgtcacgacccgcaaccacatccactggttcgtaaccgagcacggcgccgtagacctctacggcaagacgctgcaggagcgtgcccgcctgattatctcggtggccgatccttcggctcaggaggagctggaccgcgccgctttcgagcgtttcggccagcaccaccactacgtaaagaactacatgagcaagtaataaattattacgcaatcgagaagcgcccctgttacagcgggcgctttttttgtatctttacgcaaacaaaaacaccccgaaatgaaacgatacgcctgtatactgcttgcactcctgttcgccggatgcgccgcgtcccgcaggagcgccgtcgcaaccgctccgcaggagaaacaatacgccgtcattctttcgatggacgcattccgctgggacctcgcaggccgcagccacacgccgacgctcgattcgctcgcccgcgtcggcacctatgccgaaatctacccagtctatccctcgaacacctttccgagccattacgccatggccacgggcctgcaccccgaccaccacggggtcgtgaacaacggcttctacgatcgcacgcagggacgccggctctcggttttcgactcgctggacgtccgcacaccgggattctggggcggagagccgatctggaatacggcggaacggcaggggcttacggccaacatcttcatgtggccgggcagcgaagtcccgatcggcggccgtcaggcgaccgtctggacccgctactcgtccaaaccggactactaccagcgcgccgactgggtgatcgacgccatgacgcgccccgaagcggagatcccgcagctggtgatgtggtacttcgaagaacccgacgccgcgatgcacacctacggccccgaatcgcccgaagccgtgggccgcgccgagcacatcgactcggtgctccgctacttcttccgcgagatacgccgctcgcccgtcttcgaccgcatcaacttcatcgtcacggccgaccacggcatggccgagctttcgcccgaccgctacatcaacctgctgccgctgctcgacacggcgcaggtcgtgcgcgtcgttccgggcacgccgttcggtctcgaagtcaaggaagagtatgcggaccaagccgtgcgcacgctgcgccgcacgggccatatgaaggcatggcggcgcgagcggatgccccgccggttccactacggcacccaccccacgcgtctgacgaacgtcatcgtcattcccgaaacaggctggacgctcgactacgccccgcaggagcgtcccgtacgcaagcgcggcacgcacggcttcgacaaccgcgaccgggatatgcacatggtattttacggctccggccccgccttccgcaagggctaccgacagcgatcgttccagaaccagaatatgtatcttatcctctgccggctgctgggcatcgaaccggcccccaacgacggggagtggcgcgacataaaacgcatgttcaacgaaaattagaaattatttttctatatttgtgaactatgaagatcaatcgtgctatatgagaatcagcacacccaagagcaggcaggatctgcacataaaaaagcgctaccgagtgcttgaaatcggaccgggcaacaatccctctttccgggccgatgtccttgccgacaagtttctcggcgacgactcccaccgcagcggaggactccgcatctatccccaccagaagctggtaaacgccgcggccgaagcgctgccgttcgcagacaaggaattcgactacgtcatctgcaatcaggtgctcgaacacagcgacgatcccgcccagttcctgcgcgaggtgatgcgcgtgggcaaggccggatatatcgaaacgccgagcctgctgggcgaatggctcttcccgaagcagtcgcaccgttacgtcgtcctctgcatcggcgacaagctggtgctgtacgacaaacagcgcgttccgggcaactatgccaacgactacggcgaactgttcctcaattacctgccctatcagtcgctgccctacaaattgctgccgttctccgagggagagctgatgcacgtgcgttacgaatggaaagacgacatcgactttctggtaaacccgacggacgaatactacagcaaattcttcctgaagaaatgggaccgccaaatggtctgcacgctctttccgccgcgcggattcgtcaccgaactgggacgtacgctgcgggccgcagcacacgtcatcggcgacaaactgcgccggtcgcagggacgccgtcccatcacgctcgaagagtacagaaagctccatccgggagaactcaggtagcgtcatcggcgcgcgcgttacaatttataatagcatcccctgcaaaaacatccggaaatttcggatgtttttcttatatttgtgcgtgcaatcctaaatcccaattgcctatgaagcattaaaagcgtattatgacttaattgcgaatcacttccgcgccgttccgcactaaaagcgccggcacatacatataaaaagcgttagctttgtaccttgctttctgaaaatctggaaaattttaagagcaaccaaggaatgaagtttgacgctcacgtttccaacgtgggcttcattctgtatttggttgcacaggttattccagagcctcagaaagcagatcagagttttgtcccacgttttttgtatccctatcccaaactcccacttacatatgccgggggacaggcattccgatatttgtcatgaacaactatctcctgctgatcggcatcagttgcctccctgccgtaacgggcatgtgcgccacgctgccgctctggtatcagaggcacctgcgtaatcagacgattcacacgctgggcctgacgctccttttcctcaccttggtaatctgcctgctgcccgtaatcacgaacgaaagttcgggaatcggattcgcggccatcgcactcagcagcatcaatttcttcctcttccgccattacgaacgcctgctctacacattacggtgccccggctgccgccgtgtagcgctccgcatccgcgccatacaccgcaaaacctacaagcttcactgcaagcactgcggactctataccgattggcacgcataaccgctcggctaagtcccaatgcgataagccgcgcagggagtcgcggaagaataagacaacagcctcagagatataaaacgccggcattaaaaagcatcatcgaaaaggcgcaataccgctttaccacggactgcgccataaataggaatacggccgccacggaccgtattgcaaatgggaaaacgggcagggcagctcttcccgaaccgtacaacgcgccccgtacttcggattagaacggctttcgccccgcgggaggatcttcggatcttcccgttttttcatactctaaaaacaaaaatacgggtttaatactgtcagtacgtattccctgcagcgttcgtattcgttatccgcttgcggtgtatgaatccctatctatacgcaaaagcagaagcgagagtgaaccgaacgcctgcgttaaccggctgacacagtcaagcgccccccccctatttataaggagacgcagcgtcggcaggtaaggtgagagatcgtaaaagccacgtcaacaggcgggaaaagcagggcttgcccccccccaagcaatctcggcaagcagggaaagccccctgtcacccagcaggccaataaggagcgttcccccgtatgcctgtatgccttggttcggattgtcctgcatcgcggtaagcagcatgaatatccccctgttcagacactatgaattgtta

SEQ ID NO: 12062 - DNA, 2163 bp, Unknown
  gut microbiota DNA sequence
gtgagaatgtcgatgtgtacaaattggtcggtgaaaatgatgagaatgtcgacctgtgatattggaataacggttatctttgctttacgaacataaactttaaaaaagaaatatcatgaaaagtgatccgaaagactgtctgtactgtcagaataatgaaacgttgcataatctgatgattgagattgcgcagcttagtgtgtcacgtgtcttcctttttaaggaacaaacttatcgcgggcgctgccttgtggcttacaaagaccatgtcaatgacttgaatgaactaacggatgaggaacgcaatgcttttatggctgatgttgcccgtgtgactcgtgccatgcaaaaagcttttaatccggaaaagattaattatggtgcgtattcagacaaattatctcatcttcattttcatttggcgccgaaatatgtagatggtcccgattatggtggtactttccagatgaatccgggaaaggtgtatctgacggatgtcgaatatcaggaattggttgaagcggtgagaagcaaactttgaaagagaatgaagtataaagtataaattggcaatgagcatgatttatgaatgacaaatggttatgtaatatcatagcatagccatttataccttatacttcgtattttatattttatttaaaattttgtccattacccagtttgtcagtgttgcgctttcgccatcgcagttacagattgatttgccaagtaaatggtctacaacagcttgaataagcggttgctggacgtaaatggggttttctacagggatttcttcccttcctcgttcggtgtgtaaggctatgggatcataggtaaatacagaaaagcatatcatacctttgtctccgatgatttcgatacggtcttcacgtgcagactcatgtgcaacgaaacaccacgagccgctgcctaccaggccgctgtcaaattggaaacaggcactgagggtatcctctgcagaatatagtccgccacggttgctcttgtatccgttggcttcaagaatatatccgaacatatcttgcagtatgtctatctggtgtggagccaaatcataaaaataaccgccaccggcgatatcgggctgtacacgccagggtaggttctccttgttatagtccagatcgcggggtggctgggcaaagcgaatttgtatattgatgacatttccgatggccccttcttccaccaatgactttactttcaggaaataaggaagataacggcggtaataggctacaaaacaaggtatgccggtttcttgggaaatacggttgatacggcaacactcttcataagtcactgccatcggcttttctatgtataccggtttgccggctttcatggacataatggcatatgtggcatgggaagagggtggggtggcaatatatacggcatttacgtcttcatcattaatcagttcctgtgcatcattgtaccatttggcaatgcctctttctttggcataagctttggctttggagatatcccgactcatcacagctaccacttcggagtgttcaattttctgaaatgcaggtccacttttgtatttggtcacttctccgcagccgataaatccccattttattattttctcactcatacttgtatattattcttcaaagtcgaaatcaaaatcaaagtcatccacgaattcaggcgcagtgaagtcttccagttcacggcgatcctttttggtggggcgtcccgttcccttagcgcggttgataaatccgctgattttgctcatttccaacagttcatattgctctggggcggttatgttctccatcatttcgggaacaagcttggcgcctacacgcttttcaatagtctgtagtactttgaaagaataggtaaccggcggtttgcgtacttgtattacatctcccggcttcaccattcgagctgcctttgcaagtgcaccattgatactgatacgtccttttttgcaggcttcggctgcaattgtacgtgtcttgaatatgcgtacagcccacatccatttgtctattcttgcttcactcatttcttgttgaactgattcattgtaatgtctataccggcgagacagaaacttttaatgatttcgcctgctgttttcaggcgttcatccattgttttccagtcttc

SEQ ID NO: 12063 - DNA, 24353 bp, Unknown
  gut microbiota DNA sequence
gttcgaagaggggatcgaaaagaccgtccgctggtacctccagaaccaaaaatggatggacgacattacttcaggagagtatgaaaaatactaccagagcatgtataaggagaggtagatatggcacttaacggatgaacatcggctccgaaatgcaggaaataagctctaacaacaaacgaatagcaaagaatacgcttctgctctacttccgaatgcttgttaccatggcggtaagtctctacaccagccgggtggtattgaatattctgggggtggaggacttcggcatttataatgtcgtgggcggaatcgttgccatgttcggattcatcaatgggtcaatgacctccgcgacacagcggtacctgacctttgagctgggacagaacaatcggacgcaactgacaaaggttttctcgaccagcctttcaatacatgccatcatatcctttcttataatagtgctggcggaaacggtcgggctttggttcttatggaacaaaatgcagattccggccgaccgcatgaatgccgctttctgggtattccagtgctcggtagcggcatcggtgatcatgatcatgagcgtaccgtacaatgcggccatcatcgcccatgaaagaatgagcgcattcgcctacatatcgattatcgaagtctctttgaaattgctgatcgtctgttttcttcggtattttcacaccgacaaactgatattgtacgccgcgttgatcgttattgtccaactcgtcatacgtctatgttacagctggtattgcaaccggcatttcaaagagacgaaatatcgttggatatgggataagacgctgttttgcgaaatgacaggcttcgcaggctggaatcttttcggcaaccttgcggccattacatttacgcagggactgaacctgctgctgaatatgtttttcggtccggttgtcaacgctgccagaggtatcgccgtgcaggcccaaaccgccatcggtcagttcagcagcaacttccaaacggccctcaacccgcaaataaccaaatcgtacgcgaccggcgacatggaatacatgcatggcctgattttccggagcgccaaattttcatttttcttgctgctgctgttatcgcttcccgtccttctcgagacaaaagcgctactgacactctggctgaaaatcgtcccggaagatacggtcgtatttttaaggatcatgctatgcataacatggatatatgcaatctccaatcctttgatgactgctgctgccgccacggggaaaataaaactttaccaaagcgtcgtcggagggctgctgctgctgatcctgccgatttcctacgtttgtctgaaatgcggattgcctgcatacgcggtctttgccgttcatttaggtatagaaataatagcccaattcgcccggctgctgatgctcaaaagaatgattaaactttcactgcgagaatatttcagtaaagtagtgtggtgtattttcaaggtaacggcaatcgcgcttgcagtaccgcaggcagtaatatattgccacccccagcacggagtatggaatcttttgatggtatgcctcgtatgtaccctatcgacaagcatctccatctattatttcggcttgacatccggtgaaaagactttcatctcttcaaaaatctcagccatattggcaaggctaaaacccaaaaccaaagactaatgcatcgtattccctatttcgacttcctgaggggcatcgctatcattatggtggtatgcctgcattgcatcgactattccgccatggaaggccccgttctgaatcttttcggagtggaattcaggaacctgctgaatgcggccgtcccgctgtttctggcgatatcgggttatttcatggcaaataaaaaaacagacaccccgactgcatataaagagttcctgaaaagacaggcggtaaaggtatacattcccatgctggtctggtcggttccctatctgatccttgcatacctgcaccgggaaaactccgtgacctcgtggctactttatttcttcggcggattctctatctactacttcatcatcctgatcgtacagtattacgcactgctgcccttaatgcagaaaatgggacgctccctaagggggggggtgctggcagccgtcacaatcagcatcacctgcatcacctgcatggaaatcctgctttatgtatatcggatggaaataccattgatcgtatacgccggaccgttcccgctatggatcatgttcttcgtgaccggaatctatctacgtaaccatacggttcaaatgaaatacgtttacccgctggtgattcttttcttcctgctgtccgtcgcagaaagcttcgtcatcatgcactacatgggacaggtaacaggactcggcatcaaagtcttttcgttccttttttcactttatttcatcatcatgctgtttgcaagtcccctgcaacgttatctaactgcccgtaaagatcgcttcattgtccgcagcatcgccaaggtcggggaaatatccttcggcatttatctgatccacatgctggtcaatatggtactgaacaaattatgcggctaccacgacttcaatttcatattggttctgacaataagtattgctgtcatcgttgccaccatgaaattggtgccgacttccatccgtaaatacataggcttttcataacatgatcgaaatccggaataaacgggattgctgcggttgcaacgcatgcgtacaaaaatgtccccagcagtgcatcggacagtccgaagacgccgaaggattcatttaccctcaagtagataaggcccggtgtgtaggttgcggcctatgcgaaaaagtatgtccggtcatcaaccagaatcccaaaagcaaacccttgaaagtcatggccggccgaaacggaaatgaagaaatccggatgcagagttcctcaggcggagttttcactttactggccgaaaagatcatcggccggggcggggttgtcttcggtgcccggttcgacgagaactggaatgtcgtacacagttacaccgaatgtacggacggactggctgcattccggggcagcaaatacgtacaaagcaggataggggaaacattcaggcaagccagagaattcctgcgacagggccgcgaggtactattcaccggaaccccctgccagattgcaggattgcataggttcctcggaaaagaatacggcaatctgttcaccatggacatcgtatgccacggagttcccagcccggttgtatggaaaaaatatgtgagaaggctcgtcgccgattcgccttcagactacaggctcgacggggtttacttccgtgataaacgcactggatggaaagaattcagtttctccgctcacctttcatctttagaaaaatcgactctacatactgaaaagttttaccggaacaagtatatgcgcggattcctcgccaatttatatctgcggccatcctgtcatcaatgtccgtcaaaatcaggcaaatccggggccgacattacattggcggacttttggggaatcgaacatatcgtaccaagcatggatgatgacaaagggaccggattgatactggtcaatacggccaaagggaaatgcatgtacaataccttaccaattatttcgcaagaggttgaatatgaacaagctcttaaagggaatcatgtgattgaaatttcagttcccattccttcgcaaagggaatgtttttttgacaacttcggaaaagagaattttttccggctgatagaccgtcttacaaaagaacctctcaagacacggttacgtcgggcagcgggccggttcattaaacgattacgatgaaaataggcatattgacccaaccgctgcagaggaattacggcgggatactccaatgctacgcgctgtgcgaagtattgaagggattggggcatgaagtgtgcgtgctggacagacaccaccatacccctttcctgcgaaaattgctccgcagcgcaaaaagaatactacgctattgcctcggcgcagaaaaaaaggaaaacatcttgtccatatggatgaccgccggtcaaatgcggacaatcagccggcatacctcggcgttcatcgacaggcatatccctcatacccggccgctcttgaggacaaaagaactccggcaggccgccggcaacgagcacatagatgcatatgtcgtgggtagcgaccaagtatggcgtccggtcttctccccctgcatcaccaattattacattgatttcgaccaacgggaccatatcattcggatcgcctacgcggcatcgttcggggtcgacacatgggaatacgaccggcaagcgcaacaggtgtgtgccggttatgcaaaaaaattcgatgccatatccgtgcgcgaggactccggagttacattgtgccgaaattatctgggagtcgcggcggaacatgtcctcgacccaacaatgctgctcaggcgggaacaatatgaaaaactggcaacggatcggcacgcccttgcaagcagagggaacctgttgacctatatcctcgacccgtccccggaaaaatcaacgatcgtcgggaacgtgtcccggaaattgggtctgactccgtttagcgtgatgccgtcccgggaagcggacgtcctgaactgcgcaatgtatccggaagagtgtacttcccctgcggtagaacagtggctgcgcgggttcatggacgcccggtacgtcattgtcgattctttccacggctgcgtgttctccatcctgttcaacaaaccgttcatcgccatagccaactgcagcaggggcgaaacccgtttcacgtccctgttaaggacgttcggcctcgaaggccggttgattcataatgccggggaattgaccgacagcctgataacggctccggtcgattgggagcgatgtaacggaatattacagtcggagaggaaaaaatcccttcttttccttcgaacaaatcttaacaaatagacatggagttttacatttaccttgctttgatcgtactctttttatcgctcgtaaaaagggccaacaacaaagtcgtatacataggagtcgctttcgccttgttctttctggctgcctaccggagtctgggagtgggaacagattccgaggcgtattacacaatatattatcaatatgccaataacgacgcctacgtagcagccaacgaaaattataaaaccgcggaattcatctggctggcaatgttaaggtatttccgcaatgcgaacaattataggggattgctggtcatgttggctgccttgaatgccataccgctcttctatgccctcaataagcaaagcaaatggccgctgttctcggttttcctttatatctcgctgtacttttacgggaactccatgaacgcgatgcgccagtcggtggcaatgtccttcctgttgttggccatcccctttttggagaaagacaaaaacaaatactacctgctgctgatgctattggcaatggccatacacatgtccgcattatatgtcttcctgctcgtctgggtgttttataaagcgaacttgaatttcgacaacaaactcaaatatgcgctcgcaatagccatcagtttcattatcggcatgttctttacggcatggttcaaggagactctcaaacccatagccaatttattcgcttcgagcaactatgactattacctaagcgggggaaccgttaacgaatcaaggaacctgctctccaaccttggactcaatctgatagccgtattcatgctgtacatcaataaggacgcgaacaatatatatttcaaattatatatcctcggagtaatcatggtcaacttacttgccggactgggtgcattttcaggccgtgttgtcagttatttcagcctgatgcagatcgtggctatcccgaaccttctatatctggtcaaaaaaacattccagaaatatttgtataccgtgatattcattgcgtatgggctttccgtctatatttattatctctttaaaaatctcagcgagatcgtaccctattccaatatattcagtaattaaccgctctgatgttctccgttgtaatccccttgtataataaacaagactgtatccgcaataccgtacagtccgtattgaatcaaacgttccccgattttgaaataaatatcgtagacgacggatcgacggaccgcagtttggaaatcgcacgccaattcgatgatccccggatcagggtcttttccaaaccgaacggcggcgtatcgtccgcccgcaattacgggataaggcaatcccggaaaaagtatattgcgtttctcgacgctgacgacctttggtatccggattatcttagcgaaatcgcacgcctgatagataagtatcccggatgcggcatctattcggctggatacattttacggaaaaaacaccggaagatccgatatgcctatccgaccgaaggtgtcatacaagattatttcaaagaatacttcaaacacaaaagtccattttgcaatgcttcgtgtgctgtaatcccggtggaagctttcgggaaagttggttattttccagagaatctgcatacaggcgaagacttgtatatgtggatggccatcgccgaacactataatgtatgtgttacgccaaatatcctgatgagttacgaatatcaggaatcgacattcaatgaccgcctcgaaaaaaacatatatatacaaggtgatttattcaaaaagctctgcaagtgccaaaatacatatctgaacgaaatcattgcacgtttggtaattacagacgctatttttcaggcattgagaaataataaagacgtatcgaagagtgttgagaaaaaattcaattacaccaaattcaacagaacagagctattatatcttcgaattctgaaccgaaccccggcttggagcaacaagatcatccgcaacggatggaaattaggttcagctattaaaacctatttattaggggtaatgggaagatagagacacaaaaagacatccaatgagatcgccccatatctatgaacaaacaaaataacgatccatgcgaattttaatattgaatccgattctttataccgccgaaaacaatacaatcccgaccgtatcttcaattaaagacacgatgatctacaatttatgtcttggatttaaacaattggggcatgacataacattggcggcagcaatggaataccaaccatgcaagaaagaagaatatgattttaaaattttgtttttcaaatcggacttgaaaagaatctttccaccgtccgtactcccgttctcacgagatctgtggaaacacctaaaacagaacagtcaacaatacgatctcataatcagcagcgaggtattttcttttcaaagtctatttgcgtcgctattataccctcgcaaaaccataatatggcatgaattggcattacatccccaaaagctatataaactaccatccaaaatatggtacaactttatagcaccagtatttatcagaaagacattggtagttccccgctccaaagccgcatataatttcataaaaagataccataaaaaaacaacgactgaatgtattgaacatggagttaatatcgagaaatttgcggtatcggcagaaaaaaaagattttttcatcgtcatttctcaattaatagaacgtaaaaacatttcctcgattattacgaaattcgcagccttgataaaggataaacaatataaagactttaaattgtatgtcataggacaaggccccttggaggagcaactcaaaagacaatccataatttccgacacacaaaacaatataatatttaccgggttcctgccccatgtccaaatgagcgaatatacagctcacgcaaaagcgttattgatcaatacataccaagacaataacatggtttccattcctgaaacactctcctgcggaactccggtcatttcgaataccgttcctacgaattcctatattataaacagccatcaattaggtatagcaaaagataattgggatgaacacgatttgaaagagattattgcgaataattccttctatgtaaaaaactgcattgcataccgagataatctggccaacagccatattgcccagactttcctagacatctttcaggataaaaaaatagccgaaaatataaaataaaaacagatggctataaacagaatcaactggctatccgtccttcaagggtggagcatgttactggtcgtcatcgggcatgtgacattgacgaatgtgttccaagatcccgaaacccccgttagtgcggagatcgaacggatcatatacagttttcacatgccgctattcatgttcatttccggatttctgttttacctgacaaaaatagggcggaacaagagatacgtggagaccatcggagacaaggcaaaaaggttgctgatcccctatgccgcattcacctgcgcaacgttctttctgaaatatgccttcaatccgctaatgagacggccggtagacttttcatggtcggaaatcctcgacatagtcacgtttagatccaacccgttggctgaaatgtggttcatatcgactctcttcgttctgttcctgttcttccccatatacaaatggtcgctgggcggcaagatgaaaagcgttctcatgttttgtgccgccctgcttatctatttcttcttcccgaaggatatagaactattctgcatttcatatgcgtccagctatctgctctttttttatgcgggaatattgatctccaaatacgggggggggaaatttttggacactcccgtgctcctttggtgctgcacggcattgatggtgggctgttcactgtatcccggcattccgctattgaatattttcgtcgggatatttttctcattgaccctttgcatgtttttatcacggcacttacccggccttttcggaagcttcagggagtatacgttccagattttcctgatggggatattcttccagatagcaatccggttcatctatgccaaactcggaatcgcatgcctctactggcctctgtatatcgtgagcatcctgctggctttgtatatgccggtactgatctccaaagccatccggaaaacaggcagcaaggcgctggccagatgcttcgggttataaagcccatcggcgttttcagcaggccggattgccttgacaattgcgtttcccaaatccatgatccatgaaaatactgttagccaataaattttattatccccggggcggggattgcacttacctcctgaacatagaggaactcttggagtcgcacgggcatgaaacggccgttttcgccatgcaatatccggaaaacatcccctccccatggagcggttattttccaagcgaaataaaattcacgcccggattgaaaatgctggaagccttcttccggccattcggcacgggagaggtcaagcgcaaattcaccaaactgctggacgacttccgccccgacatcgtacacttgggcaatattcatacgcaactctcgcccgttctcgccaagatcgcgcacggaaaagggataaaagttgtctggacattgcatgactacaaactcctgtgtccacgctacgattgcctgcgcaacggcgagataccctgcgaggcatgcttctcggacaaacacaaggtcctcgaatacaagtgtatgaaaaattcgcgcatagccagctacatcgcttatcgggaagccttgaaatggccgcgtgaaaaactggcgaactacacggatgctttcatctctccaagccggttcctgaaggacaaaatggtgcagggcggatttgcaaaggataagatacatacatgctgcaatttcataaataccgcgaaagtacgacgggaaaactatgacaaggacgattattactgttatgtcggccgactgtcgcacgaaaaaggcatcggaacgttgatcgaagcagcgaaaggactacccctcaaactaaagatcatcggcaacggtcctctgcaggagatactgacagcacaggctgcgggagcggatatcgaactgctcggatacagacaatgggacgagataaaggagattgtcggtaaggcacggttctgcgtactcccctcggaatggtatgagaacaacccgttttccgtcatcgaatctcagtgcttgggcacacccgttttgggcgcccggatcggcggcatccccgaactgatagacgaaggcaagaccggaatgctgttcatgcccggaaacgcagaagagctgaaaactcagatcgcccaaatgttcgcaaccccgttcgaataccggcagatcgcactcgacgcccagaaaagatattcggcagagaggtactatacagaacttatgaaaatctacaacaacatataagatgaatacccggaatatcccgcaccccaccgacgccagcattatcctgacctatcgctgcccgatgaaatgcaagatgtgcaacatctggttcaaccccacgaaaaaagacgccgagatcaaagctgcggacctccgtacgctgccgcgcctgaaattcatcaacctgaccggcggagaacccttcgtccgcgaggatctggcggaaatcgtggaagagtgctacaaacatacggaccgcatcgtcatctccacgtccggatggttcgaagacaaagtcgtggccttggccaaacaattcccgaacatcggcatccgcatctcgatcgaaggactgagctgcaagaacgacgaactgcgcggacatgccggcggcttcgacaaggggctgaggacactgctcacgctgaagcagatggggctgaaagacatcggattcggctgcactgtgtcgaacaacaattccaaggatatgctctcgctctatcagctgtcgctgtccttgggcatggagttcgctacggcggctttccacaactcctattatttccacaaggacgacaacgtaatcaccaacaaggacgaggtgtgcaaaaacttcgaacagctgatcgaatggcagttgcaggagaaccatccgaaaagctggttccgcgcatggttcaatatggggctgatcaactacatcgaaggcggccgccgcatgctgccgtgcgaagcgggttcggcgaacttcttcatcgatcctttcggcgaggtgtatccgtgcaacggtctcgaagagaaatactggcagaaatcgatgggcaatatccacgaaacgcccgacttcatggatatctgggagagcgaccgggcgcaggaagtccgcgccatggtccggaaatgcccgaaaaactgctggatggtcggtacggccagtcctgtaatgcacaaatacatgaaatacccgctgaagtgggcgctcagaaacaagctccgcagcctgcggggaaaaccggccagtctggacaagaagtggtgcgatgtcggccaagacccgatgcaaggcgatttgcgggaaaaattctaaccaagtcgtgaatgccaaaaagaatgaccgttttccggctatgaaaatagtcgtcaccggcacccgggggattcccggcatcatgggcggcgtggaaacgcactgcgaagagctgtttccgcgtatcgcccggaagggattcgacgtaaccgtaatacggcggaaaagctacgtgcacgacacgctgcggcaatacgaaggaattacgctcgtcgatctcgaaaccccgaaaaagaaatcgctcgaagcgatcgtccatacgttccgggcagtcctcaaagccaaaaagctgaaagccgacatcatccacatccacgccgtcggcccggcgctgctgacgccggtcgcacgcctgctgggactaaaggtggtattcacccaccatggaccggattacgaccgggacaaatggggtgcggcagcaaaaacggtactcagactgggtgaaatgatgggcacacgcttcgccaacgaagtcatcgtgatttcgaacgtcataaacgacattctgagccgcaaataccaccgcaaagagtgtcacctgatctacaacggggttccggctccccagatcgccgattttccggaatatttcgaagaaacgggcgtcgaaaaggggaaatacatcttcagcatgtgccgcttcgtcccagaaaagaacctgcaccacctgatcgaagccttctcgaagaccgacaacaaggggtgcagactggtgctggccggagatacggatttcgaagacgagtactccgcaggactcaaaaaatacgcacgggaacagggcgtcgtcctgaccggcttcatcaaggggaaaaagctgcacgcccttctcacccacgcccgctgcttcgtcctgccctcttcgcacgaagggcttccgatcgcattgctggaagcgatgagttacagactgcccgtcattgtaagcgacattccggccaatctggaggtcggtcttgaaaaagaggcttatttccccgtcggcgacatagcggcgctggcgcagaagctccagcaaaacatcgacgcaccctaccggcaaaaggaatatccgatggaaaaatacgactgggacgctatcgccggacaaacggccgcagtatatgaaaaatgcgcggcactccggccggacaggtaaatttccgcctacccttcccggctgatctcagccacggtcgccccgacgaatgctatcagctccgccggggcgattttcagttgcaggccccggacgccggcgctgatatagatgaacggatgctccccggccgaagagtggatataagtcgggaagcgctttttcatgccgaccggcgaacagccgccgcgtatataacccgtcacgggcagcagctccttcatcggaatcagatcggccttcttgttgcccgacacgcgggccgcggccttgagatcgacctcgtgattccccggcaccacgcagacgaagtatcccgtccggtcgcctttcagcacgagggtcttgaaaaccgtggcgatctcctcgcccagctgttcggcgacgtgcgtcgccgccagatgctcttcgtccacctcgtagggaacaagctcgtaatttatcttcgcacggtcgagcagccgcgccgcattcgtcttttcgacttttccgtgtgccatctcagctattgatgttcgatttttcggcttaagttgcgcaaaggtagtttattttacccggattgtcgcattttagctacatttgtcagatgcttcgccgaaaaatcacatacaaaccgctcgcctttctcatcgcggttctgttcctccccaccgtcctgccggcgcagagcacccgtgtccgcgggcgcgtcaccgacgccgccgacggcacgccgatgcagttcgtgagcgtcgtctttcccggcaccacgacgggcatcaccaccgacgaggcgggcatctacacgctcgaaacccgcgacacggtgagccgcgtgcaggccacgatggtcggctacgcctcgcagaccaagccgctcgtgcagggcggcttcaaccagatcgacttcgccctcgaagccgtggagttcggtatcggcagcgtcgtcatcacccccggcgacaacccggcgcatccgatcctgcggggcgtcatccgccgcaagccccagaacgatcccgacctgtacgacagctacacctgcgccacctacaccaagatgcagctcgacctgacgaatatcaagccccggttccgcagcaagcgcctgcaacgcaatttcgggttcgtcttcgactacatcgacacctcggcactcaccggacaggcctacctgccggccatgatctccgaagctacggccgactattaccacagcaggcgcaaccccgccgtttcgcgcgaaatcatccgcgccagccgcgtgtcgggcgtcgaggacagcttcgccatcgcccagttcacgggccagatgcacggcaacgtcaatttctacgccaattacatcgacatcttcaacgtccgcttcgccagtccgctctccgattcgggtctggccttctacgactattttctggtggacagcatgcaggtggaggggcgcaaaacctacaaaatccgcttccatcccaagcggctcgccacgcccgtactcgacggcgaagtcaatatcgactcggcgtcgtacgccctgcagtcggcctcggcgcgcatgcctaagggcgtcaatgtaaactggatcaagcacctgcggctcgaaaacgacaaccgcatcgtcgccgacagcacgtggttccgccaccgcgaccgggtgtcggccgaattttcgatcgccacgggcgactcgtcgaagctgacctcgttcatcggcacgcgcgaggtggtctactccgacgtgcgcgtcggggttcccattcccgacgaagtcgcgcgcatggacaacaacgtcgtcatcggcgacgaagagggagtcagccgcacggacgaagccttctgggaacaagtgcgcccctaccggctgagcgagaaggagaagggcatctactcgatggtcgattcggtgcagaacgtgccgctctaccgcaacatctacacgctcatcaacaccgtgatcgtcggttactggaacaccaaatacatcggcatcggcccctattacaaactggccagcttcaacaaactcgaagggttccgcatgcagccgggattccgcacgaccacggccgtcagcaaacgcatacgtctctccggatatgtggcctacggcacgcgcgacggcatgttcaagggcggcggcagcgtcgaacttgccttcaaccgccgcctgacgcgcaagctcaccgtttcgggccggcacgacgtgatgcagctcggcgcgggacagaacgcgctcacggagagcaacatcctcagctcgctgctctcgcgcggcgactcccggctttcgatggtcaaccgtggcgagatcggctacgaacacgaatggagccacggcaccagcaatttcctcggcgcccgcatccagaagatcttcggcaaccgctacgtgccgctggtgcgtcccgacggccggatcgtaaactccgtatcggacgccgcgctgcacgtcgggatgcgtatatcgaagaacgagagcatctaccgcctgcccttcgacaagcagtacatgggcacggtctaccccgtcctgacgctcggattcacggccggcgttcccgccatgctgaacgacagctacgaatactaccggctcgaagggggcatccactacaaacccgaactgccgccgctgggctattccaacatcacgctgcagggcggcaaaatcttcggcaaggtcccctatccgctgctcaagctccacgaaggcaacggcacctatttctacgatcccaatgccttctcgtgcatgaatttctacgaattcgcatcggacgcatgggtggcgctcttcttcgaacaccacttcaacggcatcctgctgggccgcattccgctcgtcaagaaactcaagtggcgcgaagtgctggtctgcaagggcgtgtggggcacgctctcgaaggagaacgacggcagtctgcccgacacgcaggctccgctgctcttcccccgcggcatgacgtcggtctcggacccttacgtcgaaatgggcttcggcgtcgaaaatatcttccgcctgctgcgcgtggactgcatctggcgtctcacccaccgcgatcccaaaccgggacaggacgtacagaacttcgccgtaaacctgagcatgcacctcaaattctgacatagggttccttgtgtcgaagattttgactacctttggggcttaaaatacggaatcatatgataaaaggcgccatattcgacatggacggtacgctcgtggccaattcgccggtccacatccgggcgttcgaaatcttctgcgaccgctacggcgtgcgcggctggaaggaaaaactgggaggggctttcggcaggggcaacgacgacatcatgcggctcatcatgcccgaagaggtgatccgcgagaagggaactgcggcgcttggcgacgagaaggaggccatctaccgcgaaatctacgctcccgaaatcgaacccatgccgggactggtcgccctgctcgacaaactccgcgatgcgggcatacgctgcgccgtaggttcgtcggggtgcagggccaatgtcgatttcgtgcttgagaagtgcgacatcgaatcctttttcgacgccaaaatcaacggcgacatggtgacgcgctgcaaacccgatccggaaatctacctgacggcggcggccgcactcggactcgcaccggccgaatgcgtcgtcttcgaagacgccaaggcgggcatcgagtcggcacggcgggccggcgcgggccgcatcgtcgcgctggcgtccacgcactcccgccaaatgctggccgccgaaaccgacgccgacgtcatcatcggcgacttccgcgacatcaccgacctcgaaacattgctgaaataagcgcacggccccgcaaaaggccgccgcaattcccgaccgacctcagtacggtcgggatttttttgtccggcaccccttcggcggatcatgcggatcggctgcccctctcagaagccagacccaaggaaacgccccgcatcctgcccctcgcgccccctttgcaacttcctcagcatcacctttcctctgctcttcccggattcgggattcggccggccgacgcaaatatttccccgaagcggatatcgtacggaaatttttgatacatttgcgggatttttaacccggacgcatatatgttcaaaggaatctccaccgtcgttctgctcgtcatatcgaacgccttcatgacgctcgcatggtacggacatatcgcattcaaatcgaagctcgaacgcttcggcatgctggcgatcgtcctgctgagctggggcatcgccctgttcgaatactgctttcaggtccccgccaaccgcatcggctccgcacagttcggcggcccgttctccatctgggaacttaaagtgatacaggaggtcgtatcgctttccgtattcacgctcttcgcattggtcttcatgaaatccgacaccctgcgctggaaccacctcgccggatttctctgcctgattctagccgtctatttcatcttccggaaataaccctcgtccggaaacaacctcgcatacacacaagacagccgcgacccgaaatcgcggctgtcctatttttcgtgacgattgcaggcggaagaaaagcccggcgccgaaggcgctcaatccgacttccgctgatcgtggcggtaaatctgataggaattgacgaagttctgccacacgatataagccgtcggggcgatcgaggagatggggtcgaggaacgactgcgccatccatacggccagcaccgtgttcttctggccgagcgactgcccgcccgccggcgcgtccccgtaacggcggccgagcatgcggcccaccttgaactgcaccagacagatcgccagcgcggcgaacgccagccacagctcgaccgagagcgacgcatcgtgcaggtcgatgatgaatgccgtcgtgcggccgataatcacgaccagcgacgccagccacatgtagaacgaaatctgactgtggtcgccgatccatttcgcggtcttcggcagcagaaaacggcaaaactgcgccgccgcgaaaggcatgatcagcagcggcgcgatgcgggccagtatctgcgtgaaagagcaggccccggttccggccagcgaaagcacgacgggcgctatcaacgcgatcgccatattgcacagcaggctgtaggtcgccatcgtcggaacgttggcccccagcatgcccgcaatcaccaccgcggccatcgccacgggtgccagcacgcagatcatcgcaccctgcgccacgatcgcatcgagcggcaacaacgcgaaataaagcgccgcgctcaccacgacctgaaacagcaacagccacacgtgcagcatcgacggcttcatctggcggggtttcacccggcaaaaggtgacgaagagcatcagaaagatcagcgagggcgtaatcatctggtgcgtccacgcttcgagcgccgtcaccggacggcacagcaaggcgcccgccaccatggccgagggcatggcgaccgtcttgacattgcggtgcagatattccaatacgtgcatttatttcatcctttttaccggaaccgtcacacgggttccgtccttgcgttcgaccgtcatctggggtttgtcgccgcggatctcaccccggattacggcgcagggatcgacccgcgacacatccaccgttccgagaaatacgatccggtcgcccggagccaccctatccgcaagcgtctcgtcccagacctgccccacgaccagccgtcctccgtccagcgcgacggtgacgccgcttaccgacacatcgggcggtccgggctgttcggcatgcggcagcagccagaaacggcggccgggatagtcgatcacgaccgttccccagcggaaaactccgcatccgagcttgctgtgtccgccgtgggtcacttcgaggggcatcccggcaagcgtatttccggccagcccgaattcgggaatcacaccccgcacggcttcaccgacgaccgagcggttggtccaccccagattgccggagtgtccctccgtgcggcgcacctcctgcaaaatccccttttcgatcatcgcccggcactcgtcgtaacggcagtcgaacaaggccccggagccggtatcgaatttcatgtaggttttcatccgggacttgccgctgcccacacgggcggcgattacaggagcgtttcccgcaaaatgaatccgcgcaccgccccggcagcggaacccgccgagctggcgcaggtcgcccgccagcgtgatcgtcgagtcggcattgggcatccgcacgacaaagccgcgcagcagatcgctgcccgcaatgccgtcgaagcccagacagcggaagatataagagctgtcgggcagcacgatcacctgccggtcggagtaggtcgcctcgcccatccggagatacggcacccggacataggtgatcgcatgacgatggccttcgaaatcgcccgacgtcccccggcccgacgccgcgagtcccagttctcggctgagccgttcgctgatgcaggtctgcgaagcccccgtgtcgaaggcgaagcggcgcggtcccgcagcggtctcgaccgtcacgacatacttgccccgttcgagcgtgtaaggcaggtcgaagcgcacggcgggtttgcgggcgcagaccgtctgcgccgcggcaagccagcaaacaaccagcagcaaccgtctcatccgccgcccctacgccaacaactccttgaccttggccgagatatccttgccgtcggcacggcctgcgagcctcttcgaagcgacgcccatcaccttgcccatctccttcatcgacgtcgcgccgacctcggcgatcacggccttgacctcggcggcaagctcctcggcggtgagctgcttgggcaggaattcctgaaatacggccacctgcgccagctcttcggcagccaagtccggacggttctgctcggtgaagatcgccgcggagtcggtcccctgcttggccagcttggagatgatcttcagcacgtcggcgtcgggcagttcggtgatttccggtcccgccgtcttggcttcgatgatgtatttcttggcattgcgcagtgcgcccagacgcacggtatccttggccttcatggcctccatgatccctttcgaaatctgttgttcgagtgacataaaattaatatttttaaataaatacacaaatcatctatccttttgcttcagcaggaagtccagcacgtcgcgcatcagccggtcgcgctgcacgtcgctctcgatggactcgaacggaaatcccatgacgaacgttccgcccgcttcgctggccacgcccgccgtgcggccgttttcgacgtaacgcatcaccgagaaggctcccgccccggcgggccgcagggcgtcgggcgactcgacccggtagcggtccggacggtattcattgacataacggtactcgtcgcgcgaaaatccgggatgcgaagtcacgacccgcacccgcccgcgctgcgccgcccggccgccgtcgtaagtgtagtgcagcacctcctcggcgaacctgcggtcgtcgtccgaggtgttctcacccgtccagaggtcggtcgccacatagcttcccgacacgaagagcgcacctccgcctgccatataccggcgcagaacggcctgcaactccggggagaaggttttgaaggcatagcccgtcaccccgcgtccgatggtcgtcgaacgctgttcgcccagaatgagatcgacggcggaataaccgtcgggcgacacctcgccgcgctcgacggcgcgcaccgacgccgagcagaacgaatatccggcccctgcgaccgaacgtccgtgcagggcggaatagtcgaacgtgttgccgccgatcacctccgtttcgtaatcgcaggcgcaggcacccaaagcgatgctgtccacctcgcatttggccatctgcatatcgaatacgtgctgcgcgccgatgaacgaaatatcctgccggtcgggcacgccgccgtcgatgtcagtatagaaccccgccagcgaatcggcgcgcacgctcagcggcgcgctgacgcggtcgaagccgttgacgatcagcaccgtccccttctcgtcgggcatgcggcatgcggcgacggtctcgctcggaaaactctcgccgccctcgttcacggccgtcaccttgtagctgtagatgcgccccggctcctgcgcggtcagcaggcagggtttatcgacgtaacggccgttgtcgaagccgccgtcgtcgatgcgcgtatagaccacataccccgtcggagccgcggtcgtttcgagcgaatccatcacgggcgaccaagtgaccgccgccttgccaccttcggcgaactgcacggcgagcgactccacgggcagcggctgcactacgtaaggtaatccgtattgcgagctgatatagcgcagaatacccttatagacggcacggctcacgaggaacttgaaacgcggatcgctgccgtagcgcatgtcggcgaaattctggtgtgacagcagttcgagcagcatggtcggcacccccggcacgcgcgcttcgtaataggcgcggttccaaagcccgcggcggctccatgccggttcgtacgtgctgcggatatcttcgacgatctgggtcatgacgatatccgtgaggtcgcgcgaacggtagcggtcggcgcccccttcgaacttgcccttgttctcgcgcgtatagaagatgcccagcgtgccgatgatgtcgtcattgagccgcacgcccgcatcggagtggaacgccagcgccatatcgaccggaatgcgcagcccggcgctgtcgggcatccgctccgaaccgcccgtcagggcattgacccaatgggcgcgcgacatgtagtcgtccttgtaatcgtcccggttctccttcggggagtagaccttttcgtcgaatccggcccactggagccagtagcgggcgccctcgcagaagcggggatagccgctcgtctccagatggcataccatgccgggccggcgcagcgaatcgcacaccgtgcgggctatgttgccgtaaccgccgccgatcttcacggcgtcggccgagacgatgcggcccgcctgacgcgagcggttggtgagcgtcacgacctcctgcggaccggcgtcgagcagaaagcggccgaggtagatccacgttccgccgcccatggtctggtttacggcgaagctgctgtcccctccgaggtgatgcaccgtatactgcgcgtcgtcagcgttttgcggagtcgaatcgtagctcacgtaaacggcgtattcgccccgttcgggaatgtcggccgtccacacggcgcggctctccgccccgccggtcaccgatctcacgcggcgcgtcgtgccgtcccggaagggattctgtcccgtcgtgtagacctgctgcacatgcgcgaagcccatgccgcccggctgccatttttcaggtccctcctcctcgcggtactgcccggcggcatcgttgtccgccagtatctcgtacttctgcacgtcgcgttcgcggggcagcatcacgcaggccccggcattttcgagcatcggaaccagatacggcagcacgtagctctgggtatagaggtcctcgcaggtctgccacaactgcgaacgctgccacttccagcggttctggggctggtcgaaatagcggccgtgactctgccacaaggcgatatgccgcccggcgagtccctgcgacggcaccacgggcgccgaagaacgggtcaccagcggccgctcggagcggttggtaaagggcacgatcttcttcttgcgcaaaagtttccggtattccgccccggtgcggcaggccatcggaatcagctcgccgacctcccgcttgtcggagtaaagttcgatgtccgccttgcggaactccggcggcaggagcaggcgcaccgagtcgcgcatggcgcgcaggttctcttcgcggaacggatagtacgaaaggccgaccgaggtgtagatccgcacccgcttgcgcgaggcgtccaccccctcgatgcggacatagccgcccgacacttcgcgggcgacgatgcgcgtcagcgtgcgtccgatttcgcggcgcgcagggccgtcgattccggcggccgagacctcctgcccgcaaagaccgagcagcaggagaatatacaacagtttatttttcatgtcgtttgaccagtaaaaacatgccggccatcgtaaatgcggcattgtaaatcaacagttcgaaaccgatccggtagccccacgcctcatacgcccagtattgcagcagggcgctcagcagcggagcggcgagcgccacaaggggcatccagccgtcgcgcaccctgagacgcgtgaagataccgaaagcgaacatacccaaaatcgggccgtaggtgtagctggcgaccttgtagaccagattgatgacgctgtcgtcggcaaggtattcgaaggcgaggatcaccagcgccatgccgagggccatcgccacatggacgatgcgccgcaggcgggtcagacgttgctcgccgtaacgtttcgtgccgtcgagaatatcgaccgtaaacgaagtcgtgagggccgtaagggccgatcctgcagctgaataggtgcttgagataagtcctataacgaacagtatgccaacgaacaccggcagcccgccgttgaccgcgacctgcgaaaaaacctgatcgcccttttcgggcatcgccagtccgctgcggtccatatagatatagagcagcacgcccagcacgaggaacagaaagatcacgaaaatctggctgacggccgtgaggacgatatttttctgcgagtcgcgcggcgtggcgcagctcaggttgcgctgcatcatgtcctgatcgagtcccgtcatggcgatcagcagcacgatgcccgccgcaaacatcttccagaaatagcggtccgaagccgggtcgtcgaagaaaaacatcttcgaatagggcgacgcggcgacctcgcgggtcatttcgggcagggacatgcccagcgcctgcatgatgaagacgattgacagcacgagacttccgaccagacacaccgtcttgagcgtatcggtccagatcagcgacttgacgccgccctgctgggtgtagagccatacgaagagcatcgtgaccgccgcattgagccagaacggaagtccgtaatggctgaagaccagcagctgcatcacggcgcagaccacatagatgcgcagggccgcccccagcatcttcgagacgaagaaaaaccacgccccggtacggtgcgaccgcacgccgaagcggtcgtcgaggtattcgtagagcgacaccaccttcaggcggtagaacgtgggaatcagcacgaaagcgacgatcagctgtccgaccgtgaagcccgcgaccatctgcatgtaggaaaagccgtctacggcgaccgagccgggaacggagatgaacgtcacgcccgacatggcggcgccgatcatggcgaaagcggccatgtaccacggcgtgcggcggttgccggagaaaaacccggcgttgtcggcgcggcggccggagacccatgctacggcgaagaggacggctatgtagcccagaacggtagcgataacggcagcggatgtcataagcgtaagttcagattcgaattacaaatatacgaaaagagtcccgaaaaagcgggcaaaaaaagcagaataatgcggggacgggcgggatggagcatccggaacggcgaagggttcggagattttttcgaggggggggggggg

SEQ ID NO: 12064 - DNA, 61538 bp, Unknown
  gut microbiota DNA sequence
agcagattcaccgtttcgaattttcccttgtagaatacgccccagttattgaatacgcagggcagctccttggccttgcggagcgtatccacctcgatgaaatccgccgggacaccgtgcgcttcgcagtgttgtcttatcatttccagattgccggggacaaaggggcactgcatatcgtaataaatggtcagcgcctgactttcgatacgctgttttttcgcattgtgcgcgaattgcggagtggttccgtcgaaggagagcgccagcagttcgtagccgttgtcggtcgtatcgacgacctcgaagccgaatttccgggcaaaagactggtccgaaagccacgctttctgcttttccgcaccgagcatgcagacgcccgattttccatgcgtccgcgcatcggccagacaatgttccatcaacgcctttgcatagcccttgcctttgtaaggacccgcaacccacaaacaatagatataataatagttgtcgccaatcacgggcacccatgccgtttcgagaggcgcgtattcgataaagaccacgcccttcgcattcagcttccggaagacgtgcccctcgcggagccggtcggaaagccaccgccgcttcgcctctacgcccggatgagcctttttcgtgcggataatgcagcacaaatgctcgtcggcaaggttttcggccgtcagatcgacgaattcagcatccatgggcggcttttcaacgggatgagcgggcgtcacgccttacgataggagagcgctcccgaagggcatttttcgacctgcgcgacgatccggtcggtcgcggcgttttccagcttcacccacggccgctcctgcgggttgtaaacttcgggaagcatgcggacgcagacgcccgaatggatgcagagatgcggctgccagaccacgacgatctcgccgttggtatattcgatacgtttcttttcggattccattacaacaatattttacaaagactgccaccggcagcccccaaagataagcataaaatccagattccgaaccggactcccccgccttcgactccccggagccgccccgaagcggtcgttcgtctccgtccggcggaaaatcgcaggcgcgcggagcggaaaggagcggcaagtctaaaaacgacgcaaacgactggagatcaaaataaacaaacgattgcatcccggaaggaaagagggtttgcgccggcaccggcggaagattatcgaaaacttttcggcagaaattttgatttttcatccaaaaatacatacatttgccccaacgacattgcaaatgacaatattcaaccatatccatcatcatcataaccactttccgaaggggtaagatcgatgtgcatatgtaaataaggattatatatcataacgaagctcatcccctgcggatgggcttttttcatgtccgttccgcaggcgggtgtctgaaaaacaacaaacaaacatgctgagaatagcaattcaggccaaaggccgactcaacgagcagagcatcggcctgctctcggaagcaggcatcggcgtcgccgaaagcaagcgcaaactcatctcccgcgccgacggattcccgatggaggtgctctacctgcgcgacgacgacattccgcaggccgtggccatgggcgtcgccgatctggggatcgtggggctgaacgaggtcgcggagaagaatttcccggtcgaacggaccatggacctcggattcggcagctgccgcatctcgctggccgtggaccggacggcggactacaacgggctggactacttccgcggcaagcgcgtggcgacctcctaccccaacatcctcgcgcggttcttcgccgagaagggcatcgacgccgaaatccacaccatcgaagggtcggtcgaaatcgcccccgccgtgggaatgtccgacgcgatattcgacatcgtatcgtcgggcggcacgctgatctcgaacgggctggtcgaggtggagaaggtgttctactcggaagcggtgctgatcgcgaatccggaactcgatgagcaaaagcgccgtgaaacggctcagctcacgtttcgcttcaactcgatactcgaaagccgcggcatgaagtacgtgctgatgaacctcccgcaggagaagctcgacgaagcgatcacgatcctgccgggcatgcgcagtccgaccgtcctgccgctggcgcaggagggatggtgctcaatacacgccgtgatctgcgaatcgcagttgtgggagcgcatcgaacggctcaaggccctcggcgcggaaggaattctggtgctgacgctcgaaaacatgatccgctgacccctaaaaacgacccgaaaaatggaaatgccgaaaatctatgtaaatcccccgcgcagcgaatggcccgcgctgacggcccgctgtacgcggcaggaggaggagatcggggagcgcgtcgccgcgatcctcgccgaggtgcgcacgggcggcgacgcggccctgcgccggatcgtccgccgcatcgaaggatacctccccgaaacgttcgaagtgacgcgcgaacggcgtgcggaagccgcgaaggccgtatcgccgcagttgaaagccgcactggagcaggcgaaggccaacatcgaagccttccaccggtcgcagctcccggcgcaggtcgaggtcgaaacgatgccgggcgtcaggtgcgtacaacgcgccgtggcgatcggccgcgcggggctgtatatccccggcggcaaagccccgctcttctcgacggtgctgatgctcgccctgccggcccggatcgccggatgccgcgaggtgatactctgcacgccgtgcggccgcgacgggcggatcgcacccgaaattctctatgcggccgacctctgcggcgtggaccgcgtcttcgccctcggcggggcgcaggccgtggcggccatggcttacggaacggagagcattccgcgcgtcgacaagattttcggtcccggcaaccgctacgtcaccaaggccaaacagctggccggcgcagccgacgtcgccgtggacctgcccgcggggccttcggaggtgctggtgctggccgacgaagacgcgcggcccgaattcgccgccgccgacctgctgtctcaggccgaacacggtgatgacagtcaggccgtgctggtctgccgcagcgaggagttcgcacggcgggcaatagcgtccgtcggggagcaggccgcgcggctcagccgccgcgacgcaatcggcaattcgctggccaacagccggatcgtggttttcagcgacccggacgagcagatcgcgttcgccgacgcctacgcccccgaacacctgattgtcgccatgcgggacgcatgggacgccgcggcgcggatcacggccgcggggagcgtatttatcggcggctactcgcccgaaagcgcgggcgattacgcatcgggaaccaatcacacgctgcccacgggcggctgggcgcgggcctacagcggcgtgaacacggagagcttcatgcgcaagataacctatcaggaactgacgcgcggcggactcgaagccctcgcgccgacgattacagccatggccgaagccgaagggctggacgcacacgccaacgccgtgcgcatccggacggaaggaggtgcgcgatgaaaccgctggcgcagctcgtgcggcccaacattctggcgctgcaaccctactccacggcccgcgacgaatatgcgggcggcgggatcggcgtctggctcgacgccaacgaaagcccctacgacaacggcgtgaaccgctaccccgacccgcaccagcgggagctgaaggcgcagctggccgcgctgaagggcgtgcggagcggacaaatattcctcggcaacggcagcgacgaagccatagacctcgcgttcaggatcttctgcgagccgggccgcgacaacgccgtttcgatcgcaccgacctacggcatgtaccgcgtggcggcgcagaccaacgacgtcgaactgcgcgaagtgccgctgggagccgatttctcgcttccggtcgaagcgctgctggcggcggccgacgggcgcaccaaactgctgtggctctgctcgcccaacaaccccacgggaaacgcattccccgaccgtaagatcgaagagctgctgcgccgcttcgacggcgtggtggtgctcgacgaagcctacatcgacttcgccgaagggcggggattcctgccgcggctcgacgaatttcccaacctgatcgtactgcaaaccctctccaaagcttggggcatggcgggactgcggctcggactggctttcgcgtcggagcggatcgccgcgctgttcgggcaggtcaagtacccctacaatatcaatacgctcacccagcagaccgcggccgagtgtctgcgccggaacattgcggcgcaggtcgcgcaaatccgcgaagaacgcggacggctggcggcggcgctcgccggatgcggctgcatcgagcaggtctacccgtcgcaggctaacttcctgctggtgaagaccgccgatcccgaccggctttacggcgaactgatcgccgcaggggtgatcgtccgcaaccgtacgcggatcgcgggatgcgagggctgcctgcgcatcaccgtggggactcccgccgaaaacgggcgcatgctggaaaccgtcaaaaacttcagaccatgaaaaaagcactcaaaaaagcactgttcatagaccgcgacggcacgctgatcgtcgagccgcccgtggatatgcaggtggacagcctcgccaagctggaattcgtgcccggagccatttcggcgctcaaagtcctccggggactcgatttcgagctggtgatggccaccaatcaggacggactgggaaccgactcctttcctgaggaggatttcaggattccgcaggagaagatgctccgcacgctggcgggcgaaggcgtgctgttcgacgacatgctgatagaccgcacgttcgaaagcgacggcgccccgacgcgcaagccccgcacgggaatgttcggccgctataccggcggcgggtacgacctcgcggcgagttacgtcgtcggcgaccgcgcgaccgacatcctgctggcccgcaatctcggagcgcggggaattctgttcgcgcaggagacggcgggccgccggatgctgcgcgaagccggagcggaagaggcctgcgtgctgatcagcgattcgtgggccgagatcgccgagtacatccgccgcggcgaacggcgggtggtcgtaacgcgcgagacccgcgaaacgcggatcaccgtccggctcgacctcgacggcaaagggttcggcggcgtttcggcagaccgtccggccgccggaaccggcggcgctccggagaacggcgcggatacgaaaaacccggttgatccggacgcagacaacggaccggaaggcaaccgggccggggcaaaaaatccggcagacggcaggaacaacgatgtctggaacggcaacagcagcagtgacggaaggaacggcgacaatagcaactgcgacggcagaaactgcggcgacgggatttcgaccggactgcgttttctggaccacatgctggcgcagatcgcccaccacggcggcgtagcgctcgaagtggaggcccgcggcgatctggacatcgacgaacaccacacgatggaggacgtggcgatcgtgctgggcgaagccatcgaccgggctttaggctccaaggccggaataggccgctacggattcgccctgccgatggatgactgccgcgcgctggtgctgctcgacttcggggggcgcatcgacttcgagtgggacgccgaattccgccgcgagcgggtcggagacgtcccgacggagatgttccgccacttcttccactcgctctgctgcgccgcgcgctgcaacctgcagattgcggccaaaggcgacaacgaccaccacaaggccgaggcgatcttcaaggccttcgcccgcgccctgcgcatggccgtggcccgcagcggattcggatacgacatacccagcagcaaaggagtattatgacggcgatagtagattacgacacgggcaacctgcggtcggtcgccgacgccatgcggcgcatcggggccgaattcacaatcacggccgatcccgcgctcctgcgcggcgccgacagggtgctgctgcccggcgtgggcgaagcttcgtcggcaatggccaaactgcgcgagcggggactcgatctggtcatccccaccctgacgcagcccgtactgggcatctgcatcggcatgcagctgttgtgtctcgacagcgaggagggagacgcccgctgtctggggattttcccggcgcacgtcaggcggctgaaacccgcggaaagcgggctgaagattccccatgtgggctggaacaccgtcggcagcctgcgcggagcgctgttcgaaggaatcggcgaagaaacctatgtctattacgtccactcgtatgcggcggaggtctgcgaagcgacgatcgcccgcaccgattacggcggggagttcagcgccgcgctgggccgcggcaactttttcggcacgcagttccaccccgaaaagagcggttcggcgggcgaaaggatcctgcgcaactttttaaaaccgtaacacgatgaaaatagaaatcatacccgcaacggacattatcggcggcgcatgcgtgcggctgacgcagggcgactacagccgccggacgacctattacagcgacccgctcgaagcggcgctccgcttcgaagagacgggcatacgccgcctgcacatggtcgatctcgacggcgccaaggccgcacagccccgcaacctcgccgtgctggaacgcatagcgtcgaaaaccgcgctcgaagtgcagtacggcggcggcatcaaaagcaccgaggcgctccgcagcgtattcgacgcgggcgcacgccgcgccatctgcggaagcgtcgccgtacgccggccggagcttttcgccggatggctcgcggaattcgggccgggaaagctgattctaggagccgacatacgcgacggcaaagcagccgttcagggctggacggaagcgtccgaactctcggctcaggagctgatcgcgcagttcgcgccgcagggactcgcgcaggtaatctgcaccgacatcgcccgcgacggcatgctctgcggcgcatctgcggagttttacgccgcgcttcagggagagtttcccggcgtggagatcaccgtaagcggcggcatcggctcgatggccgacatcgaggcgctcgacggcgcaggcctgcgcagcgtcatcgtcggcaaagccctctacgaaggacgtatcacactcgaagaactgaagcgatgcttgcaaaacgcataattccctgtctcgacatccgcgaggggcagacggtcaaagggatcaacttcgcggagctgaaaaacgtcggcgacccggtggaactcggcgcgaaatacgccgccgaaggggccgacgagctggtgtatctcgacatcagcgccacggaggaggggcgcggcaccttcaccgggctggtatcgcgcatcgcggcgcgcatcgacattccgttcaccgtgggcggcggcatcgcgtcggtcgcggacgcaggccggctgctcgacgcgggagccgacaaggtcacggtaaacagcgccgccgtgcgcgatccggggctgatcgacgccatcgcgtcgaaatacggttcgcagttcgtcgtcgcggccatcgacgcaaaaaaggtcgacggcatgtggcgcgtcacgacccacggcggcaagcggctcaccgagcgcgaactgttcgcgtgggcgcacgaagtatggcggcgcggcgcgggtgagattctcttcacgtcgatggaccacgacggcacccgcgacggctacccctgcgaaacgttcgcacggctggccgagctgcccattcctgtcatcgcttcgggcggggcaggctcggtgcggcatatcgccgacgtgctgacgctcggcagggccgacgcggcgctggcggccagcatcttccactacaacgaaattccgattcccgcgctcaaacgggaactgcaccgacaaaatatcaacgtaagattataaacgccatgaaaatcaaagcaaaaccctttgcggaactcgactccgcaaaacaggccgacgggctgattcccgccgtcatacaggacgaccgcaccctgcaggtgctgatgctcggctacatgaaccgcgaagcctacgaaaaaagtctcgccgaaggccgcgtcaccttctacagccgcacgcggggctgtctctggaccaagggcgagaccagcggcaactatctcgacatcgtttcggtcacggccgactgcgacgacgacacgctcctgatccgcgtcgtcccccacggcccgacctgccacacgggcgccaagagctgcttcgcgggggccgcgcccgaaaccgaaggcttcatccgctacctccagagcgtgattcggggccggcacgccgagatgcccgaaggatcgtacaccagcaggctgttcgacctcggcgtgaacaaaatcgcgcagaaagtcggcgaagaggccgtcgaaaccgtgatcgaagccgtggcaggcaaccgcgaggcgatgatttacgaagcgtcggacctcgtataccacctgctggtgctgctcgaagcgaccggctgttcggtcgccgacctcgaaaaagagctggcccggcggcacagctgaggagggaaacaaaaagcgcaaaaacaaaaagcgactgcgacaaatgtcgcggtcgcttttttccgtagcgggtccgagacttgaactcaaaacctcaatttgcgtccgccgtccaccacttagcatccgaggttcaggtattaccaccaaacctgccggtcattttcatacgtaaatatccgttcgtcgtaaccacgggtgagattgctgagccagagcagcgcatttgcgggaacattgtcgaacaacaggtatctttcgcatgcgacctgacatcccaatgaagcccactttattccgtcccaatacttcaactcgtaagtatcccctgcatgaatcagattatcgtccgtacggggcacgcagcggacccgatctataactacaggtttgtcgaaagccatgccataccagttgccgtccgcgtcagggtgatcataggacgtaagccaatctccatcgaaaactttatccagcccccgctgcggcggaagtccatgcgttccgatcggccgtccggtcgccggaacatcgctgcccggcataaagaactgcaattcggaaatgctcccgtgagaaccgtcggcagaatacagtcgccagtagcgatattttttcgaggcccgaacgggaatcatatcgggaaaaacaacgctgtcgatactatacaaaacctctgcaatccggaagtcgggatagtcggaggcttcgatccgggcaccgacaatacgctgttccatgcgtgcgacatgttcgttcagcaacatcttacgggttacacggatacgctctctgcatgtggtatcggcattccggcagcaaatgcgtccgccggcatcaatcgtaaaaggatgggagaccggaaccagcccgctcccatcatggccgaaaaccaaataggcgtttcggcggcccattttcgaaaacacccctttccgcccgttgcgacgaccgacatcaatcggattccaacggtagttgttaaatgcggctatataaaggtaatcatccgaaaggtcggttcggaacaaggggacattcggatcggaggtagacatataccagtcggtcacatcctcttcgaaaggagaaaatccgtctagcggatatttagaattacggagataatccgaacgcgccggaacaggcgcataactataccgataaatcttcggaatcgggcgccacggatgaaagggagttccgggatcggaatccaacccccactccgaagccataaaaactccgttgtcattcataaaaccgaaccatgcatgccgcagaaatccccgtccccattggggtaaatagtcaaataccgcggggataccatgacttcgcaatacggcgacggagagcgtcgaataatcgaaacagtctccgaaaggcattctgtaaaaagccgcagcggcaaaaagcctgtaacctttgtattcggcatagttcagcggtatgttaggtccgacacccgcccgcacttcgggcaggatttgcaaagtcctgtaataaggggaatagctgttctcatcattctgcggggctgttcgaagccgttcggaaaagcggcagcccagcgagtcgcaccaatagtcgagcggttgaaattccgcaaccttataaggcagcaaccacgcacaaaaccggtcgaaggtcaggtagtccgcccatggactttcccacaggcggaacgcccggtcgatgtgatgaatcaggtaatccgccgtaataacttcgatatcgttacgtatgacggattccagtggagcatgccgatccgcaatttcgtttaatcccaccacaatcggataagagtcactgacttcacaatccagcagcgaatcaatctcacaaaagaacgaatcgacttccggaccatatatgcattgatgtccgggcatattggcaatcaggaattctgccgcccgcaacttcagactatccgcctcacacgctgcataatagtcaagtacacgttccaattccgagcggttccgcccggcaagctcaagcgcctcgattacctctgcactacgacgggacatgcaagcggaaaggaaacaaacagagaagagaaaattcaagaaaagcagaaatctcataacaaacgaaatttaggttatgcaaatgtatggaaatattacggtcatccccaccctcaactcgaacatcccgtgctgcacccgcgcaaaaacaaacggttcaaatcgctacatattaaatagttaatatactaagtcaaaatttaaaacattaagttagtatcaacttcgattaatttatgcgtgataatccaattaatatatccatacttttgttatcaacattttaatataccgagcgtcacttgctccaaaatctttgtttttctaattttaattatgaaaaaatattttattccattattatcaataatactgataagctgctctgcaggcaatataaattatattgcctttgacgaggccatggagaatattgataaaactcaaaaggaatcatgggtatttataggcgatcaaggtttaataacaaaaatccaaaagtatgatatcaatagatttatatcaaaatataagaatacatacgatttttatttttgcgatatatctctacagaataatgaacatgttaatttcatatatcagttggagacattgccatgtgcaatgttgatatcacctcaaaaaaaggtaaaatacataacgaatttcccatttgatagcaaattagtatctcagctcaatcaaatcaacagtcaggatgcaccccaattaaccaatgcaaatttcaaaatcaaaggcgaaatactttcttcctatttttcaaatatttataatgcatatctttctttagactcggacaatatcgacagtctaaaaaagggactggataatatcaataaatcaatctcaacggaaccctatttttataattattatttaggatataaattaacccgaaagttggacagggattccatcagcaatcaatatagagagcatgcaataacatggtttgaatctaatacagcgcccttatatacatatcttaatgcggaattacttcagtccgatacgactaaaaccgccaagatagaatttgacaccaaaatggtggactttggagaaatttctatcaaagcacccaacaaaaaagttataaagtattcaaatacgggaaatgcgcctttggtaattgtcagcgcattgacttcttgcagttgtatcaaggtaacatgggagcaaaaacctcttttgacagggcaggttggagagatttgtatcacctataatgggagtgaagaaaacttgggagcttttaaccgaagcatcatattaattacgaatgctacaaagcgaaatgaaattttaacggcgaaaggacaggcaacactataaacattaaaatcaatttaattatgaaaaatctcacatttatctctattaaacaagtattggtatgctgtatatcaatcttattattatcgtgttcttctgatgcaaaatatagttgcaatcctgaagttgaaaaatgggccagaactaatatcgataaatatgtaacagcgacaagaagtgaaatagtcgaattatccatggatcagcaacgggccattctcagagggctgccagcagataagaaagcaaatttatggagagagaagctggcttatatcatgcaggacagcaagttgtcagaagaggaaaaacaagaggtgaaaaacatatatgattatttcattccatatttttattcgcaggatggactcgaagaagcggaagaatatgcaaagaaatggattaaccatatgcaaacgacatataattgggataacgatatggtatattaccatatttttacatggctaacagcggaggaatatgaaaaagttttgcttcaggaaagtttaaaaaccttacgggttgcaacaagaagtgaagagtgtaaatgtcgatatgatagtgaatgtcataatgacaaggattgtaacatacaagaagattgtaccataaatgaggggtgtggaccatttggcaagttgagatgtgatgggctttgtactaagtaggtaaagtatttattttaaggatatggactgagtgatccatatccttaaaataaatctttgcaattcaccaatgacgtgaatttaatctaatcaaatgccaaaacactaaaaaccttaaaattatgcccaaacctcagttgaaaaacaaaatgaaaaaaggatcaaaagtagttttactcatcggactatcggccctcattccattttgcatgattggctttcgacgaggaacaataatattaggcggcttgcatggattcccattagccttattggtcgatgccagtgcattttttattttcacgatcctttgtctctggaagctgaggttgaataatccacggagcaccgccctgcttattgcgatcggaagttcaatcgaagagttattccttggggctgcgatggttttgtatggcgagcgaatagaggatatccaccccttgtcactggtagagttgataatgagatatctggctatttttgccgcctatataacatttacccgccgacggtggtcgtcccggataatcatcagcctgctgaccgccatgacgattgtctggatgagctggagcggtgcggatttcatttacgattgtctgactttcaagagctggaagggccgcgtaactcaaataataaagtgcccgctcgatatccggaacgttcagggagagacaatcaatcttgcagatttcaaaggttcgtatctgcttctcgactgctggactaccaactgcggcgtatgctaccgggagtttccaattctgcaggaactttataacaaatacaaagacaaccggtccataaaaatcggagccttgcatttcagacgggaagaaaaagcagagacaattacgaccggacaggaacgactgcaagagtacgactatacgtttccggttttttcaataaaaaggaatgatccggctgttacggaaataaaagtcaaattattcccgacgataattatcttcgatcccgatggtacattaatcttccggggaagtataaacgatgcaaaagattatctgcgcaaattggcaaaaggtggtcagttataaatcattggcagcactcgacataagggcattggtgataaacgcggccattgcccttatgctgttttcgaccatgttcctcaactgccgtggattcgtcgaatccgaaatcgtatcgaaatggtatgcctttacaggcggaagcgtactgctcggttttggcctgctggtcctgatcaagcgtccgaagatcgccatagataaaatctcaatcttggcagccgcatttatcttctatctctttgcccgtatatttttcagcggatcgccccaaccggacattttcatactttcgatcgcctcattcgcttcaacttatctgtcgttcaagctaatagatgattgggatttgcacaataccgatcttctcattgtcatagcatgcctgctgcaggccgtatatggattactacagtacataggaatcttttatgtcagccgaggatttgacattacagggagttttgacaatccggcaggctttgccgcatgcctctcagcaggttttcccttttgtctggcagtcatgcggaaaagtaaacggatgcgccttttcggattggccgcatccgcaattattaccctgtccataattctttcgggatcgcgggcaggcatccttgccgttgtaattgttgccgcagtatatttgggccatagatattgcggcctgctcaagaaacaccgcaatttcatttttccgctatcaggcatcatattcgtcatattggtcgccggattgtttcttctcaaaaaggactccgctctcggccgaattcttatctggaaaaatacctgcgagatgatctcccaccaaccggtgtcgggcttcggaccttcgggatttatgcgggaatatatgctctgtcaggctgattattttgctaaaaataccgacagcccatatgcactattggccggcaatgtaactcatccattcaatgaatatttgctggttgcaatagaatatggcgcagtcggacttctgcctgtactcgccgcattcgtatttctgataaaatcatcccggcaaataaccatccctcatctttgtattttgtccgcagctgtcttcgcgtgcttctcgtatccgctgcgttattctttcgtgacggtcttgctggcttattccttggccgcgattaagataaaaccagcgaccgcctttaggataaacggcaggggaaaattcatatgggcggctttgctgggtgttattggtatattcctgatacgggatgtggaatttgaaaaacactggggccggttagcccggcaagacggtcttccggacaagagcgaaattcttgaccgttatgcggctttgcatgcccagtggaacggagaccccatgtttctctataattacggagccgttttaaatcatgccggagattattccggcagcaacgctgtcatgtttcaatgcacggactatttcaacgattatgacgttcagcggataattgcggacaattacgataacatgaataaccaagaaaaagccgaggagcactatattatcgccagccgaatgattccgaacagatttgttcccctttatcaattattcaggctctatgaaaaaaacgggcggacaaacgaagcgatgcgtacggcaaaagccattatcgaaatgcccgtcaaagtacaatccaacgtcgtagagaggataagatccgccgcaaaagcgtttttatccgagacagatgccgaaaaacctaccgaataaaccctatagaaaaaaaatgaggtgcttaattttactaagcacctcatttctaaaaagtagcgggtccgagacttgaactcgggacctcatgattatgaatcatgcgctctaaccagctgagctaacccgccattgctatcaaagcgagtgcaaaggtaatagaaattttcgatcgtgcaaaatcttcgggcaaaaaatcgacggaaaattcgcattccgacgctttggcactgattttgagccgagtgcacgtaaaccgaaaatatgtccctgtcagaatctacacgcacggagatccgtaactgcctgagcatcctcaaagtaatcgccggagtggttctgctcgccgccatttcgtgggaaataatcgccggcgaccacatgcacttttcacgcaactacctgatcatccagctcgtggtctgcatcctgttcctgtgcgatttcttcgtacggtgggcagcctcggagcgcaaaggccgcttcttcgcccgcaatttcctcgtactgctgatttcgataccctatctgaacatcatcgactggagcggcgccgaactcccccgctactgggccatgctgatcggcatcatgccgctgatgcgggcgttcctcgcattttacgtcgtggtgcagtggctcgtggacaacaaggtccggaaactattcttcgcctacatcttcaccgtggtcgtcttcacctacatttcggcgctggtcttctacgattacgaaatactcgtgaacagcaggctccacggcttcggcaacgcgctgtggtgggcgtggatgaacgtcacgaccgtcggagccgagatattccccgtgacggccatcggcaagatattctgcgtgctgctcccctcgctgggcatgatgttcttcccgatcttcaccacctacgtactgcaggagtactcgcacaaaaaagagtccgaccaataggccggactcctcttttcgggatgatatcccctatttcttctgctctttgagcagatcgcggatttcggtgagcagctgctcctctttggacagcagcggttcggcggcgggcgcaggggcctcctccttcttcttcatcaggcggttcatcaatttcaccatcatgaagacgcagaacgccagaatcgtaaagtcgatgcactgctggatgaaagcgccgtaattccagtagacgggttctgcggcggcctgcgccaccgtctcgcctccgcccgtcacggcgtcgccgacggcatgcacggcgctcgaagtcatgtcgcggaacttcgaaatatcgagccgcagctgcgagaagtcggtattgccgatcagcgccccgatcggcggcatcaggatgtcattcaccagcgacgacacgattttgccgaaagcgccgccgatgattacgccgacggccatgtccatcacgttacccttgagggcaaactccttgaattctttgaaaaatgccataaatctgaggttaaattaatcgatggaacaaatatagcgatatttaccgaatccgcaatcaaaaaaagccgcccgcagaacgcgggcagcttttcttcggataaacaggccggagggaactatacgatctcgaccagcacggcgtcggtggccacgttgtcgccgggatgcgccagaatctgcttgacggtaccggcgtaatcggtcgtcacggagttctccatcttcatggcttcgagaacaacgatttcctgacccgcttttaccgtatcgccgaccttcaccttgaattcgatgacgcggccgggcagcggcgccgtaacggtattgcccgtaatggcggccgcaacactctcttcggcctccttctcctcggccttgggttccgcgggcttcgaagcggcgtaggccttgaccttcatgtccgtcaggaagttcttggcgaccagcgggaagagttcgagcagcagaacctccttctcgttggcggcgagtttcacgccgccggcttcgggaagctccggattgggctgcatctggtatttcgacgtatcatagggagtctcctcgcggacgccgcagatcttgaagcggaattcggggtcgatcttcacgggcgtatgtccgtactcgcccttcaccagccccacgaactgcgagcttttgttggtgtacatcggacgtccggccttctcgtcgagggcgcagttcacggcctgcgcgcccacgatctgcgaagtcggggtcaccaggggcggcagacccgcggccagacgcaccgacggaatcagctccatggcgcgcggcaggatatcctcggccttgagctgcttgagctgggccaccatgttcgaatacatgccgccgggaatctcggccttctgcaccagttcgttgggagccgggaagccgaagtaagcctcgatcttgcggcaggcgtcgatcgtcgcggcctcgtcgtcggcctgagcggccttgatcgccttgtcgaacagcgcgtcgatctcggcgggcagcgtgtcggtgagcggattgaagggtttgggttcgggtttttccgtgccgaataccgactggttgagttccttgcggatctcgcgcagctgggtgttgatcttggcgacggcctccatgttcacaccggtatcgacgccgagcttcttgcagaagacgtgcaccagctcgatggccggggcgcccgtgccttcggcgaaataccagcagttggtatcgacgacgtcgacgccggcgatgatcgccgcaagcaccgatgcaaggccgtagccgggcgtacagtgggtatggaaatcgaccggaatgtcgatgttcttcttgaacagcttgaccagcgtggcgacgcggcgcggcggaatcagacccgacatgtccttgatcgtaatcatgtcggcgcccagcgcggccatctgcttggccttgtcgaggaaataggcgtcggtgaagacctgctcgtggctcttcctgcccatgagcttggcgaagaaaccgggttcggggtatttcggatcgaccgtatagcaaaccgcgcagtcagcgatgccgccgtactgcttgacgtacttgaccgtcgatttgacgttgtccacgtcgttcagggcgtcgaaaatacgcatgatgcccagcccgctctcgatcgagttgcggcagaagccgtcgatcacgtcgtcgggatagggagcgtagccgaacaggttgcggccgcgcgacagggccgtgagtttcgacacgttgccgacggccttgtgaatggtctccagacgcgtccacggattctcattgagatagcgcatcaccgagtcgggcacggcaccgccccagacctccatcgcatagaaatttgcatctttgtagtacggcaggcagcggtctacttgcgcctgcgacatgcgcgtcgcgaacgaggactgctgtccgtcgcgcaacgtaaggtctctgattttgagatttctcgccattgtgatatttgaattaagggttcttgtttcccgtctttactgttattccaataacaaagataataaacaatttcaaattccaactattttgcacggaattttcacaaaaaacgaccgaaaagattacttttcgtaaacaccccgccccgcaggggcttccgggccatgcgccctgacagcgccgccgggcacaaagagctgtttatcaggcgtgccgtcgaggtaacgcttcttgaagatattgacgcagaagacgaacatctcaagcagaagcggaccgaagatgacgcccatgaacccgaagagcgagaggccgatgaatacgccgaagatcgtcacgagcgggtgcgtgtcggccagcttcttctgcatcacgaaacgcacgacgttgtccacgtgcgtcaccaccagtccgccgtacagcgtcagccccacggccggcccccactcgcccgcaagggccatgtatccggccagcggcagccagaccagcgccgtgccgaagatcgggatgatcgtcgcgaagcaggtcagcacgccccagaacagcggactgggagcgccgaagatcaggtagccgatgtaggccacgacaccctgcaccacggccagcagggggattccgatggcgttcgagcggacgatcatatgcacttcgcgcatgacgctgccgctcaccgagctgtcgaagggaagtatctcgcggcagtactcctccatgcggcggccgccgatcagcatgaagtaaagcacgaacagcagcacgacgatattgaccccgaaatcgaaaatgctcgacacgacccactgccccagcttgggaatcatgccgatcatcgacgagatattctcctcctgccagaggttgtagccggttttctcgtgaatgagcgccgcaatgtgcttgagcggcgtaatgatcgaatcgggccggagcgtgatgtcctgcacctgattgaccaccatccagacgatcaggctgatggggaccagaaaacagagcaccgcctcggccagcagcagcgaggcggcaagactgcgccgccagcggcggcaggccgtcaggacctgcatctgccgccggagcagcacgtagatcgtcgccgcgccgagcagaccgcccagaaacggagtcagctcgatgcagatcgtgatccccagtccgaggatcagcacgaaaagcgaatagcgccagtatctttccctgaagttccgcatacgccgcagcgggcgcaaggaacgtgccggaagcccctccggcggccccggcaacgcactgaaaatttgtttgataaaaatttcgcatgttctattgcggcgtcggaatatttgatttatatttgtgctatgaaacttatggctgacttagtcaatatatcggtctgttcgcaccttttccgcatatacgcgggggggggcttttataacgtgcgaaaacgaacgaaactcgatcatcgtggctatataatataagtaacgagggatactccggacgaggtgtatccctctctgcttttacggacccttcggaaaacggccttgcaggggtctgcggcagggaagcgaatcgcaaatgcaacgaaaacgataacaaaacccttttttattaactaaattatttggtatgaagaaacttttcattctgatgctctcgattttcaccgtcgccgcggcttccgcgcaggtgacgacttcgggcatgaacggtacggttaccgacgaacagggccagcccctcgccggcgccaccgttatcgccgtgcacaccccttcgggtacgcagtacggcgccgtgaccaacaaggacggccgctacaacctgcagggcctgcgtacgggcggtccctacaccgtgaccttctcgttcgtgggttatcagggcgtcgagttccccggactcgaactgcagctgggcgaaaccctcacgcgcaacgctttcctgaaggacagccagacgctcgaagccgtagtcgttacggccgacggccgcaacagctcgatgaacgtaaaccgcgcaggcgccgttacgagcatctccagcgagcagatcgagctgatgccttcggtaagccgcagcatgaacgacatcatgaaactcacgccgcaggcttcgaccaccacgtcgggtctggcgatcggcggcggtaactaccgtcagtcgtacgtaacggtcgacggcgccgcgttcaacaacgccttcggcatcggcggcaacctgcccgcaggcggctcgcccatctcgctcgacgcactggagcagatgtcggtatcggtcaccccctacgacgttcgccagagcggctttacgggcggtgcgatcaacgccgtaaccaagtcgggaaccaacgaattcaaggcttcggcatatgttttcgccaagagcgaccagcttcagggcgacaagtacgacggcggcaaactgtcgctgagcgaaatgcgcaacaccaccctcggcttcagcatcggcgccccgatcgtcaaggacaagctcttcgtgttcgccaacttcgagcgcgagtggaacaccacgccgggaacgtcgcgtctggcacgcaccagcgacggtcagagcttcggcggcggctcgcagtacaaccgtccgacggtcgaaaaactcgacgaaatcagcaatttcctgatcgacaaatacggctacaaccccggtccctaccaaggctattcggtaaaaacgcccggctacaaacttatggcccgcgtagactggaacatcaaccgcaacaactcgctcaacgtacgcttcagccgtacccagaacaagtattcgtcgtcgccgtccagttcgatcagcccgctggacagcaagctggcctatgaccgcaacaactacggccgtacttcgaattacgccatgtatttccagaattcgcgctactatcaggagcagaacttcacatcggtagccgccgagctgaattcgcgcttcctcgaaggccgtctgaccaacacgctgcgctacacctactcgcatcagtacgagccgcgcagctacgacggcaaactcttcccgaccgtagacattctggaagaataccaaggcaaccgcgccgtatacgcgtcgttcggtctcgaccccttcacgtacggcaacctgcgcgaggtcagcacgcacgtcgtgacggacgaaatcggctatacggtcggcaagaaccgtttcgtcgccggtctgcagttcgagcacaacgtggccaagaacggctacctgcagggcggcgccggctactacgtctatgagacatgggacgatttcaagaacgaccgcgaaccgctggcgttccgtatcgcccacggcaacaacgacgcgctggctcaggagtatccccagttcacctacatgcagtactcgatctatctgcaggacgagatcaatttcagcgagcgcttcaaggcgacggtcggtatccgtttcgaggtgccctcctacccctccatcgacaacaacgagaacaaggacttcacgcaggctttcgccaactacggcggctataagacctcggacatgcccaaagcacgtctggcagtagctccccgcgtaggtttcaactgggatatgaccggcgaacgcaaatacattctccgcggcggtacgggcgtcttcaacggccgtctgccgttcgtatggctggtgtcggtggccggcaacagcaactgcatccagaacggactctcgctctacaagggcgattcgcgcatgcccagcttccacaccaacgtcaacgacatgctgaaggacatttacggcggcacctacaaacagcaggatctggcggccaacacgcagcctaccattctggacaagaagctcaagatgccctccacgtggaaaacctcgctggcgctggatctgaaactgccgggtgacgtcgacctgaatatcgagggaatctacaacaaggatttcaactcggtaaccgtaaccaaactcggtatcgaagaggaccccgccggcattcagcttccgggcgaacctgctctgcgcaaggcatggaagagccagaatatcagaaacaagaatcccgaagagaaatactccatcaatccttacctgatcaccaacgccgatatcgacggatattacgcatcggtttccgctcaggtgtcgaaacgctggggcttcggtctctcgctgatggctgcctacacctattcgagcgccaagaacgtgatcgacggcatcggcgaccaagtgacttcggcatataacaccaatacgttcaaccgcaacggttcgaacacgcccgaactgggatacgcatcgtacgtatcgccccaccgcattctcttcaacgtaggctaccgtctggcgcagaagaacggcgcatcgaacttcggactctactacgaagcgttccagcacggctatatcggcggttactcctactcgcgctactcctatacgatgggtaacgtcaccggcgacggcggcgcagacctgcttctctacatccccacccgcgaacagctcgacaagatgacgttcgccgatctgacggacaagggcgaggtcatctattcggccgccgaccagaaagccgacttctgggcattcatcaacaaggattcctacctgtcgaagcacatcggcgaatactcgaagcgcggcggcgccgtgatgccgtggcagcacatggtgaatttcaaattcgcgcaggatttctacatcaatatcaacggcaagcgcaacacgatcacgctgggcgtcgatatcaacaacctcgccaacctgatcaaccgcaactggtgcggcatcgaccgtctcgaatcgtcgcagattctgaaatacaacaccaagaccaacgcctacaacttcaccaagcccgtttggtcgaagtatgcgagcacggttgcgacttggtcggccatgttcagcatccgctacacgttcaactaagtctccgagagactgcaatgcaaagagaggccggttttcaccggcctctcttattttttatcgcttcctattgttacagcagcctgcgccgcagctcgccgcatgcggcggcgggattccggtggtcgaaaaggtatccggcgatgcccagcccttcggcggcggcgatattcgccgcgcggtcgtcgatgaagagggtttcggcgggatcgagtccgtagcgttccagcaggatttcgtaaatccgcggttcgggcttcaccgtcccctcctcgcaggagaccacctcgccgtcgaaaaggcggtagacgggaaaacggcgcaggaaggcgatgaactcgcgcgacatgttcgaaagcacataaagcctgtaccccgcggccttcaggtcgccgacgagccgttcggtcggcgcgacgggttcctgcatgtcgatcgacagcagcagaaaacgttcgcacttttcgcgcgggcagccggtcgtccgggcgagcatgtcggtcacctcgccgagcgtcgatgcgccccggtcgtactcctcccagaaaaggggcatccgctccgagcggatgaagctgaaaaattcatggaattcctgtgtggacttatttttgtcgcgggcgaaaagcaccccgccgaggtcgaaaacgatatttttcatggcgtaaagatagccattttttctttggttcgggatttgcaggtctgcgttcgaacaaaaactcagtttatgaaccacggcataagcattcttttccgcgccatacccctcgcgatggcggcattctgtttcggttacggagcctacgtcttcgccgccggaagcgatccttcacggctgaccgcaggtcccgtcgtctttttcctcggctcgatctgcgtcgcgctctactgcacggccgcgaccatcatccgccagatcatcggcacctacagcgccgccgcgaagtaccttttcccggccgtcggttacgctttcgccgccatgacggtcatctgcggaatcttcatcatcacgtcgaacatgacgggcgcatacgtcacggggcatgtggtctgcggactcggactcatcacggcctgcgtctcgacggccgccacctcctcgaccagattcagcctgattcccaaaaactcaggcgacagcagcttctcgatcaatcctgcgggattctcgcgcggacaaagctcgctgctgatcttcatcgtatcggccgtggccgccggagcatggctctggtgcatcctgctgttttcgatcgggacgctcccggcgcatatcgtcgcgggcagcgtcatgttcggcatcgcctgcgtctgcacctcgctgatcgcgctggtcgccagcatcgcccgtcaggcacggggcagctacacgatgggcgaacgccgccgctggatgagtctggtactctgcatgggcggactggctttcgtgctggggctgatcctgatcttcacattccggggcgagtcgatcaatttcgtgggcttcgtgctgatcggactggcgctgatctgctggagcatttcgagcaaggtgatcctgctggcgaagatctggcacgccgatttcccgctggccaaccgcattccgatcattccggtactcacggcgctggcgtgccttttcctcgccgcgttcctctacgaagcggcgctgttcgaaaccaaatacttcgtcccggcgcgcgtgctgacgggattcggcgccatctgcttcacgctctactccatcgtctcgattctcgaaagcggcgcgagcaagaaataacggcacctccgcaaacgcgatcttccgacacacgaaagcctttcgtccgttagggccgaaaggctttttcacatatggcggcggacggcggtgcggcagatacaaagcgacgcgcagagaaccgccgccggagagcggcaggctgcggacaaccgacggcggacgacagccagcagcagacggcggagaacgtcccaagagcgtcggactggatgctccgtctcgaatccgcactcccgccgaatcagcgacggccgcccgcagatgcgggcagccgtcgcagcaagggattccggcagactaaaaaaggtggaaagccaccgtcaggccggccatgacgatcgagaccatcgacatcagtttgatgaggatattgagcgacggacccgacgtatccttgaaggggtcgcccacggtatcgcccacgacggtcgccttgtggcagtcggagcctttaccgccgaaatgtccctcttcgaccatcttcttggcgttgtcccacgcgccgcctgcattggccatgaacacggccagcacgaagcccgaactcaggccgccgacgagcagtcccatgacgcccgccacgccgaacaccaagccgacgaccaccggcacgacgatagccagcagactcggcagcagcatctcgcgctgggcgccgcgcgtcgaaatctcgacgcaccgggcatagtcgggagtgccctcgcccgtaaggatgcccttgatctcgcggaactggcggcgcacctcgttcaccatgctttgggccgcacgccccacggcgttcatcgtcaggccgcagaacaggaacgacatcatcgcgccgacaaacacgccgatcagcaccgtcggattcatcagcgacacgtggtaatactccataaaatcgaggagcgaagccttctcgaccagctgcgtcgtgccgttgggcaggtcgagggccgtcacgccgttgtgcagcagtccgatgcgtatctcctcgatataggaggccagcagcgcgagggccgtcagcgcggccgaaccgatggcgaagcccttgcccgtggcggccgtcgtgttgcccagcgcatcgagcgcatcggtgcgtttgcgcacttcgggccccagcccgctcatctcggcattgccgccggcattgtcggcgatcgggccgtaagcgtccgtggcgagggtgatgcccagcgtcgagagcatgccgaccgccgcgatgccgatgccgtaaaggcccagcgacatactctgcgcggacatgatatgctccatgtcgaagccgatggcgcaaaggtaggcgaggataatcgccacgccgatcgtcaggaccggaacggccgtcgagatcatgcccgacccgatacccgcgataatcacggtggcaggccccgtctgggcgcttccggcgatcttctgcgtcggcttgtaggagtgcgaggtgtaatactcggtggcctgcccgatgatgatgccggccaagagtcccgtgatgaccgagaacgacagtccgatccagttctcgattcccagcaggtagaggatgccgaacgtcgcgccggcgatcagcagcgaactgaaattgacgcccacgcccagcgagcggagcagttcgcgcatcgtggcgccctccttggtccgcacgaggaagatgccgatgatcgaaagcacgatgcccacggcagcgatcagcatcggcgccagcacggcgcgcagctgcatggccatcccgtccgccgaagcgaaggcggcggctccgagggccgcggtggcgagtatcgagccgcagtagctttcgtaaaggtcggcgcccatgccggccacgtcgcccacgttgtcgcccacattgtcggcgatggtcgcgggattgcgcgggtcgtcttcgggaattcccgcctcgaccttgcccacgaggtcggcgcccacgtcggccgccttggtatagatgccgccgccgacgcgcgcgaagagcgcctgcgtcgaagcgcccatgccgaaggtcagcatggtggtcgtgatgacgacgagtttctgcggtccggtgacatcgacgaaatattcgaggatgacgtaccagaacgaaatgtcgatcaggcccagccccactacgaccagccccatcaccgcaccgctgcggaatgcgaccttcaggccgcggtcgagcgactggcgcgcggcgttggccgtacgcgccgaagcgtaggtcgcggtcttcatgccgaaatagccggccagccccgaaaagaatccgcccgtcaggaaggcgaagggcacccacgggttctgcaccccggcgccgtaggccagataggcgaaaaacagcgccagcacgacgaacacgatggcgacgaccttgtactgctggcgcaggtaggccatggcgccccggcgcacgtgcccggcgatctcgcgcatgcgcggcgtgccttcatcctcgcgcttcatcgcgcggtaaaacgcccaagccagcagcagggcgataaccgcggcagcgggaatgaaccagaaaatggaaggaatgttcatttcgatagaatttggttttaagttggtaaatcggttattactacaaatataataaaattcccgaaacggcgtccccgcaaagggaccgttccgtagcacaaaaaaatccccggacagctgtccggggattcgaataccgacaaatcggattacgaaccgaagttgtcgtagaggatattttcgggcggcacgccgagactgtcaagcatcttcaccaccgaagcgatcatcatcggaggtccgcacatgagatagatgcagtcctcaggcgcctgatggttcttcaggtaattctcgtagagcacgttgtggacgaagcccggcgtgtacttcacgcctgcggcgtccgcttcgggatcgggacggtcgagtgccagattgaacgagaagttggggaaatccttctcgatggcgtggaactcgtcgagatagggaacctccttcagcgcacgcgcgccgtaccagaacgaaacgggacgcttggtcttctcggtcttgaacaggtgcatcaggtggctgcgcatgggcgccatgccggcgccgccgccgatgaagatcagctcctgcgtgtcgggcaggtcatccggcaggaagaactcgccgtaaggacccgaaatcgtgatcttgtcgcccggcttgcgcgagaagacatacgacgagcagatacccggattgaccttcatgaagccgcccgtcgccttgtcgaacggcggagtggcgatacggatgttgagcatgatgatattgccctcggccgggtggttggccatcgagtaggcgcggaacgtgtcttcggggttggtcgtaaccagatcccacatcttgaacttgtcccagtcggcgcggtacttctcatcgacatccatgtccgagaacttgatggcgtcgtacttcgggatgtcgatctgaatgtaaccgccgctgcggaacttgaggttctcgccttcgggcagcttcacgacgaactccttgaggaaggtcgaaatgttgcggttggagacgaccgtacactcccacttcttgacgccgagcacggcttcggggaccttgatcctgaggttttccttcaccttgacctgacagcccagacgccagtggtccttggccagcttgcgcgaaatgaatccggtttcggtcggcagaatatcgccgccgccttcgagcacctgacatttgcacatgccgcacgaaccgccgccgccgcaggccgaaggcaggaacaccttgttgttggccagcgtcgaaagcagcgtcgagccgctctcggcggtgatgaccttctcgccgtcgttgatgtcgatcgtcacttcgcccgacgaggtcagtttagcctttgcgaagagaagcagccccaccaagaggagggttacagccagaaaggcaatgattgcaactataatagtcaattccatgttttccgaatctcttttaaggttagaactgaataccggagaagatcatgaaggcgatacccatcaggccggtgatgataaaggcgatacccggacccttgagcgccgcaggaatctgcgagtaagtcgtcttctcgcggatcgcggccatcatcacgatagccagccaccagcccagaccggagcccagaccgtagacgatcgactgccagagcgacgtaagctccagcgcgtcgactttctgctgcatgaagagcgaaccgcccatgatggcgcagttcacggcgatcagcggcaggaagatgcccagctggctgtaaagcgtcggcgagaacttctcgacggccatctccaccagctgcacgaaagccgcgatggtggcgatgaagacgatgaaggtcaggaagtccagattgacgtccggaagcccggcccacgcgagggcgcccgccttgagtacgtattcatacaggaagtagttcagcggcacggtcatcaccattacgaacgtaacggcggcgccgaggccgagggcggttttgacgctcttcgaaacggcgatgtaggaacacatgccgaagaagaacgcgaagaccatgttgtcgataaagatcgaccggataaagatattcaatgattccatacgctattctcctatttttcctgtaaatccttgttgcgcgaacggtgcacccagatgatgcagcccacgatgatcagcgccatcggcgggaagagcatcaggccgcagttggagtagaaaccgccctcggcgatataccagctctcaggaacgatgcggaagcccagcagcgaacccgaaccaaaaagctcgcggaagaaagccacgatcaccagaatcaggccgtagcccagaccgttgccaataccatcgaggaatgacgcccacggcttgttggccagcgcgaaggcctcgatgcggcccatgacaatacagttggtgatgataaggcccacgtaaaccgacagctgcttggaaacctcgaaaacgtaggctttaagcacctgatcgaccagaattaccagcgcggcgataaccaccagctgtacgatgatgcggatgcgcgagggcacgccgttgcgcagcagcgacatcaccagattcgagaatcccgtcacgaccgtcacggacaaggccatgacgatggcgggtttgagctgtacggtgacggccagcgccgagcagatacccagaatctgcacgatgaccgggttgttcgcggagaacggccccgtcaggaacttcatgttcttagccgaaaacaaaggctctttttcgttcttactcattgttttctacattttcttcgttagactcatcccgcacgggagcaaatacgacctgctcgaccgcggccttgcgcttggcttcgagcagcggcaggtagtgttccatgctgttgtagagcatcgccgtcacgccgtccgaggtcttcgtaccgccggaaatggcgtcgacctcatgttcgggatcctgagcgccgcccttgcgcagtttcacggagacgaactcgtcgcctttgaagatcttcttgccgacgaactgcgcctgatatttcggcgttgcgatctcggcgcccagaccgggggtctcgcccttgtgggccatgatgataccggccacggtgtccatatccttttcgagggcgatataaccccagacgggtccccagaggcccatgccggtcacgggaatcaccacgcggccgtcggcggcttcgaatacggggaacttgccgtcgtcgaaagcgccctgaaggtccttcagcagctcgaagacatcctcgccttcaagctcgttgccgtcggcgtcgagcacgtagcccttgatgaaggcgtcgtaattctcaccctgcgccgagagcgacgaaaggatcgactgcttcttctcgttcagctcgttggcgtactggcgcgactggagcgaaagtgcggccacggccagcagcgtcgctacgatgaccaccatcaccgtcgagtacattataatatatgcgttgccgttcttgtcgctgaacagcccctttttcttctcgtccttcagttcgacgaacgccgaagcgggggccatgcagaccgggcatttttcgggtgcggcgtctccttcgtgaatgtagccgcaaacggtgcatttgaattttttcgttgccatattctcccctattttgccagtttaacacgtttctttctgcgcgagatgttcgcctcgaccacatagtagtccaccagcggagccagcgcattcatgaagaggatcgacagcatcatgccttcgggataggccggattgaccacacggatcagcacggccagcgcaccggtcatcagacccacgatgtatttgcccttgtcggtctgcgccgaggtgacgggatcggtggccatgaagaccgcaccgaaagcgaaaccgccgacgatcaggtgccaccatgccggataggtcgtcacgccgagcgcttggaagagatagcccatcgccagaccgccgacgaacaccgagaccatcgtgcgccacgaagcgacgcccgtgaagagcaggatcgccgcgccgatcaggatcgccagcgtcgaagtctcgcccacgcagcccggaatgaaaccgaggaaggcgtccatggccgaatagcccatctggcccgtggtgctcaggttttcgagcgccgttgcgccggagaagccgtccaccacgccctcgccggaggtcatgcccgcgatccacaccgtcgcgcccgacatcgagggcgtataggcgaagaaggcaaaggcgcgcgccagcagcgcgggattgaagacgttcatacccgtaccgccgaacacctccttgccgaagacgacggcgaaggcggtcgagagagccaccatccagagcggaatgtccaccggcatgatcatcgggatcagcagacccgacaccaagaagccctcgttgacctcgtggccgcggaactgggcgaatgcgaactcgatgcccagacccacgacgtacgaaacgacgatcagggggagcaccttgaggaatccgaaccagagcgaagcccagaattcgggctgcacgccctgcgagaggaagtgcatgtaacccgtgttatagaaaccgaacagaagcgccggcatcagggcgacgaccaccatgatcatcgtacgcttcatgtcgttgcagtcgcggatatgcgcgcctttggaagtcgtcgtgtcgggtacgaacaggaacgtttcgaacgcatcgaacgtcgattccaagaagcccagcttgccacccttggtgaacgtgggcttgagcttgtctactaaattgcgtaatgcgctcatcgttaagcctccttaatcattaagttaataccgtcgcggatgatctgctgaatctcgatcttcgagggatcgacgaactcgcaaagcgcgaaatcctcttcgaccacttcgtagatgccgaggttttccatcttgtcgatgtcgccggcgagacacgccttgagcaggtacatcgggtagatgtccatcggcagatagcgctcgtaaagacccgtcaccacgaacggacgctcgccgccgttcatgttggtatcgagattgtactccttcttggggcagagccacgagaagtaggcgcgcgatacggagaatttgttgaaacggggcatcgcccagcccagcagctcgaacttgtcgccttcgggaatcaccgtcagctggttggcatagaaaccgatgaagccgtcggccgcggttttcgtacccgtgagcacgttgcccgaaatgatgcgcacatggtcgccctccttctgaggcttcacgttgcccttgaggatcgaatcgaccttggcgcccgcgatgatgcggcagtactgcggcttttcgatctccgagccggccacggcgatgatcttcgtcatatcgacgcggccctcgttgaacagacggccgatgatcgccagatcctgaatgttgaccgtccacacgacttcgcccttgttcacggggtcgatgtggtggatctgcacgccgacgttgccgacggggtgcttgcccgcgaaggcatgcgtctcggcgcccttgagcgcagtcatctgcccctcggccttggcgcgcaccgaaagatgcaccttgcccgaagtgagtttgcgcattacgtcgataccggtctggaggttcttctgctcggcgcgcaggacgtagttgtagtccggagccagcggcgcggaatcgaaggcggagatgaagaccgctttcggcgtgtcgttcgggtcggcgataacgccgtagggtcgctgcacgatcatgggccagagacccgacttgagcagcagctcgacaatctcctcgcgggaagccttctgcagatcgggcttcgcgaactcctcgtagctctgtacggaggcgggcgtcacggtcacggagagaatcttgcgcttctcgccgcggttgacggccgcaaccgtaccgctgacgggcgacgtgaagaggatgcgctcgctgtacttgttgaagaacagcggcgtaccggctttcacctcatcgcccaccttaaccagcaacttgggagtcacgccctcgaaatcgagaggcgagagggcatactccgaagccagcggcgcgtcggccagagactcctgagcctttccccggagattgatgtcgagacccttgcgtagtgtaatgattttcgacatggttaaagattttgattgttatgtttggatatattttgggttcgtcgtgcgttgttagtgtgctaacagccataattcgcgtgcgaaaatacgaattttttccgagaatccggtatgcaatatctattattttttaatttacttaaaattcgtacatttgtcgcgatgaccgatcgattcgtcaacatacacacccaccgcccgaccggccgcggcatcgaactgcggacagccggaattcatccgtggaatgctgacaaagaagacgttagcacgatcgtgccgtcgctcggcgaggtgcaggcggtcggcgaaacgggactcgatttcgtgcgcggcgccgaccgtgcggtacagctggcggcgttcagggcgcagctcgcgctggcgcacgaacggcaaatgcccgtggtactgcactgcgtcaaggctttcgagccggtcatgcgcgaactggacgcctgccggccccgcgcggtgatttttcacggcttcatcggatcgcccgaacaggcccgccgggccgtcggaaaaggttattacctttcgttcggtctgcgcgccttcgcatcgcccaagacgctggaatccctgcgcgaaacgcccctctcgcagctttttctcgaaaccgacgacagcaacgtcccgatcgaggagatctacgcgcgcgccgcgaaggtaaaaggcgtcacgccggaggaactgcaacgggcgacgctggaaaactacggacggatatttacggccgggccgcaagggcaggacaaggcggccggaacgccgccgctcccggcccgataaaacgaacacagcacttgaaaatgaatacggataattggcttgaacgcaccgagctgctgctcggcaaagagaaactcgacctgctccgaaaggcccacgtactggtcgtcgggctgggcggcgtgggcgcctatgccgccgagatgatcgtccgggccggcgtgggccgcatgaccatcgccgacgccgacgacgtagcgccgagcaacatcaaccgccagctggtcgccctccactcgaccgtcggccgccggaaagccgaaattctggccgaacgcctgcgcgacatcaacccggaaatagaactcacggtggtcgaccgttacatcaaggacgaggagaccgacctgctgctcgacgccgcgaaatacgactacgcagtggacgccatcgacaccctctcgcccaaactggcgctgataaagggagctttggaccgttcactgccgctggtcagctcgatgggcgcaggggccaagaccgacccgacgaagatggagatcgccgacatctccaagacccaccactgtccgctggcccacatgctgcgcaaacggctccacaaaatcggcgtccgcagcggtttccgggccgtttactcgcccgaaccgatgcgcgaaggggcgctgatcctctgcgaggagcagaacaagaagtcgaacgtcggcaccatatcctacatccccgcgctgttcggcatcggctgcgcgtcggtcgtaatccgcagcctgatcggagaaatgaactaaaaccgcatatccttatgaaaccgaacatcgtatttctggacgagtacacactcggaggcgccgacctcggccggctccaagccttgggcgaatacaagggttacgcccgcacgacgcccgaagagcttcccgaccgctgccgcgaagccgacgtgataatcaccaacaaggtggtcctgcgccgcgaaacgcttcggtccctgccccggctgcggctgatctgcgtggccgccaccggcaccaacaacatcgacctcgaagccgcggccgagctggggatcgaggtaaagaacgccgcaggctactcgacgcactccgtggccgaaaccaccctcggagcggccatcgcactgcgccgcaacatcgtctattacgaccgttacgtcaagagcggcgcctactccgccgccggacagcagttccatttcgcactgcccacccaccagctctacggctcgaaatggggcatcgtcggactcggcgccatcggccgcgaggtggcgcggctggcggcggcattcggctgcgaagtatgctacacctcgacgtcgggcgtcgtgcgcgaagagccttaccccgcgcttccgctcaccgaactgctgggccgttccgacatcgtctcgatccacgccccgctgaacgaccgcacccgcggactgatcggcgcgccggaattgtcggtcatgaaacgctcggccctcctcataaacgtcgcccgcggcggcatcgtcgatgaagcggcgctggccgaagcgctcgaccggggttcgatcgccggcgcggccctcgacgtcttctcgcgcgaacccttcgccgccgacagtccgctgctcggcatccgcgaacccgaccgcctgctgctctcgccccacaacgcatggtcgccccgcgaagccgtggacgtgctggtaggatgcgtcgaggagaatatcaaaaccttttatcacataggataatgaccgggagacctctgctgacccttatcgttcccgcctataacgccgcaaattatctcccgaactgtctcgacgacctgctggcccagacgttccgggatttcgaagtgctggtgatggacgacggctccaccgaccggacggccgacatcggcgagcaatacgccagacgcgatccgcgcatccgggtcatgcgtctgccgcacggcggagtctccgcggcccggaaccgcggactggagctggccgaaagccgttacgtcgccttcatggactgcgacgaccgggtcgatccccaatatctggctgcatttttccgcaccccgctgcccgacggcgacctgctggtcagccaaggcgtcgccatcgaatacatcgcccaaaaccgcacggagctttacgactaccccgacaccaccggcacgcaaggcgagctggggaaaataatcgtcgaaaaccgcctgctgcgcgacggatggacctactgcaaactgttctccctcccgctgatccgccgggaagcgctccggttcgacaccgggctctccatttgcgaggatctcgtcttcgtactcggatacctgagccacgtccggcagatcattctgcgttcgggtacctattaccattatcaggtctgccccgacggaacgtcgctttcgcagcggcggcagcccgccgccgaaacatttcgcgccggagtgtcgatactggccaaacagcaggcgctgaccgaacggttcgggatcaccgatcccgaatatctggccgaagcctattcggaacacggactgacaaacctcgcaaggtcgatcagtacgacagatgcggccggcaaccgcgctttgcagcgcgaaatcatccgcaaccgggagctgttcaggcaatatttcgacgccgattcgatgcatcatcccatcgtcggaaagaaaatcctgtggatgtacctcacccttcccgaatcgcttcacctgctgccccattggatcgtccggttccgccatttcatccggagaatcaagggacggcccatatattactgaaaaacagtttcaaaaacgatggaaacgaccgaccgacgccaaaaagtcttcgactggctcgacagccacggcatcgcctacacgtggtacgaacaccccgaagccccgaccatcgaaatcgcacgccgatactggcgcgacgacggctcgaagcactgcaagaacctctttttccgcaaccacaagggcaaccgccactacctcgtggcgttcgactgcgagcagaacctcgccatccacgacctcgaacgccgcctgcggcagggcaagctctcgttcgcctcggagcagcgcatggagcgctggctcggactgcgtcccggctcggtgtcgcccttcgggctgatcaacgacccggagcaccacgtacacctgtttctggaccggaatctggagagattcccagcctattcgttccaccccaacgacaaccgcgccacggtggtcgtctcccgcagcgagttcctgcgctacctcgccgccgtaggcaatacgtacgaattcatcgaactctactgattcatcgaactctactgattcatcgaactctactgactccgtcatgcgcagcagcgatcgccgcagacgaaaaacttccggtccgcgccatcacccaaggcagccccggaggtccgcggcgcgaatcttctgcagaaggcggtacgattgccgaaacaactgacgttgttcggagaaacccacacccgcacaaatttcgtccggttccgctccatcatgcgcaggaattcattatctttgactattccaataacctaaaaaaagaatcggcatgaagaaatttacgctcaccctgctcctgattttcggcacggtttccgcgctcttcgcccagcagagcgtccgggaggatatcttcgcttttctgaagcgcgaaggctatgtcccaacgttcgacgaagacagggacattctgttcaaagtacagggaatcaactactacgccatcataaaagaagtggcggacatggattacgcctatgtggaggtatcggcgaatttcactgccgacgtcccttatgacaaactgctggcgatttccaacgatcagaaccgggacaaattcgtttgcaagtgttcggcggagcgagacggagaggacaactgcttcaaggtcgccatggaattcatcacaaacaaccggacgaataccgaataccagatggcgcacgccctgcgtctcctacccggctggatcgagaagttcaaggaggaactcgactaagagcagcgcgaagcatccggccgaaaaccgttccgcacccggaaccggattccgccccgaaacaaaaatcccgcactttacggtgcgggattttttgtgtcagcaagcgggctatttcagctccacgagcgccttgccggtcatttcggcaggctgttcgagtcccatcaggcggagcaccgtgggagccacgtcggccaagatgccgtcgtgcaccgacttcacgcggtccgaaacgaccacgatgggcaccggattgagcgagtgcgccgtattgggcgtaccgtcggcattgacggcgttgtcggcgttgccgtggtcggcgatcatcacgacctcgtagccgttggccttggccgcttcgacaaccttggcgacgcatccgtctacggccttcaccgctttgacgatggcctcgtaaacgcccgtatggcccaccatgtcgccgttggcgaagttcaggcagatgaagtcgaatttttgctcaccaagcgcggcggccagcttgtcagccacttccggagcgctcatttcgggctggaggtcgtacgtggcgaccttgggcgacgccacgaggatacgctcttcgccttcgaactccgcttcgcggccgccgttcaggaagaacgtgacgtgggcgtatttctcggtctcggcgatgcgcagctgccgcaggcccagcttcgagacgtactcgccgatggtgttgggtacgttctccttgtcgaagaggatgtgcaggcccgtgaacttggcgtcatagggcgtcatgcagcagtagtagagcggcatggtgtgcattccttcggccggcatgtcctcctgcgtcagcacgacggtcagctccttggcgcggtcgttgcggtagttgaaaaagatcaccacgtcgttcgggcggatcatgccgacgggctgtccgttctcgtcgatgcgcacgaaaggcttgatgaactcgtccgtcacgccctcgtcatacgacttctggacggcttcgaccatgtccgacgaacgttcgccgatgccgttgaccagcgcgtcgtatgcgatcttcacacgctcccagcgcttgtcgcggtccatggcgtaataacggccgatcaccgtagcgatcttgcccgtcgtggcggcgaggtgcttttcgaggtcggcgatgaaacccttgccgctgcgcgggtcggtgtcgcggccgtccataaagcaatgcacgtaggtattgtcgaggccgtaggccgccgaaatgtcgcacaacttgaagaggtgctccagcgacgagtgtacgccgccgtccgacaccagccccatgaagtgcatgttcacgccgttctttttggcgtattcgaacgccgccttcacttcgggattctccatgatcgagttgtcgcggcaggcgcggttgatcttcacgagatcctgataaaccacgcggccggcgccgatattgaggtgtccgacctccgagttgcccatctgtccttcgggcaggccgacgttctcgccgtcggtgcgcagctgggcgtggggatatttctccgtcatggccgagatatattcgggatgcacggtcgaaatcacatcggccttgtcgtgatggccgttgccccagccgtcgaggatcatcaataataccttgttattcataatcgtttgtttttagtaattatctcatctgtttcgctccggcccatgccgtcgcaccgtttggcctgcgcaccgccgattccccacccgacaaatatccgccgcagcgcgaccgggaaccgtgtcggaaccgccgtgggacattgcaaccgggaacccgccgccggaaattgccgccggaaaatcacaaccgccccgccgtaaatacgtcaaccgagaaccgccgccggaagctcgcagccagcatctccgtcggaaaaccgctgctgaaaaatcgctgccggaagagatcagccgcccccgccgtaaatacgtcaaccggcgacttgccaaaaggcggttcgccgccgaacgccgtgcggcctaatgcaactgcgccatgatcagttccacggccttgtcgatggccgcctgcagcccgtcggggttcttgccgccggccgtggcgaagaacgcctgaccgccgccgccgccctgcatcagcttcgcggcttcgcgcaccacggctccggcatttacgccctgcgccgtgatctcttcgccgagcatcaccgtcagcatcggcttgccgtcgttgaccgaaccctgcacgagcaccagtttcggagcacgcgcacgcagacaataggccagatccttgacgaattcgggcgtacggtcggtctgcgtggcgatcagctgcacgccgcggcgttcgggcgtcgaggcgatgatcttatcggcccactgcgcaacctgctcgcggcgcatggtctcgacctccttcgacagcgcttcgttgctttcgaacatcttcttgacggcctgcagcacctgcgggttatgcagatagtcgctgatgtcgcgcatcgtgtcctcggcggcatagatgatctgctcggcgcgctcgcccgtcacggcctcgatacggcgcacgccggccgaaatggcgctttcgttcaggatcttgaagaagccgatgttgcccgtggcgctggtatgcgtaccgccgcacaactcgaccgacgagccgaagcggaccatgcgcaccttgtcgccgtacttctcgccgaagagcatcatcgcaccgcatttctcggcctcctccttggtggcttcgcggttctcttcgagcggatagttggcccgcacggcgcggtttacgagcatctcgacctcgcgcagctcctgcggggtcatcttctggaaatgcgagaagtcgaaacgcaggatttcgggcgtcaccatcgagcctttctgctcgacatgctgtccgaggaccttgcgcagcgcctcgtgcatgaggtgcgtggccgtatggttgttggccgcggcctgacgcttcgcggcgtccacgacggccgtgaacccggccgcgggattttcgggcagctccctgacgatatggataatcagtccgttttccttctcggtggccacgaccgcgatgcgctcgtcggcgttctcgatatagccgatgtcgccgatctgaccgcccgaattgccgtagaacggcgtgcggtcgaagaccagctggtaagaggtcttgcctttggaggtcacgcggcggtagcgggcgatccggacctgctcggtcagcgtgtcgtatcccgtgaagagactctccctgatggggaacagctccacccagtcgtcggtatcgacggccgcagcgttgcgcgaacgctccttctgggcctgcagttcggtctcgaaggccgcgaggtccacgccgacgccctgctcgcgggcgatcagctccgtcaggtcgatcgggaagccgaacgtatcgtagagttcgaaggcgtccttgcccgaaatcagctcccggccctcgcccttggtcttttcgatcacgccgtccagcaggttgatgcccgtggccagcgtacgcaggaacgaagcctcctcctcctcgatcaccttttcgatcagcgactgctgggccttcagttcggggaactgctcccccatctgctccaccagtccgggaacgagcttgcagatcgtcggctccgtaaagccgaggtaggtatagccgtaacgcacggcgcggcgcaagatgcggcggatgacgtaaccggccttgacgttcgacggcagctggccgtcggcgatcgaaaaggcgatggcgcgcaggtggtcggcgatgacgcgcatcgccacgtcgcacttggcgtcggcgccgtaagccttgcccgacagctgcgaaatgcgctggatcgtaggctggaaaacgtcggtgtcgtaattggacttcttgccctgcagaatcatgcacagacgctcgaagcccatgcccgtatcgacgttgcgggccggcagcggctccagcgagccgttggccttgcggttgaactgcatgaagacgaggttccagatctcgatcacctgcggatggcccgcattgaccatctcgcggcccggcttggcggcgatctccgcctcatcgcgcaggtcgaaatgaatctccgaacagggaccgcagggacccgtctcgcccatctcccagaagttgtcgtgcttgttgccgcggatgatgtggtcttcgggcaggaattgcttccagtagtcgtaagcctcctgatcgaagggcacgccgtcctcctccgagccttcgaaaaccgtggcgtacatgcggtcggccggcagtttgtagacgccgcccagcagctcccacgcccactcgatcgcctccttcttgaagtagtcgccgtaagaccagttgcccagcatctcgaacatcgtgtggtgataggtgtcgtggcccacctcttcgaggtcgttgtgcttgcccgacacgcgcaggcacttctgggtatcggccgcacgcggatatttgcggggcgcgttgcccagaaagatgtccttgaactggttcatgcccgcattggtgaacatcagcgtggggtcgcccttcacgaccatcggcgccgaaggcacgatcacatggcccttgctctcgaagaagtcgagaaaggcgcggcgaattttattcgattccatatataagattttatccgattctttcgtttgtgatttcgggttgcaaaattacacaattaaagttaaatttgcatcctattaacaggagttttttccacgatggggcaaaaagggcaaagatcggatacacacacgctgacgcacgaggcgcagacactgacgcgcgacgtggtcaccgccccgttccgcctgcgcacctaccgtctgatccgcaagatactcatcggttttattctcgtctcgatcgccaacgtactcttctcctacttcttctacaccccgaagatgtaccgcatcatccgcgagaaccgcgatctggtgatcaaataccgcatcctgcaggaccgcatccgcacggcgcagcgccacgtggacgaaatacgccaccgcgacaactacgtctaccgttcgctcttctcgaccgacacgatgtcgatcgaaggcgtctggcagccctaccccgacaccaaatacgccgcgctgctcgacgacgactacgccccgctgatggtcggcacgtggcggcagctcgacgcgctggcccgcacgctctacctcgaatcggtgtcgttcgacgaactgcaggccttctcgcaggacaaggagaagatgtcggcggcggttccggccatctggcccatcgaccgttcggcgctgcacaacaaccacatcggcgcattttcgccgcgccgctaccaccccgtactccaccgcgtgcaggcccacacgggcgtcgatttcggctgcgaccggggtacgccggtatacgccaccggcgacggcgaggtggaactggccgtcggcagcggctacaacggcggctacggctatcaggtgctcgtaaaccacggtttcggctacaagacccgctacgcccacctgagcaaggtgctggtcaaaccgggcgaacgcgtgacccgcggtcaggtgatcgccgaaacgggcaacacgggccgctcgacaggcccccatctccactacgaagtgattcacaagggtacgcccgtgaatccggtcaactatttcaaccgcgacatgaccgccgccgaatacgacgacctgatggcgcggatgcgtgaaaccaatttcgaaatgtaacgtatggccgggaaaaaggacctgatacggcttcgcaagcgtaagcgccgcaaacagaacatcatacgcgccacgatccatttcttcgtatgggcgggcgtcgccgtgctctactacatcggtttctcggtgttcttcgacacgcccgtcgagtacgagctcaagcactcgaccgaccgcctgcgccgcgaatacacggccctcgtccagcgatacgacacgctgacgacggtgatgcgcaacctctcggagcgcgaccgcaacgtcttccgcatcctcttcgagtcggacccctacgacttcgactcggagtacgagcgcaagcaggccgccacctacgaaaacatcttcaaccgttcgtcgcgccgtctcaaacgcgagttgcgcgaacgcgtggccgaaatggagacgcggctcgacgagctgaacgacacctacctcgatctgcaggcgcgcatcgactcggccggcagccggtgcgacaacatcccgtcgatccagcccgtgatcaacaagcagctgacgctgctcacggcttcgtacggcatgcgcatccaccccttctacaagacgctgcaatcgcatcagggcgtggactacaccattcccgaagggtcgcgcgtcttcgccacggccgacggaacggtgcgcgaggtggcccagcgcaactcgacgtcgggacagaccgtcgtcatcgaccacggcaacggctacgagacttcgtacaaccacctctcgaagatcaacgtccgcaagggccagcaggtgcgccgcggcgacatcatcgccctttcgggcgacacgggcctttcgctggcgccccacctccattacgaagtccgctacaacggcatgcgcgtggacccgatccactacttcttcatggagctttcgcccaccgaataccagcgtctgatgcgcatcgcccagtcgggcatgcagtcgttcgattgacagcctgcaccgaaactcaaaaaaccgcgccttctgcggcgttccctattttccgccacgacatgacacaccccggctccgaaataaaactgatccttctggatttcgacggcacgctggccgacacccggcgtgccaacacgctcgcctatgtcgccacgctgcgcgaagcgggttatacgctcaccgaagaggagtatgcggcccgctatttcggcatgcggtgcgacgaattcctgacccggatcggcatcgccgacccggccgaacgcgaacgactgcggctgcgcaagatcgcgctctaccccacgtttttcgacaccgtgcggctcaataggccgttatgggatttctgccggcagttccgtgcgcagggcggccgcgtgtggatcgtctcgacaggcagccgcgccaatatcgacaacgccatgcggcatctgggaatcgccggaccgcaagccgtccgacgtctcgaaacgccggacgaagacacgtcacgcaaagaagagagactgccggaggaaaacgcggtggacgggattctttcgggcgccgacgtcgcgcgcagcaaacccgccccggactgttttctggaagccatgcgccgcgagggctgcacgccgcgcgagaccctgattttcgaggattccgagatcggtctcgaagcggcccgccgcagcggagcgtcgtatttcagggtgaaactctgagccgtctcagccccgtttgcagattatccggaaatcgcagaacttgcacgtatcggcgtcctcgcactggcggaacggcaccgcggggtcgtacatttcggccagctgcgcgcgcagcagctcctcgaaacgttcgcggtaaagcgtatagcgcgcccccctgacgcccagctgcttgtcgtccagctgcggcgaatagtcggggcggttcatgctgcggacgtagtagagcgcgggttcggcgtcgcggccccgcgtatggtgcaggatcatcgaatagagcagcgtctgcaggatattggacagccgctgtttgccggttccggtgaaaaggctctccacgccgtcgaactccagatgcggcgccccggtcttgtagtccacgacccgcagcgcaccgtcgccgagcgtgtcgatacggtcggcgatgcccccgaacttcatctccagctcgcgctccccggcgcggaacgggaaggaataagccacccgctcctccagtcccgacacggcgaacgcatcgtgcgccgcatcgtaaggcatcaccccgccacgcaggtaacgcgtgacgatatccttcaccagcagcaggttgcccgtataatcttcggccgaagcgcgttcgtcctgcaaataattttcgttgatcgcccgctcgaccgccgcggcgacctcgcccgaacggatcatcgcccgcagggtctggccgggatgctcctcgcccacgatccgggcgtagagcgtctgcactgcggcgtggaggatcgtgccgaacatcggcgcatcgacctcctccgaaatctcgtcgtcggcttcgagccgggccacggagtggaaatagaagcgcagcgggcaggccacgtagcggaaaaacgccgtcggcgaaagcgcggcgggactttcggcatcgacgaaacgttccagccgccgcatcaccgcctcgtccttcgccacctcgatcggagccgtctcggcgaggttcacgtccacccccacctcgatcctgcgcacgtcgaaaccgctttcgtaatccagctggtagatatagcggctcggctcgcccgtcgatttgtcgtcggcatgcgaacagtagagcatgtgcacgctcttcgcgcgctggatcagacggtagaaatagtaggcatagaccccttcgtgatgttcgggcgtgggcagttcgtaggccgcacgcaggttgtagggaatgaacgacgactgcgcgacgtggttgcccggaaaattgtcgtcgttcatcgagagaaggatgacgttctcgaaatcgacgttgcgggtctccagaatacccatgatctgaatcccctccagcggttcgccctcgaaggggatgcgcagcgtctgcaaatggcggcgcagcagcgaggtatacacctcggtcgcaagctcgatgtcgcattcgtcgagcgagttgcgcagtttggtcacctgctcggcgatgacggccagaaattcgacccgctgtctagcgtcgtcgccctcgtagggctggcgcgccacggcggcgatcacgcccagcaggtaatcggacagctcgcgccactccgccgcaggcgaaaagatccgtttcagcagtccgttgcggcccagccatgcggcatcgaccgaaatccgccggtcgcggacgatctcctcgtgcatcgtgcgggtcagcgcggcgtcgcactcggcgacatagggatgcgccagaatacccgccacgtcggcatggtagaaggtccagccgccgccctttttgcggcggtggttctgcagctccacaaggcgttcgacgaaggtataggcaaggctctgccgcagggggaaacccatcgtgacgttcacgcggcctatatcggcgggcagggcgtacaacagcggcagcagcaggttttcgtcggtcagcaccacggcggtctccttgcccaaggcgggcttcagcccggcggcgacttcggggtcctcctgcgcgcggcggcgtgcgaggtccgcgagaatcgccgcggcgtatttgcactgcacggcgttcgacacggcggccacggagacgacctccttttcgccccgcatgttgtcgtgcgcgaattcggtccggggcggaaacagcgcgacgttcgagcgcacgaacatcccggcctcctgttcggggttgtccttataataagcgtcgtaatcccagtagaaatcggtttcggcggcaacagcaaggaatttgaagagctgcttttcgcactccgacagggcgttgaatcccgccacgacatacctccgcggttcgggaaaggcgaacgcgccttcggcgatgcagtcggcggcggcccgctggaccatgccgttgtaggcgatgccgagcgacgcgagccgccggcggaatttgcggtaaacggggccgagcgtcttccagatcgccagaaagcggcgtttctcctccgaaagatcggcctcctcgcccagcgaagaccagaacgacagaatctgcagctgggcgggcgtcaggtaggagatgtcggcttcgatctcctttatttcggagatgttgcggaagagcatctgcgcgtcgatccgatacttgtcgatcgtgtcgaagtccgtgaggagcatgtcgccccagaaatagaacttgtcgaacggctcggtgtggaattccgaatagaccttatagagttcggtgatgagccgcacgcggtcgcccgcatgcaggcccgatatttcgctcatcaggtcgtcgacggtcacccactccggctgccacatgggccgcccggcgatgcgcgtcagggcatcgacgaaaaacagccgcgcacgccgcgacggaaagagcacggccctctcggacagtccctcgccgtatcgggcatacaagtccccggcgacctcttccagaaatcctttcatagccgccctacagtgttttcagagcaaagttccgtaaaacaatggcatccggaccggacaccccgccgaatcgtctccgtatcccggcaggtgcgccggttacaccggcaaagccagacagctccgccgtccgccgcaggaatacccgttccaccccgcccggagaagccggcaggccccgccgcaggaacgctccggcggaccgatatgcgaaaacccttcatccgctactccacgcggttgatttcgccgcccatgaacttcgcgccgccgcgtacgatcttaggatcgcccttgtagctgatccgcgcattggtcgtcgtcttgcccacgaaacggtcggtgatccacaacgacacctcggccttgctctgggcattgacctcggccgacatcacctccagatcggatgcggccaccttgcccgtcgacacatacagcgacaggtaacgcaccgaacccgaaaggttcgccgtgctgtatcccgtctgctccatcttgaggtccttgacgtccagcttcgccgtcagcgaagccttgcggttgaccgtcacgtcgagcaccgcggcgtcgagcgtcccctcgaacgtcgcggccgcgcctgacagcgaaacggcccgcagcgcgttgtaatagaccgtcacctcggtgcgttcgggacggcgcgaatcgggcttctcgctgatgcgcagggtcttgtccttgacctcggcgcggaacttggtggtataggagcctttggtgtcgtatacgattttcggggcctcggtgtcgggaacccggacgaatttgacgtccagatcggcatcgaccgcaaccgcctcgaaggtgggcagccactcgttgcgctctccggcgcccgcagcgcccgtttcctgcgcataacccgatgcagccaaaaccagcatcaccgcgctcagaatcatcttcttcatacttttcggttttaatacgtcgctaatttacgaaattattgcgaaccccggtttgccgttcgggatttgttttgtacttttactacctaaaacgacatttcggacagtgagagcgaaaattctgaacgcgagcgccggatcgggcaagacctaccagttggcatacaaatacgtgcgcgacgtggtcgaacagccctccatctaccgccacatcctcgccgtaaccttcaccaacaaggccaccgaggagatgaagtcgcgcatcctcaaggagatacacctgctggcttcgggcggcgaaagctcctacctcgaaaacctctgccgcgaactggacatggacgccgccacggtgcgcaggcgggccgcggaggtgcgttcgaaaatcctgcacgactactcgcgcttcacggtgctgaccatcgacacctttttccagcgcatcctgcgcgccttcatcaaggagctgggcatcgacctcaattacaacgtcgagatcgagaccgcctcggtgctgaccaagagcgccgacacgctcatcgagcagataaccaccgaccgcgacctgcagcgctggctcacggacttcgtgcaggagcgcatcgacgagggcaagaagtgggacgtccgcgacggtatcctgacgctcggcggcgaactgttcaaggagaagaacaaggaggccctatccctcgcccgctcgcgcgaggagctgggccgcatcgtcggcgaagcgacggcgcgcgccgcggcgaccaaacagcagatgcgggagcgtgcggccgaagccgtacggatcatggccgatgcgggtgtcggcccggcggacttcacgggcaagagccgcagtttcgcccactatttcctcacggtcgcggccggagagctgaaaccctacaccgccacggtcggcaagatgagcctgacgaccgaaggctgggcgcccaagggatcgcccgccgcgccgctcgccgcccggctgcaacccctgctgcgcgaaatgtgcgatctgtacgacgccaacgtccgctcgtggaacacctgcgacctgttgcgcgagaactaccgcagcttcgcgctgctgtcggacctctacgccaaagtgcagcagttgtgcgacgagcagaacatgatgctcctctcggagaccaaatacatcctctcggaattcatcggccacaacgacgcgccgttcatctacgagaaggtcggcaaccgcttcgaacacttcatgatcgacgagtttcaggacacctccgtcaaggagtgggagaacttcctgcccctgctgcaaaacgccatgtcgcagagcgaggcgacctcggtgctgatcgtgggcgacatcaagcagtcgatctaccgctggcgtggcggcgactggaaaatcctccactcgcaggcgcaggcgcagctcgacccggccagcaccgaggtggagatactcagggagaattaccgcagcctgcccgccgtggtggagttcaacaacgagatcatcggccgcgtggtcgagaccgacaaccgggcgctgaacgagacgctcgacgaagcggccgcaaagggcggcatcgaccccgcggcggcggccgcactgcacgacaccctgcgcgacgcctaccgcggacacgcgcagactccccgccgccggagcgaccggccgggctacgtctcggtctcgaccttcgccgagcagccgcccgtcgtggagcgcatctgcgaggtgctggacaagggattccggccgcgcgacatcatgatactggtgcgcggggccaccgacggcgccaaggtcgccgccgagctgctcgacttcaaacgccgcaacaccgatccccgctaccgtttcgacgtgatgacgcaggaggcgctgatcgtgggcaacgcccccgtcagttcgttcatcgccgcatccctgcggctgtcgctcaaccccgacgactcgctgagccgcgccgtctacaaccactacctcggccgcggcttcgaccgcccgctgtccgacgacgaacggacgttcttccgctcgatccgcctgctgtcgcccgaagaggcgttcgaacgcatcgtcatgcggcacggtctgcaggacgacaaacagcagacggcctacctgcaggcgatccacgaacagatcatcggcttctgttccagcaagatcgccgatatcgcgctgttcctcgactggtgggagcagcaggggcagaaccgttcgctgagcgtcgaggagagcgaaacgaccgtcgagatcaccacgatacacaaggccaaggggctagaaaagcgcgtggtgctgatcccctactgctcgtggcagctggaccccaagtcgggcggcaacgtgaccaacatcgtctgggccgaggcgcacggcgacgccgaagccgtgggacgctttccggtgaaatacaagaagtcgatggccgaatcgggattctcggcggagtactaccgggaactggtctactcgcacgtcgacaacgtcaatctgctgtacgtggcgctgacgcgcgccgccgaatcgctgcatgtcttcatcccgcaaaagggcggcaaaaccgtcggcggactgctcctccaaagcctcttcaccgacggcgacaaagccctcgcgggcagcgccgaagggcgttacaccgtcaccgagacgggcgagcggttcgaattcggccagttccgcggcccggtcgccgacggcggcaaaacgtccggcgccgagcacgtggtgctggaaaactaccccacggcgcgcgccgacctgcgcctgcggctcccctcgcagcgttatttcgagcaggaggaagaggtggaactctcgccccgcaatttcggcatcctgatgcacaaggccttcgaaaacgccgacgacgaggagcagatacgcctcgccgtggagcggatgcaggccgacggcacgctttccgccgccgaagccgccgccctgcggcggatgatcgcccgcgcgctggaacaccccgcggcccgcgagtggttcgccgggggctgggagcgcgtgcgcaacgaaaacgaaatcatcattcccggcggcgcctccgcgcggcgtcccgaccgcgtgatgatccgcggcacgcgggccgtggtcgtggactacaagttcggcggccgcgaacccgaacgctaccgccgtcaggtgcgcgaatacctcgccctgctgcggcagatgggctacaccgaaaccgaggggtatttgtggtacgtgaaactgggaaggatcgaaaaggtggaggaatgacatgaacgaaatcatcggcatcataccgcacaaattccgccgcaggggcttcggcgtggcctgcacgctgctgctgcgcgcagggctgaacttcctcggactggccgtgctgctgcccgtgctggcgctggcgctcgatgcccggagtctcgacggcggcggtcagctggcctgcatctacacggcgctgggcttcacgtcgccgcgcagtttcgcgctgacggtctgcgccgccgtggtggccgttatcgtcctcaaatgcctgacaaatctctggctggcgcgcatcgagcgcaactacatctacgacctctaccgcaccctttcgcggcggctctacgtcacctaccacgaccggggactgccgttcgtcaagtcgtcgaactcggccgtactggcccgcaacgtcaacgtcgtctgtctggccttcacggccggcgtgctgaaacccgccgccgccatcgccgccgaagcgatgctgctgacgctgctcttcggggcgctgctctggtacgcgcccgttgcggcggcgctggccgtcgcggtcttcctgccctcggtctggatctattacggcttggtgcgcaaccgcatcaaccgctacggcgagctggaaaacaaggcccagcgcgaaaaggcgcggctcgtggccgagaccttccgcggctatgccgacatcgagatcaacaacgccttcccgatgatgctacgctcgttcgaccgggcgatggaccgggtgatccgcacgcgcctgcgcgaaacggcgatcggcatgcttccgcaggcctttaccgaaatcgggctggcgctgggcatggccctgctggtcgcactgagtctgggcgcggaggaggggcgcgcacaactgctcttcggcgtcttcgccgtggccgcgctgcgcctgatgccttcggtgcgcagcatcatggcgggctggacctcgatcaagtacaaccgctacacgatcgccgtcctgcgcgacgcaacggccggggacgaaccttcctccgcatcgccggacacgctctccgacgccgccgagagagccgggaaaggcccacacactgacgccgccgctatcccgccgtcggaatactccgcggcggagagcggcgagaccgcccgcggcaggcgaacggctccggacaaacgaaccgcatccggcagacaaacggctctttacggccaaacagccccggccaaacagccctgcaccgcaaaatcaacgaaatccgtttcggccggcggcacatccggagcatgcgcgcccgaaatactgcctttcgaacatgaaatcgccgtccgcgacctcggcttccgcttcgcggacgacgggcacgagcttttccgcggccttacgctctcgatccgcaagggcgaacgcatcggcatccgcggcgcatcgggcgcagggaaaacgacgcttttcaacctgctgctgggactttacgaaccgaccggaggcgaaataacgatcgacggcacgcccctcaccgccgccaaccgccgcgcatggcaaaaccgcatcggctacgtctcgcaaaaccttttcatcgccgacggaagcttcgcggccaacgtcgcgctgggcgttcccgacgacgaaatcgaccgcggccgcgtagccgaagcgctggaagccgcccggctcggagagttcgtcgcgggacttgccaaaggcatggacacccatgtcggcgaatgcggctgccgcctttcgggcggacagcgccagcgcatcggcatcgcccgcgcgctctaccgccgggccgacgtgctcttcttcgacgaggcgacctcggcgctcgacagccgcaccgaggaggagatcaaccgttcgatcgccgagctggcggcgcgcgacgaggggctgacgctggtggttatcgcccaccgcgaaagctcgctcgaatactgcacccgaatcatcacaataggagaataattatggaatacatcatagcaggcatacgcatcgccgtcccgcaggaattcaccgcagggtctttcggcacggcgctggcgcccttcgccgccgcagacgaaggcccggccgacctgagcgtcgaaacccgcggcgaaatccgccaagcggacggctaccgcgaactcgacgaattcgacttcgccgatgccgacgccgactgccgcttcggccgcgacgcggagggttacctgctcaccatgacgccgcgcgacggcagcgccgccgcccgtttccgcaaggcgttcggcgcaccgctcgtcacgaccgacgtcacactgcggcacaacccggcgctgttccgcttcggactatggtcgatgttcaacatcgccgccgtggcgcggcaggctgcagccatccattcgtcggtcatcagcctgaacggcggggccgtgctgttcctcggcgaatcgggcaccggcaaaagcacccacacccgcctgtggcgcgaacatatccccggtgcggagctgctcaacgacgacagtccgatcgtccgcatcgtacagacagcagatacagacccgatttgcggagccgtccaaaatccggcgaacgcccccatagctgcggctgaaactccggacgcaagcgcagcgacaaccggcgccccggtaaaaccgcaggccatggtcttcggtgcgccgtggagcgggaaaacgccctgctaccgcaacgtatgccagccgatccgggccatcgtacggctgtcacaggctccgcacaaccggattcgccgcctgcgggcgatcgaggccatcggcgcgctgctgccctcgtgcccgccgtcgttcgcccacgacgaaacgctggaagacgccgtatgcgcaaccgtctcggccgtcgtggcgcaggtcccggtctaccacctcgaatgccggcccgacgccgcggccgccgaactggcctgccgcacgattttcggcggcgaatccgcaaatccccgcccgtgatgcagctttcgaaccgtctgtttttcgagcaggtcgaagcgatgctcgccgaaggacacgaagtccagatccgcatgaagggccacagcatgcggcccctgctgcgcagcgaacgcgacatcgcagtactgactccgatcgcccgatacaccggaaattccgaagcggcggcagccgcccgaaagcacaacagactcgcgcgaaacgaaaccgcccccgacaccgccgcaaattccgacaccgaccgccttccgtccggaagtcaggccctgcaaccgggcgacgtggtgctgttccgctgcgaaggacgccatatcctccaccgcattctccgcatcgaaccggagagcggggagatgcccccgcaatcggcaaacacgacggtagagacaataacaaagacaccggaagcgtcggcaacaccaatggccgcaacaacacaagcggcgacaacagcaacgccatcggcaaccgaagcgtcggcaaccgaagcgtcggcaacaccaacagcagcaacaacgaaagcgccatcggcaaccgaagcgtcggcaacggcctccgacgccggagatactcccgctccgctccccgcgctccgggaaaacggcaaggcgacccctccgcttccggcacgcaccgaaaattccgaaaatccccaagcgaccagcaataccggccaaacacccgcagaaacggcacctgccccgccccggcttcgtttcaccctcgcaggcgacggcaaccaccggatgaccgaacattgcgcagcgacagacatagcggccgttatgacggctgtcatccgcccttccggccgcatcgtctccaccgcttcccgccggtggcgacggcagtcccgctgttggctgacgctgcccgccgccgtcagacgcttcatcctgcgggcactctggcggctgggaatcagatagaaccggaatttgcggcatccgaaaaagtcttgaaaacagagcgtgaatgaccggaaaagcgcctttcggtcgtttccgaccgattggccgaaaagatcgggcacaaccggagacgaggcaaaaacagccgacaacataatacagccgggcaaaacagacaatcgagaacaaccggaaaacactccgggaaaatccggacagcgttatttccggcaagcgcaaagcgccatacgttcgttcggcatgaggacacaaaaaaccgccaagccgacacccttcggcaatcgccattcggcttctttccggccgctgccgactatacgtcaggcatattccgcacagaagccggcctcctatgaaacaccctataaaaaggctcccataagaccatacacacgaaaagaccggaactcatcgaagagttccggtctttcacaatatacgaacggtcttgccgtccttcggtcggattattcgcccagtgcgaaacgcttgtaagcgataaccgtcgcctctttgtcagccttgtggatgaagtcggcgatcgactccttctcgcccactacggcctgagccagcagcgtgttctcctcgaagaacttgcgcatcttgccttcggcgatcttctcaaggatggcttcgggcttgttggcgttcttggggtcctgcttcatcgcctcgacggcgatcttgcgctcatgctccacaacctctgcggggcagtcggcctccgagatcgacacgggagccatagccgtggcctgcatggcgacggtgtgggcaacctctgccggaacctccttattgaagccgaggatcgtaccgagcttcttgttgaagtgtacgtaagcggcgcagtagggagcctcgatgcgggcatagtatgccagctcgatcttctcacccgtctgacccgatttctcggtcaccatctcctcgacggtgtggccttcggcgttcttggcagccatcagggcgtcgcggtctgcggcgtcgctgtttacggcaacctccagcatcgcctcggccgaagcggtatattctgcattctgagccacgaagtcggtctcgcacgccaagcagaggatataggccttctgacctacgatcttcgtaacgacgacaccctcggtagcggtgcggtcggcacgcttggcaacgacgagcttacctttctcgcggataatgtcctgagcgcgtgcaaagtcaccttcggcttcgatcagggctttcttgcagtccatcataccggcaccggtcatcttgcggagcttcattacatcagcagctttgatttccataatacttttcctttcttttaggtgattaatttcttttcccaaaggcccgaattactcggccttggcctcggcaacctcctcggctgcaaccgcagcggcctcctcggcaacaacggcagcttcttcggccgcaacctcagcaggctcctcgaacggagtctcgacagctgctacgacgtcggctacggcggcctcctcggcatcgatagcggccttcacggctttcttgatgcggggtttgccctccttcttcacgggagcgtcggcaccggcctcagcctcctgcgcctccttctccttttcgagcttgcgctcttcggtaccttcggcgatagcgctgcacatggcatcgagcactacggcaatcgatttggtggcatcgtcatttgcagggataacgtaatcaatgtcggtcggatcacaacaagtgtctaccattgcaaatacggggatgctcaggcgcttggcctcttttaccgcattcgactccttctgtacgtcaacgacgaacagggcggccggaaggcgcgtcaggtcggcgatggaaccgaggttcttctcaagtttcgcgcgctggcgtgcgatctggagtttctcgcgcttggaaaaattatcgaacgtgccgtcgctgttcatcttgtcgatggtcgacattttcttgacggctttacgtatggtggggaagtttgtcagcataccgccggcccaacgttccgtaacgtaaggcataccgacggctgccaccttttcggcaacgatctccttagcttgtttcttggtggctacgaacagcacgcggcgaccgctcttggcgatctgcttgatggctgcagcggcctcatcgatcttcagcacggtcttgtgcaggtcgatgatgtggatgccgttcttctccatgaagatgtaaggagccattttagggttccatttgcgcttcaggtgaccgaagtgcgcaccggcttccagtaatgtattaaaatctgtacgtgacattttaattcaatgtgtttaataattttaattctcttttcttcaatccggcgggtagcggccttgccggtcccgcggattttccgcggcggggcaacctgaaggtaatacgcgatatatataatatataggtagtcgttccggtttgtaaccctcgccgtgcctgccgaaaataggtcgttcggattaacgcttgctgaactggaacttgcggcgtgctccgggctgaccgggcttcttacgctcaacctcgcggggatcgcgcgtgaggaatccggccttcttcagtaccggacgcatctcggcgtcgatttcgcacaatgcgcgtgcgatgcccaagcgagcggccgaagcctgtcccgtgatacctccgccatcgaggttgatggcgatgtcgtaattctccacggtgttggtagccagcagcggctgcttcacctgatactggagaatttcgagcgggaagtaaacttcaagcgctttgcggttgattgtaatctgacccttacccggcttcacgtatacgcgagccacagcggccttacgacgacctacggtgtttacaacttccataactcttacttaatctcgtttaatttaatggtcttcgggttctgcgcggcgtgcggatgctccgagccggcgtataccttcaggtttttgagcagggcggcgcccagacgggtgcggggcagcatgcccttgactgctttttcgacgatgaacgtcggtttctttgccagatagtcggccggggtagcgaaacgctggccgccgggatatccggtgtgacgcgtgtagaccttctcggtcatcttgttgcccgtgagcttcaccttctccgcattgatgacgatgacgtagtcaccgcaatccacgtggggcgtgtagctgggcttgttcttgcctcggaggatcttcgcgatctgcgatgcaagacgtcccaatacctcgttcgtagcgtcgatgacgatccattccttggtcaccgtcgatgcattggccgagatagtcttgtagcttaatgaatccactttgttttacgtttaatttaacttattgtaatccgtttcccgcacgaaagcgggtgcgcaaaggtacgaaaaagtttccgaactgcaaaaacaaataaatccgaaaaataaaaaacttgaacaatcgccgaaaaattcttattttaaggcaattaaagtcccggcaacagctaaaaaagcatgccgcgaacgcaccgaaggccggagcggcggccccgccagccggtcagaacgccgaacggcggacacggcaatggaaacggggacggatcaccctgtatttgctgtcttcgctgcggaccaagcgatgtacgtcgggatcgtccggcagataacgcacgaccaccgaatcgccgatgcgggccgtcatgagattttccgttttgcggaccttgccggtataatcggtcccgtccaccctgaaccggtatctgaaataatagacggtgcgcttttcccggaaactgcggtgcatccgcccccggtatccgggccggtatccgacatattcggtccgcgaaaaactcgcggtgagcaccgcacgggtctccgccccatcggcatccagccgctttttcacatagccggaatacgccacggccgccccgatcagcatcccgaagagacatacccccagcaatatccacttcacccggttcataaaaacgttttttcagtttgcaaaaatacgaaaaacagcgaaaacatacaaaggagaaattgcaagtccgtcgcccgcacatcccccacaaccacaaccacaaccacaaccacaaccacaaccacaacc

SEQ ID NO: 12065 - DNA, 11515 bp, Unknown
  gut microbiota DNA sequence
gtcccgtacccccggccctcacactgaaaactccggcccccgcacaccgaaactccgactccgccttgtcgcacgaaaagagggcttcggcaacccgaaaccctctttacaccggacggccccgaagccgtccctgtcaatatcgaaatcccctatccgaggaacgagagcagaatacctgcggcaactgccgagccgaccacaccggccacattgggacccatggcgtgcatcagcaggtaattcgaacggtcgtagcggatacccatatcctgcgacacgcgcgcggcggcaggaacggccgaaacgcccgcattgccgatcagcgggttgatcttgttgccctccttcaggaagaggttcatcaacttgacgaacagcacgccgcccatcgtggcgatgaagaacgagcatgcgcccagcacgaagatacccagcgtcttgggagtcaggaagaccgacgcctgcgtcgaagctcccaccgtgatgccgatcaggatcgtcatgatgtcgatcagctggttgctggccgtggtggccagacgcttcaccacgcccgactccttcagaaggttgcccaagaagagcatacccagcagcggaatcgcatcgggcacgacgaacgtcgtcagcaggaagccgatgatcgggaagagaatcttctcggtggaggagacggcacgcggcggacgcatcttgataaggcgttcgcgcgacgaggtcagcagacgcatcacgggcggctggatcaccggtacgagagccatgtacgaataggcgcagatagcgatggcgcccatgtactccggagccagacggctcgtcaggaagatggccgtaggaccgtcggcaccgccgatgatggcgatcgaaccggcctcgttggccgggaatccgagcgccagagcgcccatgtaggccgcgaagataccgatctgcgccgcagcgccgataagcatcagcttggggttcgaaatcagcgacgagaagtcggtcatggcgcccacgccgaggaagatcagcggcgggtagacgccgtaacggacgccgaaatagaggtagttgagcaccgagccttcctcatagatgccgattccgtggccggtcaccatcgggatattgccgatgatgataccgaaaccgatcggcaccagaagcataggctcgaacttgtgtttgatggcgagatagaggaagaagcaccccacggcgatcatgatgaggtacttgtagccgccctcctgcaggaagagctgcgcaaatcccgtctcgtgcacgaacttggatacgctttcgccgaggaacgacgatgaaaggaagtctaacatacgcctatccgagagttatgagcacgtcgccctccagcacggagtcgccgcggttgactttgatcgacttgacaacgcccgcacggtcgctgtcgatattgttctccatcttcatggcttcgagcaccaccagcgtctggccgacggccaccgtgtcgccctccttgatccggatgtcgaggatgacgcccggcagcgggcttttcacgggcgactcgcctgcagccgcgggagccgctgcggcaggcttcgtaaccggaacggtcgaaggctgcacgggatgcgaagcgggaacggccgccacctgaggtttggccgccacgctgggtttcacggtcgtgtcgagcacctcgaccgaataggaggcgccgttgacgatcacatcggcctcggtgtcgttgagaatctcgatgccgacggtgtagtcgttaccgttgattttgaaattgtattctttcataaaattcgtttgtttaattccgcgccgtcttccggttccggaccgcagtcccggttccggcgttcgcaccgatcgggaccgccccggcggggccggcatgcctgcggcggaaagcggatttcggacggcttgcggagcgctctctaaatttattttctgattcgttcgggcatcggggtcagaccgtggattttcgaactccacggcgagtagacgcgcgccaccttgttgatagtaatcacgtcgctctcacggtcgtgcatctcggccttgttgagcttcacggccagcgcaatggcggcgatgatctcgccgttgaccacgctgtcgcagcccgcaggcaccgagaccttcatgtcgtcgaccagcatgccgcgggtcttcgacttggcggccttcttctgcgcgctcttcaccatgactttggcgaaaagctggatcagcagaaagaggacgatcagcgccgaaagcaccgtcaccaccgaaacgatcgtaacgtagatgccgacggggtccttgtcgaggatcgtatcggcgcctttggccgaagcagccatagccgcgaagagcaatcctgctgttaaaatcgcacgcttcatactacaacggaatgttagagtgtttcttggccgggttctgcagacgtttggtagccagcgactgcagggcgcggatgacgcggaagcgcgtgttgcgcggctcgatcacgtcgtcgatatagccgtagcgggcggcgttgtaggggttcgagaacttgtcgttgtactccttctccttttcggccacgaacttggctttctcttcgggcgattcgatcgctgcgacctccttgccgtagagcacctcgacggcgccgctggcgcccatcacggcgatctcggccgtcggccatgcgtagttgatgtcaccgcggatgtgcttcgacgacatcacgatataggcgccgccgtaagccttgcgcagcgtaacggtaaccttgggcaccgtagcctcgcagtatgcgaagagcagtttcgcgccgtgggtgatgacgccgccgtactcctgcgtcgtacccggcaggaagcccggaacgtccacgagggtcacgatcggaatgttgaacgcgtcgcagaaacgaatgaagcgcgcggccttgcggctggcgttgatatcgagcacgccggccatgaacttgggctggttggcgacgatacccacgctctggccgttgaaacgggcgaagcaggtgatgatgttcttggcgtagccgggagcggactccagatactcgccgttgtcgacgatcgccttgatgacctccgacatgtcgtagggcttgttggcgctgtcaggaacgatctcgttgagcgaatcctccagacgggtgatcttgtcggtgcagaccgccagcggagcgtcctccatgttgttctgcggcatataggaaatgagcttgcggatcagcgcgatgccctcctcctcggtatctacggcgaactgcgccacgcccgatttggtggtgtgcatcgtggcgccacccagctgctcctgcgtcacgtcctcgcccgtcacggtcttcacgaccttcgggcccgtgaggaacatgttcgacgtctccttcttcatgatgatgaagtcggtcagcgcgggcgaatagacggcgccgccggcgcagggaccgaagatggccgaaatctgcggaatcacgcccgacgacatcacgttgcgctggaaaatgttggcgtagccggccagcgcgttgacaccctcctgaattcgggcgccgcccgaatcgttgatgccgatgcagggcgcgccgttgcgcagcgccatgtccatcaccttgcagatcttgtccgacatcgacagtgacagcgaacccgccgttaccgtaaagtcctgtgcgaagacatagaccagacgtccgtcgatcgtaccgtaccccgtcacgacgccgtcgccgaaggtgtggctcttgtccatgccgaaatcatagcagcggtgcgtcacgaacatgtcgaactcctcgaaggagccttcgtcgagcagcatctggatacgctcgcgggccgtgaacttgcccttggcatgctgggcgtcgatacgcttctgaccgcctccgagacgtgcggtggcacggttctcgatgagctggttgattttgttttgaatttcactcataagtatgtaggtttgtaattttcccgaaccccggaattccccggcaggtatcgcccgcggcctgctgccgcgtttacaggtctgccccaccctaaatccctcccttgggagggacttttgttccgcctttggcggaattcggagattccgtaatattcctttttacactatttgttcttattctcgcaaagctcggtgaggatgccctgcgtcgatttggggtgcaggaaggcgatggtcatgccctcggcgcccttgcgcggggttttgtcgatcaggcggatgcccttggcctcggcgtcggcgagctgctcctcgatattctcgcaggcgagcgccatgtgatgaatgccgacaccgcggttttcgatgtacttggcgatggtagactcctccgaagtaggctccagcagttcgatcttggtctgaccgagcatgaagaacgccgtgcggaccttctggtctgcgacctcttcgacggcatagcacttcaggcccaaaacgttctcccaatagggaattgcttcatcgaggctcttcactgcgatgccaagatgctcgatatgagaaactttcatagcaaaatattaatttaagttagtggatgttccgtgtcatttcaaggcactgttacaaaacgaacacaaagatagggcattaaattcgaaatacccaagccttttatcgtatttttttcggaatatctgtctcttttcggaccggccgcgcgcttcacaacgaactgtaaatgtcgatcagacggcgggcgacggcgtattccgaaaaaagctcggcgcggcggccttcgcgccggcgcatttcgctgcggaaggtctcgtcccagagtacgttttccaatgccgcggcgacctcccccaccgcttcgggatcgacgtaaacggcggcgtctccggccgcttcgcggttgagccgcgtatcgctcagcaccatcggcagcccggccctcagcgcttcgaccacgggtacgatcgaagcctcgatttcggcgtcgggcaggtagacgaaagtccgggccagccggaacagcgccggcaggtcttcgggcgaaagttcgtagatgaaatccacccgcgcggccatgtgacgctcacgggcatagcccagcaggaagtcggcataggccgtacggcggccgcacaccacaactccgacgcgctgcggcagcgggggtcggccggcggtttcggcgccgccccgccgccctgcggcaacggcggcgtcactgcgccccgcatccgcaacggacacaccgacgtcgcggcccgcatctccgacggatgtacgggcactgcggcagacacctccgaccgacatgtcggcaccccggtccgcggctccaatggcttcgccgactccaacgactccggcggtttcgtcggttccggcgccgccgctccgagcggtcccgtccgccgggcggacacgcacccgaccggcaggggcgaactccgcgaccgtattccggttcgcatccggagtgtcctcaccgacgccgcgcatcgccaacccggccccggcttccacgtcgccgtaccctccgacgccgtccgacgccacactgtcccgccagcctgcattttcaggcttcaggtccccgccgccgtccggctcccgcacggatcgcgcaacagcctccgcaaaagcccccgcatccgcagccgattccgcattccgtccggctgtccgctccccggttcgctccgcagcacctcctgcaggttgttccccggtccgcgccccggtttccgccccggcccgctccccggttcgctccgcagcccgcacctcagtccgttccgctgccgtcggcatctccgcccctctcgtttcgagcatctcgcgctcccgctcccggagcagggccagcgcctcgaacagcacctcctgattgtggcgcggctcgaccgtccccagcatcagcacgaaatcgcgcggcagagcatatttgcgccgcacgccttccagctcggcgccgtcgggcggattctgcggcatacgcgccgcgagcggcatcacgacctcgatcctgccggggtcgatccgcagccggtccgaaagctcctcccgcgcgtcgcggttgaccgtaatcacccggctggccgaacgcagcatccgccggtacaggcgcagcagcaccagccgctcgcccagcgaatagagatgcgggtagcgcaggaaattgaggttgtggaccgtcatgacgcacggtatgcggcgcagcagcaccggaaagggaagtccgggccggaagccgtggtagaggtcgaactccttacagcgctttccgtcaatgatatattcatgctccggggcatactcggccaaaagtctggcaaggtgttgggaataggttccggcaggtgcggccggggtgtcgtcgaatccgattttcataagtccaagtaaaaaatttcgtctatgtggcaaataattgttatcttcgctaaaaataagtccgctcttatgaagaaagtactgcttattttactcttcgcggccctgctgccttttgcggcggccgacgcgcagaatatcgctctgggcgagcgtgtgcccgaactgaaagtcccggcatggctcgacggacagaaacccgcggccacgccgcggctgacctacgtcgagttcttccagtcgtcgaacgcggcctgcatcacgtcgctcaaacagctccgggcgatgacggacaaattgggtaccaaactgcgcgtggttgtcataacgcaggaaaaagaggacaaaataggccccctgctcagaccctacctatcgccgcaaatctccgtggcaatagacgccggaggcaagatcttcacggcgttcggcgtgcagtacgttccgttcggggtgctggtcgattccaaaaacagggcgctctggcagggaaattcacttcaactgacacccgaaatcatcgagaaatcaagcaaataacaacatgtctttcaccaagataaaccattacgaaaaagagtacgccgacatgcaccacgacacggctctgaacgtcaccgaaggcgttgaagatcagccgatcgtaaacccttacttcacgcgccgcaagaagccgaagctctcgaccgaccaatacgtcgagggcattctcgccggcaacatcaccaccctttcgcaggccatcacgctcatcgagtccaacaaccctgcgcactacgcgcaggcgcaggagatcatcgagcgctgcctgccgcacgccgggaaatcggtccgcatcggcatcacgggcgtccccggagccggaaaatcgaccttcatcgaagccgtcggcaacatggtcacctcgctgcggcacaagctcgccgtgctggccatcgacccttcgtcggaacgcagcggcggctcgatcctcggcgacaaaacccgcatggagagcatttcgggcaatcccgacgtcttcatccgcccttcgccctcggcgggatcgctgggcggcgtggcccgcaagacgcgcgagacgatcgtgctgtgcgaagccgcgggcttcgacgtgatcttcatcgagacggtgggcgtcggacagtccgaaacggccgtacattcgatggtcgacatgttcatgctgctgcagatttcgggcgcgggcgacgagctgcagggcatcaagcgcggcatcatggagatggccgacatcatggtaatcaccaaggccgacggcgaaaacatccacaaggccgaactcgccaaaacccagtttcagggggcgctgcggctcttcccggtgccggaatcgggctggcggcccaaagtctacacctgctcggccgtagccggaacgggactggaagaggtatggaaaggcgtcgaggagttcctcgaccacatcgaggccaacggctacttccgacacaaccgcaaccgccagaacaaatactggatgtacgagtcgatcaacgaagtgctgcgcaactcgttctaccacgatcccgcggtcgaatcgcgcatcgccgaatacgaacagcgcgtgctggacgacaagatctcgtcgttcatcgccgccaaagagctgctggacatctatttcaaggacctgaaatagtcctccggccgacgcacgccgcgcgaactgcggattgcggaaacttctgggagaaatacgaacaaaaaagagggtgtctgccgcagtgcagacaccctctttcgtagcaacaccctatctatccggcatagcgttcccgtagcagggcggccagttcgggcatgccttcggcagcgcgtttgcggatcagggtcagcggattgcggatgcccgccgtatcgggattgccgggatcgacgacgtaaatcggaatgtcgggccgcacgtaacgcaccagcgacgccgcaggatagaccgccagcgaagtgcccacgacgaccatgatatccgccgtctgcgcgatctccgccgcacgttcgaacatcggcaccgactcgccgaaaaagacgatatgcggccgcagcagcgacccgtcgggagccgtggcgtcgagccgctgctcccactcttcgatcgggacgatcagcccggaatcgcgcgacgaacgcaggcgggtcagctcgccgtgcagatgcgtcacccgcgacgatccggcgcgctcgtggaggttatcgacattctgcgtcagcacctcgacctcgaaatcccgctccagctccgcgatggcccgatgcccggcgttcggctcggcggcgagcatctcgcggcggcgtttgttgtaaaattcgatcacggtggcgcggttgtgcgccaaggcttcgggtgtgcagacatcctcgatgcggtagtcggcccacaggccgtccgaatcgcggaacgtggcaaggccgctgtcggcgctcaccccggcgcccgtaaaaacgactattcttttcataaactaaaactttaggtaacccaatctacttcccaatgcggcaaccaatatcaacaggacgaatccgaccgatttcgtaacgccgacggccacgccttcggtcacaatatcgtacgccagcatcgccgccagcacacaaaaagcgatccccagcgcggctttcgacaacagggatttccgccgggcgggttcgatgccgtccgctgacgcagtgcggccgcaggattccggatgcgcagcggattcgccgaacctttcagcgccggcatgaccggcggattcgcgccctcccactgttccggcatgaccggcggattcgctgcaccttgcgaccccggctggcatggcggccccggcattcgcggcggagtcaatacgcccggcagatgcggcatggatgccggctccggcacatctgcgggattgcgcacacacggcagtcccacgggattcgttgcgcctgccggtgcgccgctccttgggcgtccatgcagagagcagtgcgggcaggccgaacagcagggaacttaccgccgcatgcagcggcgactgccccacccacaaaaaattgagcgggaacatcaccagcgcgaccgcaaacaccgaagcaatcgcataaaaccatctccggagtctcatcgcccacctccttccgccgcggcacgggcgcaaagcatgtcgcgtcttcggcgttcggctttcagctcccaaaggcgcatttcagcctcggcgcgcaaacgccgccagcgcagcaggcagacgacgcatgcgacgagcgtcgcgatgcccaatcccagcgtggcgcgggccaactccttctcgtcggatacaccccagaaaaagaacggcggcataatgacgatccagaccaccgaaagcgacaacagcaacagccccgcatcgcgccaccgccggcgcggacgacggcggcggtaatcgagcgccatttcgccgagggtgagggcggcgcccagcgccagcacaccccaatagacccagcggggcagccagtcgggccgaagcaggagaaaaaagaccagcagtccgcccacgacctgcaaaccggagacaatccgcccataccgcagaccggacatactccgcaccggacgcagaccggacatgctccgcaccggacggaaagcggacatgccccgtaccgagtgcgagtcatggagtctttcgcactgccctattcgttttttgttcaacagattattcacaccaattagagtatgagtttacatatcatcggaatgatcgctccggggcggaaccgggggttttgcagaaacggcatcgcccgaacgaccggcaaccgactcatccggccgcattcccgcaacatcgtccggccgaccgccaaacgagtcacccgccttaacttccgcatcattatccggtgaaagacccgccgaatcgccggaccggagtccggagggacggggctttttcaggcggccgctgcggcgcagggcgtcggcgatgatccactgcagctgcccgttgatcgagcggaactcgtcggccgcccacccttcgagcgcctccatggtcgcggcgtcgatgcgaagcacgaaactcttgttattgttctctttagccatcggcagttaaatcaatgatgcagggttccggcattgactaccggctgcgcggcttcgtcggcgcagagcacgacgagcaggttggtgaccatcgccgccttgcgctcttcgtccagttcgacgatatgttcgctgcccagacgctccaaggccatgtggaccatcgacacggcgccctcgacgatcttttcgcgggccgaaataatggcgtcggcctgctggcggcgcagcatcacggcggcgatttcgggagcataggccagatagttgatgcgggcttcgaccacctcgatgccggccatcgccaagcgttcgttgagcgtgtgttcgagctggtcgttgatcgcctcgctattcgagcgcagcgtcaattcatcgtccttaaccccgttattgtcataagcatagcagccggcgacctgacgcagcgcggcgtcgctctgcacacccacgaaattttcgaggatgttcatgcgggccgaagccgaaaccccggtttgtccggcggtcgtcggagcgtcgatctcgaagaccgccttatagatgtcgtcgcgcttgatcttccacaccagcaccagaccgatcataatcggattgcccgtcttgtcgttcaccttgatcggatcgacgttcaggttgcgggcgcggatcgaaatctgcttggccgacataaatggattgacccaccagtagcccgtttcgtagaaggtgcccttgtatttgccgaagaagaccatgacgcgggcttcgttgggttcgagcagcatgaagcccgccatgcagatcagcatgcagagacaccagaccgagccgatcacgaccggcccgacgccgaacgccagccctgcgtcgatacgctgcgcgccgaacacgatcgcgcacacacccagcgccaacccgacgaggatcagcgtcaaagccagaaaaccattgcatttccagcccttgtagacaaaatttccattctccatatccgtaagttttaggtgatattattttgatatcacaaatatatcgaatttttccgggattccaaatattcccccgcttttttcaggggggggg

SEQ ID NO: 12066 - DNA, 9553 bp, Unknown
  gut microbiota DNA sequence
gtgcttttttttagtgcaaggtgcaagtatatatttatatatatagcttgcaccttgcactaacccaaaaatatttattatcagatatttgcgagtttcaaaagaaagccgtatctttgaacccgaaagttaggcagacaaacagcggtcaaagttggacaagcccaacatctgaaaatcgttactgtttcgttacctatttgaaattttgaaagcaaagtagctgaaatataagcggttagatttgtaggttcaaaaccctgtctttccgccaaggaagagtgcgacaatttaggttgcactctttttttatatgtttcaattcggagggggggggatgaacaagccccggaatccggggcttgttctattgcggttatttgcgtttcttgcctttggcggcgattcgctgggcggccgtgacggtccgtttgggtgtcttgcggacgcttttggtgcccttccctttgccgttctcgtcgcggccccatgccgtgccgtcgtcgaatttcatgaaggccgaccagtcgaaaccttcgttcgacattttgctgaaatcggggatttccggacggggttcggtttggaccttggttttcagcttgcggcgcggtgcggcggattcgtcgccggcggccggggcggccggtttctccctgcggacggattttttcggggccggggcgtattcctctccgccggcgtcggccgttttcgcgcgccggggtttgcgggctgcggcttcctcgccgtcacgggcgatttcggctatcggccggcggccccggttcaggcggttgagcttgcggacgatctcttcggcatcgtggaacggcacgctcacgaacgagaagttgtccgagatctggacgtcgttgatgtatttgtcgcgcaggccgcacttgaacttgagcatatcgaccagcttgcgcgccgtgtagccgtcgcgtctgcccacggcgaggaacagccgcgccgtgcctttgcggtccaccgagaacgaacggatttcggggtagttgctctggtcgagttcgctgcggaacgccagacgcaatagggcgcccagcgctacgtcgggcgtgtattcggccagcagttcttcggcgaactcccggtagccgtcgtaactttcgttttcgacgatctcctgcatctcatccttgatcttcagccgtttcatctcgacgatgtcctgcggcgaagggagggtttcgcgcttgatctcgaccttgatgtcgcgcatcaggttgttcagtccccggaattcggagggcgagacgaaggtgatggccgtgccctgcttgccggcgcggcccgtgcggccgatgcggtgcacgtagctctcggagtcctgcggcagcgagtagttgatgacgtgggtcagattgcccacgtcgatgccgcgcgccgccacgtcggtggcgacgaggatattgaccgagcggtcgcggaacttgcggagtatcttttcgcgctgggcctgcgagacgtcgccgtgcagcacctcggcggcatagccgcgggcggcgagccgcgatgcggtttcgtcggccccgatcttggtgcgggcgaagatgatgccgtagaattcgggctcgacgtcgatgatccgggtcagggcgtcgaacttgtcggcttcgcgcacctcgaagtagatctgctcggtgaggtcggtcgtgagctgcttgttctcgacgcgcacgatctccgtgtcgcgcatgtaggttttcgagagccggatgatgcgttcgggcatcgtcgccgagaagagcagcacgcgccgctcctcgctggtgtggctcatgatctcctcgacgtcctccacgaagcccatgttgagcatttcgtcggcttcgtccagtacgaggtaacggacgttttcgagtttcagcgtgccgcggcggatgtggtccagcacgcggcccggcgtgccgacgacgatatcgacgcctttggcgagccggcgcagctgttcgctcatcgcggcgccgccgtagatggcagtgatcgagagccgtttttcgcggttgtaggagagcagctcctcggcggcctgcagcgccagttcgcgcgtcggcacgaggataatggcctgaaccggtccgcgggcgggttcgagcgactggagtatcggcaggccgtaggccgcggttttacccgtaccggtctgcgactgggctatgatgtcgttggttttggtaagcaggtgggggattgtgagcttctggattgcggtgggcgtctcgaatcccttggcgcggactgcggtgagcatctgctcggaaagccccagtgcgctgaaatcgtctgtaatggtcatgtgcatattttaatcgggggcaaaggtacgataaataaagcagatagatactgcggtgcgcgaaaaaagatgaaagtccggcggcgggcgtttgccgggatacagccgatttatacccgatccgggcggtcggcgcggtcgattgaaatatttttgttatatttgcccgaatttttaatctaaataggatggcatacaatttattgaaaggcaagaaaggccttattttcggagcactcaacgagcagtcgatcgcatggaaagtggcggaacgcgccgttgaagagggagccgaaatcgtcctcacgaatactgccgtatctattcgcatgggtacaatcggccggctggctgaaaaatgcaatacgatcgtcgttccggccgacgccacgagcgtcgaggatctggagaatctgatcgacaagacgatggaacatttcggaggcaagttcgacttcatgctccactcgatcggcatgtcgcccaacgtccgcaagggccgcacgtacgacgatctggattacgattatctctcgaagacgctcgatatttcggccatttcgttccacaaggcgattcaggtggcacgccgcaaggacgccatcaacgactggggttcgatcgtggcgctgagctatatcgccgcgcagcgtacgctttacggctacaacgacatggcggacgccaaggcgttgctggagtcgatcgcgcgcagtttcggctatatctacggccgtgagaagcacgtgcgcatcaacaccgtatcgcagtctccgaccccgacgaccgccggaagcggcgtgctgggactgggcgacctgatggagttcgccgagaacatgtcgccgctgggcaacgcttcggcggaggactgcgccgactatgtgctgacgctcttctcggacctcacgcgcaaggtgacgatgcagaacctctaccacgacggcggtttctcgtcgatgggtatgagccgccgcgccatgaagacctacgagaagggacttcgtttcgacgacgtgcaccaaaatcagtatccgttcggcgaaggcgaaaaatagccgtcggaaaaggttggaataaaagagggggaaagtccgagactttccccctctttcgtgtcaatacatatggtcgttcccgcgtatctcttcgcgggtgatcggcttgcggttcatggcccgccatgcgtaccagatataggctgcgacgaacgggatcatcagcgagacgacgctcatcactttgagcgtgaattcgctcgatgacgagttgtagatcgtcagcgacgactgcatctccgccagcgacgggtagtaggccgtgttgttccatccggcgcacagcagcagggccagtaccgtcaacacggtgcccgcgccgccgaaccagacggcattgcgttttccgcgccagcccgaatagatgctccacagcaccgataccacgccgatcagcagcgctgcggccacatagggcatttcgagcatgttgtgcaggtatttgtaaggctcggtcgaaatgcggcctgcggcatcgaccgccaagccgtcggaaaagagcagccagacgaagaacgtcaggaagaagacgaggaacggggcggcgagcgtcagcatgcgcctgcgggcgcgggcgaagagcgtctcgtcggcgatgttgttcatgaagtactggcaggccagcatcccggcgaggaacatcacggccagccccagcgccacgttgcgcatgtctccgagcgcttcgagaccgtgccacggcgtggtccactgcgagatgaccgttgcgctgccgctgcctgcgccgttggccaagttgaggcggtccaccgtgaagtttgcacccgtgaagagcgtcccgacggccgtgcccagcagcaggggacctgcgatgccgttgatcgtcaggaagacgtcgaacgtcttttcgccgaaaacgttgcctgccttgcggcggaactggtaggcgacgggctgtatgacgaaactcagcagaatggtcatccagacataataggcgccgccgaacgaggtggagtagaagagcgggaacgaggcgaagaacgcgccgccgaacgtcacgagcgtcgtgaaggtgaactcccatttgcggcccagcgaattgaccagcatgttgcgttcctcctcggtcctgccgaggcagtaaagcagtccctgtccgccctgcacgaagagcaggaagaccagcaacgctcccagcagggagatgatcagccaccaataatgttgcaagagtgttatagtttccatagtagtttattctttttcttgttcgggaccgattttaatctgacggaacagaatgctcagttcggcgatcagcagcgccgtgaagagcgcgaggaagatgaagaaggtcgccgtgaccgacgtgctgccgatcttcgacgcggcgatgcccacgggcatcaggtcctgaatggcccacggctgccggccgacttcggccagcacccagcccgcctgcgatgcgaggtaggccagcggtacggaccatacggcgatccacagcagccagcgtttgtccgccagccggtccttgcggtttaaccaccagacgagccccagcagcaggatgaagaagcatccggcgcccaccatcacacggaacgagtagaacagcagcggcacgtcgggaacgatgtcctgcggtgcgtcgaggtagccgtagccgaagtaggcgaagtattcgcgcaggaactcctcgccttggggcgtcgcgggatcgaatttggcggtgacttcgtcgatcgtggcttggtcgccctcgtcgagcgccctgcggtagcgggccagctcgccgacggccacgcggccgcgttcgattttctcgcccgccgacatgacaccgtaccgctcgttgccgttcaccagatcgttgatgcccgccacataggcgtccgcatcgcggaaactcatgatggagagcagtttcggaatgtcgattttgaagtagaacgcgtcttcgttcgacgtgcgctcggcttcgggcttgacgatgccgatcgctgtcaggggggcgccttgcgaaccgtcgtagagggcctccatggccgcgagtttcatcggctgcacgcgggcgatgactgcgccggaccggtcgccggtcgtggccgtgaccagcgcgaagatgaagccgaaggccgaagcgatggcgatgctcttgcgggccatcttctgctcgcgccgcctgagcaggtaccatgcgctgacgcccacgacgaacagcgacgccagcacgaacgacgaggtgacggtgtggaagaacttgttcatcgccacgggcgaaaagagcacgtcccagaacgaggtcatctcgttgcgcaccgtttcgaggttgaacgtacagcctacgggatactgcatccatgcgttggcgaccagaatccacagggccgagaggttggccccgatggccgtgagccatgtcgcagtgaggtggaagcccttcgagaccttgttccagccgaagaacatgatggcgatgaaggtgctctccatgaagaaggccatgatgccctcgacagccagcggggcgccgaagatgtcgcccacgaaatgcgagtagttggaccagttggtgccgaattcgaattcgaggatgatgcccgtcgccacgccgatggcgaagttgatgccgaacaggcgcatccagaatttggtggtccgtttccagaattcgtcgcccgtgcggacgtagagagtctccatgatggcgaggatgaagcccagtcccagcgtgagcggcacgaaaagccagtggtagatggccgtcatggcgaactgcgcacgcgaccaatcgactgtttgcaagtaatcggatagcatagatacggagttatttttcgggggttagttctttcatcaccgagcggctgcgctcttcggggctttggccggccagaaaatcgggaaagaaaaagagtttgaggacggcgaacatgatgaacagtttgaccagaatgatggcccagagcgtcttgcctacagtcatgctgcggaagccgtccacatagaaccgaaacacttttttgagagtctgaactgccattgtgtctgcatgtttaatcaaagttagacaaaaaatcggaaataaaaaagaatgccgccccgaaaagccgcacccgtatattatccggccggaaatgcttatcgccggttatattgccggcgcagaagctctttagcccgtctgcgggggcgggcgtatcggcattacgcccgaattgattctggaaaacgataaatattttctatatcttcggttgaaagaaaatttatttactaagcgtttcgggcttgcgtttttgattaatactctgacagtcatgttatttatgtgatttcactctgtaaaaatattttatttggattaattttaaagtaaaaaatattattataaaagttttgtataataattttaattattacatttgttggcgaacatgcaataaatctgttcagaatatatataaggtatccgaaccgaaccaaaacccaatgctgactgaaatatgaaactaaaatttcttggcttcgccctgcttgctgtctgcgtctgcgccgtgtgctgtatgtgcggcagcgattcgaaaacgcccgactatgaatttcccgacggacctgatcccgatcccgaccctcagccgggcgattatcctgccggcctgaccgtaaccgagtttacggacgatctgggcggcggaaaacaatgtctcggattcgtggccgtggccgacctgaaagccaatcccaaactgcgcttcaacgccgtgcatctgccgcagcagaaaaccccgtcgcgcattcatgccgaattcgcttcggccaaccggggaacggcttgtgtgacgatcaatgccgggtattggtgggccgggaactcgctgagcctgcttgttaccggcggtgccgtcaagtcgatcgagaatcagacggtgacacgtaacaatcagacggtttatcccgtgcgctcctcgttcgggcagatggcgtccggagggttcgagacgcactggatttactgcgttctcgacgacggcaacaagccttatgccttcccgtccgcactcgacaacgacgaacgtacgaatacgtatatgtccgcgccgccgacttcgaagacgcccggcgccgtgctctggacgccgcaggaggcggtcggaggcggtccgatgctggtcaaggaggggaagaacgtcgccgtggagaattattggaaagaggtgttcgacggcggcggcatcgccgggacctcgcgtcagccgcgtacggcggtcggcgccacggccgacggaaaactgatcctgctggtgtgcgacggacgcaatatgcggggcagcgccgggtttacgctggccgaactggccgacaaactgatcgagctgggtgccgtcgatgcggtcaatctcgacggcggcggatcttcgacaatggtcggcggcgacggcaaggtgctcaaccgtcccagcgacacgggcagcgccgaagtgatcgtcgagcgcaaaatttcgacggcggtcgtcatctccgaagtgaactaatccataaagaatcatatgaagaaacttctccttatctgtctcgcggcctttgcagccgcctcctgtacgcaggaaaaacagcagtcgaaaccgctttacatgtggttcgactgcgaaggcaattacgctacgctgagtcatcccgattcgatccgttactacgtgtccaaaatccacgacatgggctttaccgatgtggtggtagacgtgaagtcgatcatgggcgaaacgctctacaagagcgacattgcgccttacatgggcgaatgggacggcgtgacccgtcctgagaactacgatctgctgggctatttcatcgaggagggacacaagctgggcatgcgcgtgcacggttcgctcaacgtgttcgccggcggtcacaacttcttcgaccggggaatcatctacggcgatcatgccgactggcagtcgcaggtctataccgaagggaagatcgtgccgatcagcgaaataaagagcaactacaacggcatgctcaacccggctaatcccgaagtgcaggagtacgagctggcgattctgagggagttcgccgagaagtaccccgacgtggacggcatcgtcttcgaccgggtgcgtttcgacaatatcacctccgatttcagtccgctgtcgaaggagcttttcgaagcctatgccggaacgaaagtcgccgattatcccgatgatatactccgctggacgcaggatgccgacggcaagtgggactggtcgcaaggcccgctgttccgcaagtggatcgaatggcgcgcatcggttatcaaggacttcgtgaccgaagcccaccggcagctcaaggagatcaatccccggctgctgatcggcgactatacgggcgcatggtacccgacctattattacgtgggcgtcaactgggccagcgaacagttcgatcccgcccgttatttcgattgggcgacgcccgaatacaggaatacgggttatgccgacctgctcgacatctatatgaccgggctttactatacgctggttaccaaagccgaagtcgacaaggcaaacggagtcgtcgggcagcgtaccgaagcgggaatgtccgacgagcagaattactggtactgcatcgagggcggcgccgagtgggcgaagaaaatcacctgcggcgtggttcccgtgacgggttcgatctatgtcgagcagtacgagggcgatgccgcgcaattcacccgcgccgtggcgcaggcgctccgcgacaccgacggactgatgatcttcgatatcgttcatatcatcaaccgcggctggtggtcggagctggcggccggaatcgccgaaggaagcaactgatctgcaaccaatataaaacactaaaaacttaacttaaatgtaattctatgaaagagtttttctctagattcagagattctctggcggcgaggacgtgtctgtggacattgttcctgctgttggcgggggccgggacggcctttgcgcagcctaccgtcgggggtacggttaccgatgaacagggcaatccgctcgtcggtgtgaccgtggtggtcgtggactcgaacaagggtacgacgaccgacataaacggaaactactccattgcggttcccaaaggcggtatactggaatttacgtatatcggaatgtcctcacagagaataacttgtggggggggg

SEQ ID NO: 12067 - DNA, 294814 bp, Unknown
  gut microbiota DNA sequence
ggttacggctctcagcgccgtgccgacgttacggcggccgtgtcgcagatcgacggtaaggagcttcagaagatgccgatgtccaatatctcgcagggactggccggccgtctgccgggtcttatctccgtgcagaattccggacagcccggtcaggaccaagccagcatgaccattcgcggcgcgaagtcgggtattctctatatcgtcgacggcgtgcagcgttcgatcaatgacatcgaccccaacgatgtggagtcggtatcgctgctgaaggacggcgccgccgtagcggtttacggtctcgaagcagccggcggtgtgatgatcgtaacgaccaagaagggcagacagggtgcgatgaacctgacttacaaagggtcctacggtgcgtcgttcaatacctcgtatcccgaattcctcgacggtccgggttatgcttactggtacaacaaggcgctcgaactcgacggtcaggagccgatcttcacggccaagcatgtacagatgatgcgcgaaggcacgaacggctggggcaacaccaactggatcgacgaaatcttcggaaccggtacgctccagcagcacagcgtcacttcgacgggcggcagcgaccggatcaattatttcgcttcgctgggctatatgaaccagaccggcaatgtcaagaatttcgattacgaccgctataacctgcgtacgaatatcgaagccaagatcgccaagagcctgacctttacgtttggagtggcaggtcagataggagatcggaaggagcccggattctctgccggcggtacttccggcaccagcgtttcgacggccccgtggctctcgattgccgagcaggccgcctatatgcatccttatctgccgaagacctatgacggacttccgaccgcgagccagaatagttacgggaatacgatcaatccgattgccgctacagaactgtcgggctattcgaaatcacagaccgtagccatgcagaccaatgctgccctgcaatgggatcttccgtgggtaaagggtctcagcctgaaggtcatgggggcgtacgaccgcagttctacgacatccaaaatcctgagcacgccttacttcctcatgctggccagcacgccgaattcgaccagctcggatatcacctattccaaggcgtcggatccgcgcaacaatgcgaatgtcacgaccggcaagaaaaccaataacctgaccgaaggattctcgcagtggcgccgaattacctctcaggccagcatcagctacaaaaatacctttgcggagaaacacaaagtcgatctgttggcgctgatcgaaacccgcgattacaagaccaataaattctcggcttcgggtaaggacattccgttcccgcaactgcccgaactggaccaagcgacgactccggcagataagccgataggcggttccagcgacgcttcgcgcaaggtcggactggttttccgcggacagtacaattatgccgataaatatctgttcgaattctccggacgttatgacgggtcttataagtttatcggcaacgtttcgggacgccgctggggattcttcccttcggtatcgctcggatggcgcatgtcggaggagaacttcttcgctcccctgcgcaacgcggtcgacaacttcaagctccgtgcatcgttcggttccttgggcgacgactccggctcggcggcctatgctttcctgagtacgttctccaatgtcagtacggcaccgagcgtcgtactcggcggcgtggggcagaacggtatcatgacgtcgctggttgcgaacgaacttctgacttgggagcgtaattattcctacaacgtaggtttcgatctggcgatgtggagcggaaaactcggagtagagttcgatgctttctacaactatattttcgatattctgggatcgaacaccggaaaacccgcttcgatgggcggctattaccccacttacataaataacaatgcgcaggatgtaaagggtatcgacgtcaaactgactcatcgtaatcacatcggcaaagatttccagtatggcgtgaccgtcaatatgacttgggcgaaagatcgctggctccgttatcaggacagccccaatacgcccgattacgccaagcgtaccggcaagagccgctacatgacgatgggctttatggccgacggcctgttccagagcgaagaggagatcgacaattcgccgtggatctccggctcgcgtccccgtgtgggcgatatcaaatacaaggatctcaacggcgacggcgccattacgtacgatcaggaccgcgcctatctcggtcgcggccagcgtccgcagttcaacggcagtgtcaatctcaatgcttcgtggaaaggacttgaattcgatattctgtttgtcggggctgccgtttgcgacgtttcgctgacgggtacttattacaactggaatgaggacaatacgattttcacccgtccgttcaaggccggtgccaactcgccgcgttatcttgtagaaaacgcatggacgcctgaaaatcccaatgcggagtatccccgtctgtcgctcaatccgcctaacacgaacaactcctatgcttcgtcgttctggtaccgcgacggaaagtatctgcgtctgaaatcggttcatctgggctatacgctgcccaaaaactggaccaacaaactgcgcatccagaaggtgaaggtttatatcgagggcaacaacctctgtacgtggtcgggtctgcccgaaggcgtcgatcccgaatggccgggcgtgaccaacggttactatccgcagcagcgtacggttgtgggcggtctcgaagtttcgttctaaccgacaaaattcaaaatcatgaaaaagaaaatcataaatatcgttttgctggctgctacggtcgccatgacgggctgtaacgattggctcgacatgagtccgaccaacaaggtgtcggaaaagatcgtatggagcgacgtcaattatgtgactcagtatgtcaatgggttttatccctacatctcccggtacggggcgtttgagaccggcgacagtcaggtcggcctgacggacggcctgaccgagacgctcaagttcggttcggccacgccgggcacgaacgtggggtttgccaatatcatcgctttcgccgagggcggacttgccgcatcgacggccgctttccatttcggagcatgggatgatacctacactcgtatccgtcgcgtcaacgagttcctttacggactgaaaaaatacggaagcaatttcgacggcgacacttacaagcgtttcgaggcagaggcccggttcttccgcggattcctctatttccagttgctgaagcgcactccggaggtgattctctataacgaggatttgctggcgattaccgagaataaggccctctcgaccgaggaggaggggtggaatatggtcgaaggcgacctttcctatgccgccaagacccttccggccaaatgggacaacgaagcggggcgcattacttccggtgccgcgtatgcgatgctgtcgcgcgcgatgctctatgccaaacgctggcagtcggccaaaaccgcggccgaagaggtattcaaactcggttatgtgttgatgccgggcaaaacggccgccgattacgccaaggcgtttacctcgatgcgcgacggtaatacggagtcgattctggaatacaactatctggtcggcggcccgaaccatagctgggacaagctctttatgccgggcggcgacaatacgaccatgggcggccgggccactccgacgcaggagatggtcgagtcgtacgaactggcgacgacgggcggttatcccgactggacaccgtggcacaatacgacgaccggtacgaccgatacgccgccttatgctcaattggaaccccgtttccatgcttccgtgctttacaacgggtgcgaatggaaaggccgtgctctcgaaccttatgtgagcggtaaagacggctatgccgtttacgacgacggttcggcgctcaacggccgtacgaccacgggttattatctgcgcaaaatgctgaacgaaggttataccgactattcgaaagcctgtacgcagccttggatcgccattcgtctggccgaagtcattctgaatcatgccgaggcgtgctacatgctgggggccgacggtgcgaacgacgacctgcgccagattcgggagcgcgtaggcctgccttactccaataagtccggcgaggcgctgatggcggcgatccggcaggagcggaagatcgaactttactgcgaaggacatcattattgggacatgcgtcgctggaaactcgcgcatacggcttattccggtcagaacagccgcgtacacggtctcaaaatcgaaaagcagggtgccgagtttatttatacctacgtcgactgcgaccgtaaggaccgccttttcgaagagaagctttaccgtattccgctgcctgaaaccgagctgagcaacaattcggccgtcaagcagttccctgagtggttataatctctaaaagaaaccgaaaccatgaaaaatagcattaaattatttgcattggcggctctgctcggcttaggcggctgccatgagccggatgagctgaccccgtcggtcgtggatcaggggctgaacaccatctcggcgcagttcgctaccggggagtataaaaacgacccgctggcaaaattcaccgcggcggtgaccgagggacaggagcgtatcgtgatcgatgttccttactattatcccgaaaattcgtcgaataccacttcgattacccagatgcgcgtcacggctaatctggatgacaactgtttcatcacgccgatgcttggggtattggatctgacgaaggaaaactggtttacgctgacgcgtgtcgacggttcgaagcgcaatttctgcgtgacgggcaatatcaagaaatcggataaatgcgagatcatctctttcgccaccgacgaaccggctattcagggtgtgatcgataacgaccgtaacacgatttcactcattacggtcgatgacctttcgtcggtgacggcgcaggtgattctttctccccacgccacgatctcgcccgatcccgccgttgcggccaattacgagggcgagggcgtgaaatttacggttacggcgcatgacggcgtgaccaagcgggtttattccgtgagcaaggagattccgcccaagatcaaatacggctggcgtgcgggcagcgagacggaggtttggcagaacgtatcgctcgacaaactcggaatcgtcaatgccggcggtaagatctattcgctggcggcgtcgggcaacaagctcgtgctttcgaccggtgcggacaagttcctgttcaaccgcgcgacgggtgatttcttgggtgcacacgacatgaagggcgtagcggccgacggcggtatgacctcggacgacgcgggcaacatcctctatgcgaacttggctaatcccaatgccgaattcaaggtttatgcggcggcatcgacggatgaaatgcctgccgagctgctctcctatacgaacgctacgggcgcttcgatgggcaagcacatttcggtgcagggcaacgtgaagggcgatgcgatcgttacggccgtgatctatacgtggaacggtgccgtttgcaagttcctccgctgggtgattaccggaggcgtgccggccaagccgcagatgatctcggttacgggggcgaccgtcggctggaacggcaacggccacgccgacgtggaggcttattcggccaatcccgacgatccttacttccttgcctactacagtgccaatgcgctgtatcgtgtcgatgcgacgggcgctgtaacccacaagatcgccactgcgacatggggtgccaactccaactacaactgtgtggatgtatgtacgttcaataacgccaaatatgcggcgatttatgagggcgcgcatttcacctacggagagttcaaggcctacatgttcgatgtgacgacgcccgatcagatgacgggtgcgtgcgacacgtcgccgtcgaaggtcttcgtatcgaacgaatacaagcctgccggggcggtggtcaatgcggccggcgacgtgctgatgacggcatcggccgacggatacaagatgaatctctactatacggacgccaataccaatgcgctggtcgcttgggagttcgactgtatcgacaagtaacacccattttgcctgcatccctctgaccggggatgcaggtcctaaaacaaacataattttgaagatgaaaaagaatatcaaatggtttgcggcggctttggtggcgctgacgctgggatacggggctgtttcgtgcggctcggattcgaaggaacccgaatgggagtggcccgatcccgaccccgatcccgatccgcaaccgggagtggagaaaccccggttcatctgggtcgatgccgccgccaacttccccgatttcgccaacagcaaggagaatatactgcgcgatctgaccaaagccaaggaggccggattcaccgatatcgtggtcgatgtgcggcctactaccggcgacgtgcttttccgtacgtcggtggtcgatcaggtggaatggctcggcgcatggctgccgggcggatattccaaggtcgaacgcacggccacgtgggactacctgcaggcgtttatcgacgccggaaagtcgctcgacctgcgcattcacgccgcgatcaatacctttacgggcggcaaccagacctcgctgggcggcgccggagtcgttttccgggatgaggccaagcgggcgtggacgaccgatctgaatctggcgggcggcatcacgaacatcatgtcaacctcgcagtccgccaagttcttcaatccggtattgcccgaagtgcaggagtatctctgttcgatgctccgggacctcgcggcctatgacggactggcgggaatcttcctcgaccgggggcgcttcgacggatttaccagcgatttctcgaattatacgcgcaaggagttcgagaagtatatcggccagtcggttgccggtttccccgccgacattctgcctgccggccatacttcgggcataccctcgccggtgcccgtgcatatgaagcagtggctcgaattccgggcgaaggtgatccacgactttatggagaaggcgcgcgccgccgtcaagtcggtcaatccgtcggtcaagttcggcgtatacgtcggaggctggtatgccagctattacgatgtgggcgtcaactgggccagccccaattacgatacctcgtccaaattctcgtgggctaccaagaaatacatgaactacggctatgccgacctgatggaccagatgctcatcggcgcctacgcctccccgacgcgcgtttacggcacgaccgaatggaccatgcagggattctgcctgctggccaaagagcgtacgatgggggcctgcccgatggtggcaggtggtcccgacgtgggaaactgggatgccgaggacaaggtgccgcaggaggaggagaaccgggccatcaccgcttcggtcgccgcctgcatcaatgcctgcgacggttatttcctgttcgatatgattcacctgaaaaaagccgatcagtggtcttatgtcaagaccggtatcgacggcgtaattaaaaaagactgattatgaaacgcatcgtcatattgtttctggccgcccttttcgcggcatccggcgcttcggcgcagaaattccataatgcctactacgatacccgccgtgcggcccacgacgaagagggactgcagcagggggcgatcgtcttcctcggcaacagcatcaccgaacaggggtggtggagcctgctgctcaaacgcggcgacgtcgagaaccgcggcatcggaggcgacaacaccttcggcatgatcgaccgcctgcccgacatcctgaaaagcaagccccgcaaaatcttcctgatggcgggtatcaacgacctgacgggcgggcagcccgtcgatacgatcgtgatgaacattacccgcatggcggacatggtgcacgaagccgttcccggctgccggctctatatccaaagcgtgctgccggtcaacacccggcggctggcctatcccggactcaaggggcacaatccgcaggtgcgggcgctcaatgcgcggctggtgcggttgtgcgacgccaagccgtggtgtacgttcgtcgatcttgcgccgctgctttccgacgccgacggtgagctgcgcatcgacctgacgaaggacggaatccacctccatcccgcgggatatgtgatctggaccgattacctcaagaaacagaaatacctgaaataacacgccttgcagatggaaaaacgagcttatacggtcgatttgctgcgggggctggctatcgtgggaatggtgctgtcggggcagattctgtggcacgccgaacttcctgcgtggctgtttcatgcgcaggtgccgccgccgtcgttccgcttcgacccgtcggtgccgggaattacgtgggtcgatctggtcttcccgtttttcctcttctcgatgggggccgctttcccgctggccctgcgccggcggctggaacagcggggcgaatcggtggcgctgatcctgacggtcgtggcgcgcaggtgggcgttgctggcgcttttcgccattgcccttgccaacctgcgttccggagtgacgggaacgctgccgggatggggctcctcgctgttgcaactggcgggctggggctgtttctgtgcgcttttcatgcgcttcggccggctttcggaccggcagaaccgcatggtctgtctggccggcgtcgccggcatcgccgccctgctggcggccgcccggtggatctggggactgcccgtctcggcggagcggagcgacgtcatcattctggtccttgcgaatatggcgctgttcggcagtctggcgtggctctatacgcggaacaatctgctggcgcggctgggtgtgctggcgctgctggcggcactgcgtctgggcagcggcgtcgaaggttcgtggaacgaggcgttgtggaactggtcgcctgcgccgtggcttttccgcttcgactacctgaaatacctttgtatcatcattcccggcacgattgcgggagaccgtatctacgaatggatgacgcaggtcggcgaggatgcgccgggggcgtcccggcggcgggaggtctggatactcgttctgctcgtgacgctgatatgcctgaatatgtgggggcttttcgcgcggcagctggtcgtgaatctcgcggcgggcgtcctgatctgtctcctgctccggcacttgctgcgcggggacggctccgcgaccggaagactgcaccgttcgcttttcggctggggctttttctggctgatgctgggactggcgctggaggcgttcgaagggggcatcaagaaggattacgcgacgttcagctattttttcgtcacctccgggctggcttcgtttgtcctgatcgccgccggaatcgcgatgcggcggctgaatgtgcgtttctcggcgctggtcaaatgcgggcagaatccgatggtggcctatacggcggccggattcctcatcatgcccctgctgacgctgctgcatctggcgccttatttacagacctttgccgagctatgcccgtggatgggcgtggtgcggggcgtgctggtcacggccgcggtcatggccgttacggtcttttttacgaaccgcaggcttttttggagaacctgatttgaaatttaaataaatgagttatgcgaataaaagggacttttctcgacgaaatcagtcatgacattccccatcagaactggggcgaagccgaatgggaccgcgacttcggctacatgcgcgaagccggcatcgacaccgtgatcctgatccgctgcggctaccgccgctggcagacttttccttcgcgggtgctcacggccgaggaggggtgttacgaaccgcccgtcgatctggtcgatatgttcctgcgcctgagcgacaagtggggcatgaacttctggttcggactctacgattcgggcaagtactgggaccgcggcgaatacgagcaggaggtggcgctgaacaaacgcgtgatcgacgaggtgtggagccgttacggacattacaaatcctttgcgggctggtatatttcgcaggaatgcagccgcaataccggcaagatcgtcgatctgtatgcgagtctgggacgctattgcaaggaggtttccggcggtctgccgaccatgatttccccttatatcgacggcagcaagaacgtcagccagtacaatgcttcgacttcgaagcagaacgtcgtgacgctcgaaagccatgaacgcgagtgggatgccatctttgccggaatcaagggcgccgtggatatcgtcgcctttcaggacggccatgtggagtatgacgaactggtcgatttcctgaaggtaaacaagaaactggccgaccgttacggattggagtgctggaccaattccgagaccttcgaccgcgacatgccgatcaagttcctgccgatcaaatgggagaaactgcggctcaagatggggctggcggctcaggccggttaccagaacgccattacgttcgagttctcgcacttcatgagtccgcagtcggcctacctgcaggcggggcacctgtacgaccgttatatggagtatctgaaaaccttggaatagagaccgatgaacggacattaccctaaaccgggcggtttggcggcggcgctggccgtgctgatcgcggtcgtgctggcggcctgctccccgaagagtgcggcgggcggcgacgcggcctgcggcctgtcggacgacgatttcagaaccgaaggcattctccaagcgattcccgttcgtgcgacgttcctcgacgaggtgagctgggacattccccaccagaattggggcgtcagggagtgggacgccgatttccgggcgatgaaaaacatggggatcaacaccgtggtgctgatccgcgccgggctgggacggtggatcgccgcgccgttcgagtgtctgctcgaaagcgaggaggtgtactatcccccggtcgatctggtggagatgttccttacgctggccgacaaatacggtatggcgttctatttcggcatgtacgattcgggcaaatactggcaggagggactcttccagcgcgagatagacctgaacctgaaactgatcgacgaggtgtgggccagatacggccaccacgagtcgtttcaggggtggtatctgtcgcaggagatcagccgccggaccaagaacatgtcgcgcatctatgcggaagtgggccgccacgccaaggcggtttcgggcggtctgaaaacgatgatctcaccctacatccacggcgtcaagaccgatcaggtgatggcgggcgacaaggccctttcggtcgaagagcaccgccgcgagtggaacgagatactgggcaatgtcgccggagcggtggacatcctcgcgtttcaggacgggcaggtcgattaccacgagctgtacgactatctggtggtgaacaaggcgctggccgacaagtacggcatggagtgctggaccaacatcgagtcgttcgaccgcgacatgccgatccgcttcctgccgatcaagtgggagaagctgctgctgaagctggacgccgcacggcgggccgggatgcggaacgtcatcacgttcgagttctcgcacttcatgagtcccaattcggcctatccgcaggcgggacatctttacgatcgctactgcgattattttaaaatcgacaacccttaccggaaacggtaaatatactccatgaaacggcgcggcaacatatcctacatgctttttcttgcggtcacggcggccgtgggcggactcctgttcgggtacgacacggccgtgatttccggtaccgtcgagctggtgacggcccgcttcgggctggacagcctgcagcagggatggtatgtggggtgcgcgctggccggctcgatcgccggggtgctctgttcgggcgtgctgagcgaccggctgggccgcaggcggacgatgctcgtctcggccgtgctgttcacggtgtcggccgcggggtgcgccctttgcgccgatttcacgcagctggtcgtctaccggatcgtgggcgggctgggcatcggcgtcgtttcggtcgtctcgccgctttacatctccgaggtgtcggcggcgcgccgccggggcatgctggtctcgctttaccagctggccgtcacgatgggatttctggcggcctatacggtcaattacctgctgctccgcatgggacagaccgccggtttcgaaacggcgtggatgcggcggatcttcgtcgatgaagtgtggcggggcatgctgggggccgaaacccttccggcgctggttttcttcgtcatcatcttctttattcccgaaagtccgcgctggctggtgctgcgcggacatacggaccgcgccctgcgtgtgctcggccgcatcgacggcgaccgggcggaagccgccgcggagcttgcggccatcgaaacggccgtcggcggcggtcaggccccgcagtggcggctcctgctgtccaaaggcatccggacggcggtgctcgtcggtgcggcgatcgccattctcggacagttcatgggcgtcaatgccgtgctttactacgggccgtcgattttcgagcgggccggatggtcgggcagcgactcgctgttcgcccagatactggtcggagcggtcaatatgcttacgacggtgctggcgctggcgatcatcgaccgcgtagggcgcaagaagctggtttactggggcgtgtcgggcatggtgctgtcgctgctgcttatcgggacctgtttcctgaccggtgagcggtcggggatgccggacggcgtgctgctggcggcgtttctgtgttatattttctgctgtgccatctccgtctgcgccgtggtctgggtgcttttgtcggagatgtatccgattcgcgtgcgcggcgcggcgatgtcgatcgcgggattctcgctttgggcggggacctatctggtcgggcagcttacgccgtggatgctcgcgaatctgacgccggcggggacctttttcctcttcgccgcgatgtgcgtgccctatatgctgctgatatggaaggcggtgccggagacgtcgggccgcacgctcgaagagatcgaacgatactggacaagataacaatataaaatcagataagattatggacttcaaaagattagcggaacagtacaaaaccgagttgctggatggcgtactgcctttctggctcgaaaaatcgcaagatagggaattcggcggctattttacgtgtctcgatcgtgacggcagcgtctacgataccgacaaattcatctggctgcaggggcgcgaagtgtggatgttcgccatgctctataacaaggtggagcgtcgccccgaatggctcgaatgcgccgtgcagggggctgagttcctgcgcaaatacggccacgacggcaactacaactggtattttgcgctgacgcgcgaaggccgcccgctggtgcagccctacaatattttctcctatacgttcgcggcgatggcctttgcgcaggtcgccgttgcgacgggcagcgacgagtatgccctgatcgcaaagcggactttcgaccggattctggagaaacgcgccaatcccaagggcgagtggtgcaaggcctatcccggaacgcgttcgctcaagagcttcgccctgccgatgatcctctgcaacatggcgctggagatcgagccgatgatcgacaaacaattgttggccgacaccatcggggagtgcctgcacgaagtgatggaggtgttttaccgggaagagctggggctgatcgtcgagaacgtcacggaggacggacggctttccgatacgttcgagggccgtcagatgaatcccggacattcgctcgaagcgatgtggtttatcatgaacctcggcgtgcgtctcgacgaccgtgcgctgatcgacaaagcggtgaaaatcgcgctcaataccgccgaatacggctgggacaaggagtacggcggcattttctattttctggaccgcaagggcgcgccccgcgtggagctggaatgggaccagaagctctggtgggtgcatatcgaatcgacgatcgcgatgatcaagggctatcagctgaccggatcgaaggagtgtctggagtggttcgggaaactgcacgaatatacgtgggcgcatttcaaggacacggagcatcccgaatggttcggttacctgaaccgccgcggcgaggtgctgctgccgctcaagggcgggaagtggaagggatgtttccatgtgccgcgcggactgttccagtgctggcagattctcgaacaatgcaaatagaactaaaatacggaacgatgaaaagatatttactgacaattctgttgtcgttgtggtgcgcctgcgcatgggccgcgggcagcgtcacggtcaaggggcgcgtcctttgcggcggccggggcgtggaaggcgtctgggtctccgacggcgaagagttcgcgtgcaccgacaaaagaggaaattacagactgcaggccggtgccgacaaccgcttcgtcttcgtttgcgtgcctgcgggctacgacgctccggtggaaaagggcgtggtgcgctatttccacccgctgcccgccgacggcaaatcctgcgattttacgctgctccgccgtgcgggcgacgattcgcgttacgggttcatcgccattgccgatccgcagatatgggcgccgaaggagtttgcgaaactcgcggcggcggccgacgacatcgccgctacggtccgcagttacggcggcatgcctttccacggcatctgctgcggcgacatcgtgtcgcacgaccattcgctttacggccggtacaacgaagtgatggagcgtacgggaatcacgttccgcaacgcgatgggcaaccacgacatgaaggtttacggacgctcttacgaaacctccttctcgaagttcgagcagatgtacggtccggtctactattcgttcgacgtcggacgcatccactatgtggtgctcgacgacaacttcttcatcgggcgcgactatttttacatcggctatctcgaagagcggcagatgcgctggctcgaaaaggaccttgcccgcgtgcagcccggttcgacggtggtcgtctgcctgcatatcccttcgacctgcgaggagcaggaccgcaagcagttccgctacgaccgcgccggatcgacgatgaccaaccacagggggctttacgaaattctgaaaccctaccgggcgcatatcatttcgggccatacccatacgaccttcaaccagccgatcgcgcccggcctctacgagcatgtgacacccgccctgagcggcgcatggtggcagggtccgctctgcaccgacggtacgcccgccgggtacggcgtctatgaggtgaacggcgaccggatcgactggtattacaaatcgacgggttatccggccgactaccagatgaaaatttacagcggtcgcgaatatccccagttcgaagggtacgccgtggccaacgtctgggccagcgacccggcgtgggaggtccagtttacgatcgacggcgtgccgtgcggtcccgccgagcggtttcaggcttacgatcccgccgcgaaacagatgtactccgacaccagtcagatggaccacaaatggatttacccttcgatttcggaccactattaccgcgttgcgctgcccgaaggggcgaagcgcgtcgaggtgtcggctacggaccgcttcgggcggatcagccgggccgcagtcgatttgaaataaacgaccgaatatgagatttaccggactgaaatatttgcagctgctggcgtgcttggggctgtttgcatgcggttccgccgagcgttacgacgtggtgatcgtcggcgggggagcgagcggaacggcggccggactgcaggcggcccgcatgggggcgcgaaccttgatcgtcgaggagttcgactggctcggcggcatgctcacctcggcgggcgtgagcgccaccgacggcaattaccgcctgcgcggcggcatctgggacgagttccggacggagctggcccggcattacggctgcgattcggccctgataacggggtgggtcagcaacgtgatgttcgaaccttcggtgggcgacagtattttcaaacggctcgtcgcccgcgaaccgaacctcaccgtgtggtaccgttcggcggccgagacggccggacgcgggaaggatgtatggcggctgggtgtccggcgtgacggccggctccggccggtcgaagccgacgtgctcgtcgatgcgacggagctgggcgacgtcgcccggatggcgggcgtcccctatgacgtcggcatggattcgtcagccgtcacgcacgaggatatcgccccggccgaagccaacggcatcgtgcaggacctgacctacgtcgccgtactgaaggattacggccgcgacgtcacgattccgcggcccgacgggtacgatccgtcgcttttcgcctgctgctgcgtgaacgacctctgcatcgctccgaaggaaccgcatcgcatgtggtcccgcgagatgatgattacctacggaaaactgcccgacggcaaatacatgatcaactggccgatcgagggcaacgattactacgtggacatgatcgacatgacgcccgaagagcgggccgacgccgtccgcagggccaagaatcatacgctgtcattcgtctatttcctccagcatgagttgggattcaatacgttgggattggccgacgacgagttccctacggaggaccggctgccgttcattccctatcaccgcgaatcgcggcgcattcacggggccgtgcgttttacgctcaacgacatcaccgacccctacgcaggaacgctttaccgtacggcggtcggcgtgggcgattatccggtcgatcagcaccatacccgctattcgggctgggacgaactgcccgacctctatttccatcccatcccctcgtacggttttccgctgggcatcgtgatccccgcaggatttccggggttgctcgtagccgaaaaatcggtgtcggtaaccaacctcgtcaacggctccacgcgcctgcaacccgtcgtgttgcagatcgggcaggcaacgggagccttggcggcgttggccgcggcggcgggtgtcgatccgtccgaagtcgcggtgcgcagggtgcaggaggcggtactcgatgcgggcggctacctgctgccgtacctcgacctgccggccgacgatccgcgcttcggggcgatgcagcggatcggcgtgaccggaatcctcaaggggcgcggagccaacgtcggctgggagaaccagacttggttcgacgccgatcggacgatcgcggaatccgaactgcgcgaagggctgcgcgaagtctatccgtcggtccggccctccgttctggaaacgccggtcgatggggcgctcctgacggcgatgctggccgaagcgctcggcaagccggccggggatgttgcggcgcggacggagcgtgccgccgccggactgctgtccggttacgatccggcgcgtccgctcacgcggctcgaatgcgcgctgctgatcgacgcggtggccgatcctttccatgcggccgaagtcgatatttacggaaactacaaacgaaaatagcttttaatttttcatgaaaaaactgctgactgtatgcctgctggcctttgccgcggcaggtgcgaccggctgccggagtgccgccgagggggtgaaacccaaactgatgtggctcgactgttcggccaactgggtgcgtttcagttaccccgattcgatccgttattatgtgaacaagtgccgggaggccggcatgacggcgctggtgctcgacgtcaagggcacttcgagcgaagtggtatatcccagcgagcatgcgccccaagtccgggagtggaaagggtttgtccgccccgatttcgatttcgtgggtactttcgtcgaagctgcgcacgatgccggactggagatttacggttcgttcaacacctttgccgaaggcaacggcgtattccgccgcggactgatctacgacgggcatcccgaatggcaggccgtgaactatgtccccggcaggggactggtgccccagctggagattccggagaagaaggtgctgttcgccaatcccgcgctcccggccgttcaggatcacgaaatcgccattttcaaggaggtggcgcagaagtacgatttcgacggtctgctgctcgaccgcggtcgctacgacaatatccagtccgacttctcggatttctcacgcgggaaattcgaggcttatatcgggaaaaagctggatcgtttcccggaggatatctatacgtgggaggaggacggcgacggcggctggaaacgcatcgacggcccttatttcaagcagtggatcgagtggcgcgcgtcggtgatctacgacttcttcaaacgcaccaaagaggagctgaaagccgtgaagcccggcctgaaattcggcgcttatacgggtgcgtggtacccgtcctatttcgaagtgggcgtcaattgggccagcaatacgtacgatccttcgcaggatttcgcatgggccacgcccggctataagaattacggatatgccgaactgctggacatcttcaccaacggcaattattactggaacgtgaccgtcgacgagtaccgtcgcagcaacggcctgcacaagaacgagaccgacagcgaaatgtcgaagggcgaccacctcagcgtcgagggcgggtgccgctattcgcgccgtctgctgggcggcagacccttcttcggcgggatgtacgtcgaggactacaaacgcgatacgacccagttcaagcgggccgtggagatgaatctccgcgaatcggacggactgatggtgttcgacatcgtgcatatcatcaaccgcgactggtggggaccgctgcagcgggccgtcagcgcctatgaagcggaggcgaagcaatgagcagacggctgatttttgcggtgctggcgctgttgtgcgccggtgccgtttccgcccagaagcggacggaagcgcccgccgcgtcgtccgaggtgcgctatgtcggacgtacgcagacaaacggcggcgacgtgagtttcgactggagcggaaccagcttcgagtgccgttttacgggcggttcgctggccatgcgcgtttcggatacgaaaaagaactactacaacctgaccgttgacggccgcgacgccggcgtcgttacgacgttcgggacggattcggtcgtggtgctggccgagaagctgggccgcggcgaacataccgtgcggatgcagaagcgcaccgagggcgagcaggggcgcacgacgatccatgccttcctgctcgacaggggaggacgtctgctgcctgcggcgcccgcgcccggacggcatatcgaatttatcggcaactcgctgacctgcggttacgggaccgaggggctttcgaaggacgagccgttcaaaccccagaccgagaactgcaacaaggcgtacgcctgcatcatcgcccgttatttcggcgccgactatacgctgatcgcccattcgggacgcggcgcggcgcgcaattacggcgataagaacaccacttcgcagaatacgatggccgaccgcatcgccaatacgttcgacgaggcggcggaaccggcgtgggacttcgcggcgtcgccgtaccgtcccgatctggtcgtcatcaatctgggatcgaacgacttctcgaccctgccgcatccttcgcgcgatgagtttgcggccgcctacacccgcatcctgcagactctgcgcggcgcctacggcgacgaaatgccgatcctctgcgtggcgccgcgcgtcagcgaaccggccttcacctatatccgcgacctgtgtcagtccgccgtcgtgccgaacctccatttcgcggccatcctgcccggctactgcaacgacggaagcgagctcggatcgtcggcccatcccaattacgccggccagcgcaagatggcaatgctgctgatcccctacgtttcgacgttgacgggatgggaggcggagatcaaaccggtcgaataggcgtttggccgtatcgcggctttttgctacttttgtcccccggttaggaacggagtagcgaattatggaatctcacaagaacaaattgccctcggcatgggtgtcggcgctgccgctcgcagtgctgacacttcttttatatgtggtcatccgctgtttcgggggcgatgcgataaacggcggaagccagatcgcgctgctctcggccacgtcggtctgcgtgatgctctcgatcggcatctaccgctgcaagtggtcggtgcttgaggatgcgatcatcgacaacatacgcgcctcggcgtcggccatcatcatcctgctgctgatcggcgccatcgccggatcgtggatggtgagcggcgtggtgccgacgatgatctattacgggctgaaaatcctgcacccctcgttttttctcgtcgcctcgtgcgtcatctgcgccggcgtgtcgctgatgaccggcagctcgtggacgacgatcgccacgatcggcgtggcgctgatgggcatcgggcaggcgatgggctttcccgaagggtggatcgcgggcgcgatcatttcgggcgcctatttcggcgacaagatttcgctgctctccgatacgacggtgctcgcttcgtccaccgtcggcgtgccgatcttcacgcatatccgctacatgctctacacgaccgttccgtcgttcgtcgtcgcgctggcggtcttcgtcgtcgcggggctgacgctgagccataccggcggtgcgcatgccgaactttacgccgattcgctgcgcggcgctttccgcattacgccgtggctgctgctggtgcccgtggcgacgggcgtgctgatcgtgcggaaacttccggccatcgtgacgcttttctgcgccgcggtcttcgcctgcgtcgccatgctgctggcgcagcccgaactggtggcgaaggtggccggagtcgaaggactgaacttcatgtcgggattcaaaggcgtgctgatgagctgtttcgggcctacggcgctggagaccggaagcccgcagctcgacgaactggtggccacgcgcggcatggccggcatgctcaataccgtatggctcatcatctgcgccatgtgcttcggcggcgtgatgaccggcagcggcatgctgggggcgctgacggccgtttttctgaaattcgtccgccgcaccttttcggccgtggcttcgacggtcggggccggaatcttcttcaacctctgcacggccgaccagtatatctcgatcatcctttcgggccgtctgttccgggaactctatgccgaacgggggctggaatcccgtctgctgagccgctcggtcgaggactcggcgacggtctgttcggtgctcgtgccgtggaactcgtgcggcatgacgcaggccacggtgctgggcgtctcgacgttcgtctacatgccttactgcatcttcaatatcgtcagtccgctgatgtcgctgtgcgtggcggctctcggctggaaaatcaaaaaggccgcatcttctgtcggccgcagacaatgattatggaaacgactgtaaataccgatctggtcatcttcgacctcgacggcacgctgctcgatacgatcggcgatctggccgtcgcctgcaacgccgttctggccctgcgcggccttccgcagcactcctacgaggagtactgccatttcgtcggcaacggcatcatgcggctcgtggagcgcgccctgcccgaagagcttcgcacgccctataccgttgcggccgtgcgcgccgatttcgtgaaatactataccgagcatatcgatgcctataccaagccttacgacgggattccggagctggtcgcggggcttgtacggcgcggcgtgcgtatcgccgtggcgtcgaacaaatttcaggcgggaaccgagaagcttgtccggctgtttttccccgacgttcctttcgccgcggtcttcggccagcgcgaaggggtgcctctgaagccggacccggccgtggtggaggagattctctcgctgacgggcgcggcgaaggagcgggtgctctacgtcggcgattcgggcgtggacatgcagaccgccgcggctgcgggcgtacgctcggtgggcgtcacgtggggtttcagaaaacgcggggagctggtcgagtcgggcgccgtgcatatcgtagaccggcctgcggagattctcgccctgctgtaatcgggcagttcggttcgaaaaaacgacaaccggtccgcaagggccggttgtcgctttttcagcagtaggtcttcacgtcgtcgagcgtgatgcgctcttcgctgaggatgatgagccgctctatgacgttgcgcagttcgcggatgttgccgctccaccgcatcgcctgcagttcgcgcagggcgttgctctcgatgcgtttgggcgggatgccgtattcggcgcagatcgtgcggatgaaatggtcggccagcagcggaacgtcctgcgcgtggtcgcgcagtgccggaacgcgcaccacgatcacgccgatacggtggtagaggtcttcgcggaagttgcccttcgtgatctcgtcgcgcaggttcttgttcgtggcggcgatcacccgcacgtccacgtcgatgtccttgtcgctgcccacgcggcagatcttgttctcctgcagcgcgcgcagcaccttggcctgcgccgccagcgacatgtcgccgatctcgtccatgaagagcgtgccgccgtcggcctgctcgaatttgcctttgcgctgtttgatcgccgaggtgaaggcacccttctcgtgtccgaagagttcgctttcgatcagctccgaggggatggccgcgcagttcacctcgacgaacggcgccgcggcgcgcgagcttttggcgtgcagccagcgggcgacaagctctttgccggtgccgttttcgcccgtgatcagtacgcgcgcctcgcacggcgccaccttgtcgatcagctggcggacgtgttccatctgcggcgaggtgccgatgatttgttccgtatgcatattgcgcgaacggcgcgagcggcgtgcgggagctgccgcgggtgcgcaggcgggtgcgggcgccgggttgtcgatggtgcggtgtatggactgcagcaggcggttcatgtcgatgggcttggtgaggtaatcctgcgcaccgttgcgtacggcttcgaccgccgagtcgatcgacgcttccgccgaaagaacgatgaacgggattccggcgtcgggaatcttgcagccccggtccgaaaggatgacgtcgaacggtattttctcgcacatcgtcgatgcagcctcctcatcttcggcggcttcggtcgagaagccttcgaattcgagacgctcgcggagcgtgtttcgcatactttttgattggtccagaattaaaacctttgccatagcttgtttttactgaaattttacctacttttgtcccaaagttatgactttctgcggtgcaaaaccaatcttgaggggccttgccgaacagggtggagagtcggataaaacgtcttgaatcggtccatcgcgacaaccccgccggacgctccggcggccgttttgcaacagtgccgaggaccacaattacaatatgaaaaagaattacaattacacacgacgcaagttgtacctgcccgaatacggacggcatattcaggagatgatcgactcgctgcagctgatcgaggaccgccgcgagcgcaaccgtcaggcccgtgccgtgatcgccgtgatgggcaatctcaacccgctgctgcgcgataccgccgatttcacccataagctgtgggatcacctctttatcatgtctgatttccagctcgatgtggattcgccctatccgcagccgacccgtcaggaactgactatcgcgccgcgccgcatggcctattcgcagggacgcatcgccttcaagcactacggcaaatacgtcgagcggatgatcgggagtctggccggcgacaaggaccgcagggaggtgtcgcgcacggtggacaatctggcccggtacatgcgctcgaagagctacgaatacaatcaggagcatcccaacaacgaagtgatcgttaaagacatcaaacgcatgtccgggggtgctattgaaatagatgaagttgctttaaacaatctccgaagcgactataaacagcactttacggcacgtccccagaaaggtccccagcagcgcaatcagcagcgtcagcagaaaaaccgcaatcagcagcacaaccgcaatttttcgaaaaacaacggtccgcaccgcaattcgtcgaaataagaggtgcgtattttcggaaatttgctatatttgtgagcattttactgcagaaacgtgagattaatgaacaaacaaacgcttttcgtctccctgaccgcggccgtcatgttgtgtgcctgccagtcgtcgaaggtgaagatttcaggccgcatcgtcggcaacgacgccaaaaatgtttacttggagcaggtgtctcccctgtcgcagtcggtcatcgactcggccgtgctcgacaaggagggtaattaccgtttcgagctgaagggcgtgacccggacgccttcgctttacaatataatttacaacggcgaacgtattccgctctttctggcgggcggtgaccgcttgtccgtgaattccgtgggcagtttcatccgcaactatacggtcgaagggtcgaaggagaccgagctgctgcggcagttctatcaggctttcgtcggcggcgcccagcggctcgacaacatcgccggccagttcgcccggacgaacctctccgaagaggagcgcaaggcgctggtgaaggagtataccgacgaatactaccgcatccgccgcgaacagctgcgcttcatcatcgaaaacaagtcttcgctggcggcggtttatgccctgtaccagcggttgccgggcgacacctatctgttcaacggtgacagcgacgtggtttattaccgcacggtggccgaagcgctcgaacaatcctatcccgattcgccttacctgcagtcgctgctggccgagattacgcgcatggacgcccgcatcagcctgacgtcgcgcatctccgaagcggggtatcccgatctggaactctcggacatttacggcaagaaggtgcggctctcgtcgctgacgggcaaggtcgtgctgctggacttctggtcggccgaactgggcaacagcaatacgctcaatgccgagctgaaggaggtctacaagaaatacgccgacgctccgacgccgttcgaggtctatcaggtggccgttgattcgtcgaaacccctttggatcaccgccgtgcaggagcagcagctgccttggatctcggtgagcgatctgcgcggtcaggcttcgacggcgccccggctctacaacgtgcagaaacttccggccaatttcctgatcgaccgggagggcacgatcgtggccaaggatatttacggcaagagtcttgagcggaagctcgacgaactgacgaaataggggcgtgtccgaatcccggatgctttccggctgcgctcggacaaacctcggaaaatgcggcgttttgccgtgcgagtccccggcaacggggattcggtcaattgtttagaacgatttatgaaccattatttcgcatccgacatccatctgggcgcaggcggcgaggcgttcgccggggaaaccgaacgccgtttcgtggcttggctcgacgatgcggcgaaggatgcggagtcgatatttctggtcggagaccttttcgacttctggttcgaataccgcgaggtcgtgccgaagggcttcgtgaggacgctgggcaagctggccgagctgaccgaccggggcgtgcgggtcgtcttttttaccggaaaccatgatatgtgggtcggcgactacctcgcccgcgaatgcggcgtcgaagtctacacttcgccgcagcggttctgcctgaacggcaaacatctctttatcgcccacggcgacaacatgaagatcgacggacagccggtgctcaaactgctcaacaccgtatttcgttcgcggacgctgcgctggctcttttcgtggctgctgcatcccgactgggcgatgcgtttcggccattggtggagcggcaagtcgcgcaagtcgcacgccgccgacaccctcgacgtctcgcttaccgagccgctgatccaatacgcccgcgaatatgccgccatgcacgatgtcgatcatttcgtcttcgggcatatgcacttcccgcgcgacttccgcgaagggaatctgcatgtgataaacctcggctgctgggaacagtatccctcttatgccgttttggacgcgtcgggcgaaatgacgctgaggaggctcgaagcgttccgttagtgcgggggcgcgggacggcccgctgctccgcgcggaagaaatgtctatttgagcggaaaaaaatgtctattaaagaagaacgatgaaacaatacctcgatctgctgcgcaggatcaagaccgaaggcgtcgtgcgcggcgaccgtaccggcaccggtaccaaaggcgtcttcggacaccagatgcgcttcgatctggcggagggctttcccctgctgacgaccaaaaaagtatttctgaagggcgtgatccacgaactgctctggttcttggccggcgataccaatataaaatacctcgtggacaacggggtgcatatctgggataacgatgcattccgctattacaacgagctttgcgtgcgccacggcgtgctgcctgtcgaccgcgacacgtttctgcgggcggcgcaggagggagtcgaatcgccggtcgaagggtataaattcggcgatctgaaccacgtttacggctatcagtggcgcagctggcccaagcccgacggcaccgtcgtcgatcagatcgcgcaggcggtcgggcttatcaggagcaatcccgaatcgcggcgcattctcgtctccgcatggaacgtcgccgaggtggaggatatggccctgccgccgtgccatgtgctgttccagttctacgtggccgaaggaaaactctcgtgccagctttaccagcgcagtgccgatacgtttctgggcgtgccgttcaatatcgcctcctatgccctgctgacgttgatgacggcgcaggtctgcggcctgcagcccggtgaattcgtccatacgctcggcgacacgcacctctatctgaaccatctggagcaggtggacgagcagcttgcgcgcgaaccccgtccgctgcccgtaatgcggctcaatcctgccgtgaagtcgctcttcgacttccgctacggggatttcacgctcgaaggctacgatccgtggccggcgatcaaggcgccgatgtcgttctgaatcgtttcgctcccggcaggggcggcgaatcacttgcgcgctgctccgccggaaccgaaaaacaacaggcgtccctgcaaaggggacgcctgttttcgctgactgtttcgctgaccgttatttccggacgatgctgattttccccggcttcttgtagcggttgttttcgatgacgacctgctgcgagctgcggatgtcgatcgtcgggaggtcgttgtagggcttgtacttctccgataattcgatggtgttgtctctgaaaatcagtcctccgacggatttcgcccggagcagctgctcgttgaaggtccggaacagattgccttcgatggtgatgttgcgttcgtagggatggtccggaacctcttttttctggtgcgggttgatgaagatcgtcgggaaatcggcgccgccgtatgtgccgtcgagaaacctgttgttgcggatcgtcacgtcgcgcacggctcccgattcgtaccagtggtccatgtccccctcgaacagaatggcggacatcatggacgagaaggtgttgccctcgacgacgactttccggggcgtgctgaccagaatgcttctcgcccggttgttgcgcacgacgttgttccggaagatcagttccgggtaccacgacatgttttccagcccgtcgccgaccgtgagtcggccttcgacgggagcggtgaacgtcagccggatgtaatgggcgttgatgcgttccgattttttcacccgcagggtgtgtttcgtaagcagggtctctgcgtccaccacgtcgatttcgtcgccctttccggcaaactcatatccggcctgctgggggtggttgatgcggacgatgacctgatcgggcgccgtgatgccggtcacgcggacgtaggagccgtgtacgttggtcgcatcgtcgagcatgttctcgaaaacgcactcttcgatcaggacggttccccggcagttgcagaagtgcgtggcgtccgccgtggtcgttatcatccgggggcttcccttccgcaggaccacctgcagcctgcggacggtgacgttgtctgtcttttcggcgatcagtcccatgccgccgcagtggtggatggttacgtcctcgaccagaacgccggacgacgcggtcgcgtggatggcgggcgaatgccggttctgggtaaagacgcctttgaacgtcaggatcgttccgacgggcggcagggcgcgcacgaaccgggtgtggagttcatagcggccgggagccgtcggtgtaacccgtatgtcgaagttgtccggcttggggatgtagtaatcgtcgctgcggtaggcggtggccatggtaccgggatcgaaaacgatgttttcgcccggaatacgctcttcccagccttccgcccgcatgatgagcttgccgttctcgaccgcatggccgaactcgtccggaatctcgatctcgatacgctgcgtctccgcatccgcggccgtcaccttcgcctccagcgtgaagggaacctcccagtctacggtgaaattgcgcagcgtcacgccgtgcgagtcctcgatcagaaacgggatgatccggccgtggaaaatgaattccgcgccgccgccgtcgatctcaatattccgccgtcccgtcagcgggaatgcgaaatgccggtatccgttgtcgtggttggtgatgcagtggtattttccggcggcgaattccggccggaaatggtaggtgccttgggggaataccagttttaccggtttgtctgcaggaaggctttcgagcagggtgtagacgaacggggtcatgtcctgcgtgtcgtaccggcctttgtagtccgcgatgtcgattaccccggttcgggcggatgccgtaccgcagaccatactcacgaggagtatgaccgttcccaagcgtggtttcatgcgcatggctatttctttatgttgttcttttcccagaccggcgcacccgtgtcggcgccgtaccgctctccgtggctgcgcgtcagctcttttgagttttcgacctcgttgtccgacattttcagcccgtcgaccgacgtgacgacgattgccgggcaggggcagtcggtcaccttgttcttctggacggtgatgttcatgaatgcgcccggatccgcgactttcgcgtcgcccgtgatgtagaagagcgacaatgctccgggaggcatgcgcggattgccgcgttcgaacatgcactcctcgatcgtattgccgacgatctgcacgttcgaggagaagcctcctcccatccattcgatttcgggcgacatgaggattccctgcatggcgcatccggttatcctgttcgacgccaccactccgtcgatacccttgatcaggattccgcgcgagcgtacgtggcccacttcgttgtctttgacgaggaatccgctgccgacggcgtcggcgttgaaaaccacgtcgccggggccgatttcgaacggcatctgcttcaccttgagccggaatccgagcttgtaggaggcttttgacagcagcgagggataacccgtcgtcacggcgttgcgctgctcttcggtcgggtcgaagcggccgaccgaaaccagccggagttcgcctttgcgtttcccgtcgtaaccgaccacgaccagtctgtcgccgcgccggaatacggggtgggtttcgcgcgtcaccaagtcgatcgtacccttcgcggcgtcggccgatccgaccgggaacgagcgtccgcagacgatgatgcagtcatcgccgttgtggcctaccttgcaccccgtgacggtcgggcctttccgtgcctgactgctgtgtatgccgtcggcgttgcccgaacgcaggcggggcctgatgccctgcggcatggggccgcggtcgacgacgcagtttctgtactcgttggcgtagccctccttctcgaaaaacgagaaggtgttggacccgtataccgtgacgttttcgagtttggtgttgtagcacttgttgagcatgacggtatggacgccggcgttcggcttgtcggtcttgacgtccatgaccaccagatctccgacttgctcgcctgcgctccacgttccgtttttgacggcccggaagaggttgtgaccgagctgcttgagtgcggagtagttgctcgtgtaggtggtgatgctgttgcgcttgagcaggcgtgtctgcggatcgtagaactgcacgcggttggcggccagaccggttacgggatacccctcgtcgatccggacgtcgaaccagcttccgtcttcggccacggccgtaatctcgccctgcgtaaagcagagcgggtcgtagtcgatggtcaggtcgcgcagctccacccgcacgcagttgtaaaagctgaacgcctgctcctgattgttgcagatgaccgtcgatccgttgccgttgatgtggacgtcggtcaggttgtggaacttgtacggcccgttgctgcgcacgtcgagcgtgtaggtgcctttgggtatttcgatgaggttccggcctttctgccggtcgaggacctcgtgaagatcgggatgattctgcgccgccgcggatgccgcgagacatgcggcagcgcagaaaacagtcagttttttcatctgaatagggttcgttgtcggagttcgtcggcaggaatcgtcagatcgtctgcgtgtaccccggattctggctcaggtttttgttcacttcgcgttcgcgcttgggcaccggcatccagatcttgtacggtttgtagttgttcttgatcggctccatctgcggggcgaagtagtagtatttgttgccggcgtcgttgacggttttcatgttgccgatgacttccgtcattttgcccgtgcggatcaggtcgatgcgtcgccacccctcgacgcagagttcgcgcgaacgttcgtcgagcagctcttccatgaagtcggtcttgtagtaggccgaattcatggcgttgagcgccgattcgtccagtttgccgtccgtatcggtgcaggcgcgttcgcgcacctcctcgaccagttcgcgcgcaagggattcgtcgcccgtcttgtaaagcgcttcggcgtacagcagaacgatgtcggcgaagcggagcatcgggaagtcgatgttgcttgcccacgtcggaatgccctgcgacgttctgaccgcggggtccgattggcggaatttgccgtggcagaggttggcgcccgatgcgtaaagcgccacgggactgaagtatttggctccgttgattgtcgtgtagtcggtgacgttgttgcccagactgccgcagaggttccagcccatgcggctgtcctcggtcacgtatttgtcagacagctcgcccgtcgggcgtatccagccgtaaccgcctccgttggtgccgacgttgccctgcggcccggcccagtaggcgaagaggaaatattcgttcgagccgcccgctccggtctgtacgaccatcatgcactcctctttctgactgcttttggtgtcggccagaaagttgtagtggtagggcttgatgagcttgtagccgctgtgtgcgtaaatatcttcggcgatggccgcggcttttttccagcacgcttcggcatcgacccagtcgaaactgttggtcggcgagccgagttcccgccccacgcggttctccttgcaggaggccagataggtatacatcttgagcagatagccgcccgcggtccatttgttgacgcggccgtttacgttcgaattgcggtcgggaagctccttgtaggctttgtcgaggtcttcctcgatgcaggcgtaaaccttgtcgagcggttcgcgcggagcctcggccgacgagttgggcgtattgggcaggggcacttcgccccagagccacgcctgatagagccggtaaaggccgcgcagcagcttcgcttcgttgacgatctcgtcgcggcgtttgggatccatgtcgatggccggcactttctggatgatgtggttggcccggtcgatgccgacgaagagtccgaaccatgccatcgagacgaaatcggcctcttcgttgtaaccgcagctggcgatgatctgatggtgcgggtcgctgatgccgttgggagcgatctcgtcgccgagcatcatcaggtagtgcatgccgcgtccccagaggggctggttgccggttccctgaatcgcacctgcgttgagtatgtcgtatacgcccgtgagggccagttccgcatttgcggcggtggtgtagaggtcgtcgcccgaaacgaacgaataggtcttctcgtcgaggaaactggtgcagcccgccgtcgccgtgcagagcaggagcgcagccgtgtattttagtgctttcgaatagaacgttttcatattcatatcgctgttttagtatttgattgaaactccgaagaatacggaccgtgcgcgcgggtagttggtgtagtctagtccgggaatcaggcggttccagaacgacacttccgggtcgtagcccgaatagcccgtgcaggtgaagaggttttcggccgtgacgtagacccgcaggtgggagagtccgattttccgcgtgatgtgcgtgggcagcgtatagcccaccgtcaggtttttcaggcggaggtaggagccgtcctcgacgtagtagctcgacatttcggtcttgccctcgccgttgagcgacggatacctgttgcccggacgctcctccgtccagcggttgcgccagtagtccgtcgagacgttgttgtagcccacgaaaccctcgtagcggtagcggccgatgttgatgatgtcgttgccgtaggaccactggaacatgaagctgaggtcgaaattcttgaacgtaaagctgttggtcatgccgccgaagtgcttcgggtcgctgttcgcaatgaccgttttgtcgttgttcgggtcaatgacgttgtcgttgcccgcgatgtccttgaacttcatgtcgcccggcttcacggtgattcccgcgaacgacggcacgccctctttcaggttgccccgctcgtcgaagtcggattgctggtaaatgccgtcgaagacgtatccccagcccgaaccgatcgggtgtcccaccatgacgcggcctacttcggtgatatgtccgccggcgaccttgaccgggatcgagctgacgtcgcccagcgatacgaccttgttgcggttgaggttgaagttcaggctcgtcgaccatgtgaagttgcgtttctggatgttgaccgtgttgatcgtaagctcgaaacccttgttgtccacctgcccgatgttctgccactgacggtaggagccgatctggctgggaacgtcggcatgcaggagcatgtccttggtctttttgtagtaaacgtcggcctcgatgctcagacggttgcggaacatgctgatgtccagacctccgttgagctggtaggtcgtctcccacttgaggtcgggattcgatatctccgaaggagacaggcccagctgcacggagttgttgtcgcccgaatagtaggtcttgtcggtacggctcagcgactgataggccggaatgcggtcgttacccgtcacgccgtagctgagccgcagtttcatgtcgctgaaaatcttctgctgcttcatgaactcctccttgccgatgctccatgcgaaggcggccgaggggaagtagccgtacttgttgttcttgccgaatttggacgaaccgtcgcggcggatcgaagccgtgaagatatacttttcggcgagggtgtaattcaggcgcaggaattccgattcggaggtgttgcgttcgcggttggtctgtacgttttcggggaatacggaaccctgaccgatgtcgaacgccccgttgaagctctggttttcgaatccttcggcgcgggtgctgagacgcgtggcggtgtagccgcgcagttcgaatcccagtacggcattgaaatagtgcttgccgcgcgagatggcgtaggtcagcgtgttggaggtctgccacgattcggcgccgctttccgctacgacggccatgccgtttttggagtacccccacgaggtggtcgagggataccactcctcggtcttcgaattcaggatcgtgccgccgccgctgatgcgcagcgtcaggttgttgaggatcttgtatttgaggtagaggtctccgatcgtacggttctgggtggaagccttgtaggagtcgttgatgaaggtgatggggttggtcagattgtagttttcggggttggaggcttcgtcatcgtcctcgctcaggaagatcggcttgtagaggacgaagctctgcaccagtccgttgtacgagttggcgcccgcattggtgacggctcccttggtcacgatgtgggagaagttgatcgtaccgccgatggtgaaccgcttgctgaggtcgctgtcgaaacggatgcggcccgtgaaacgttccatctggttcttcttgacgatgccctcctgattgaggtagcctgccgaagcggccaccttggtcttcgcgctgccgcccgaagcgacgccgatgttgtagctctggatgatacccgtgcgcatgacctcctcctgccagttgcggctggggtagtcggagaagtccctcacccggtcgggcaggccgtcgccgttggtgtcgatgccccacgcatcgctggtcgggaacttggcgaaacggtagtccgcgaactcctgtccctgaagcacgtcgatcgtattcgacatccgggccagaccgacgctcatgtcgaaatcgacggaggccttttcgccgcgcccgctcttggtggtgatgatcacgacgccgttggctccgcgcgatccgtaaatggccgtcgccgacgcatccttgaggacggtgatcgactcgatgtccgacgggttgatgcccgccagcggattgtagcgcacgttggccgaagtgtagctgctcgtggctacttcgtcggcgttgacgtcgatctgcacgtcgtcgatgatatacagcggctgcgttcctgcgttgatcgagttgccgccgcggatcgtaatgtcgatgcccgcgccgggttcgcccgaactggagctgacctgcacgcctgccatgcggccttggagcgcatccataaagctcgtgcccttggatttggtgatctcggacgtgctcagcacgcccagcgagccggcgacgtttttcttctgggcgtcgccgtagccgatctgcacgacgacgttctcgatctgggtcacatcctgctgcagttcgacccgcagatcggtgttgctgccgaccatgatgttctgcggtaccatgccgataaacgagaaggtcaggacggactggtggtttttgacgcttatggcgaagcggcctttggtgtcggtcgtggttccgctggtggtcccctgctcgatcacgctcgcgccggccatcggttcgccggtcgcggcgtccagcacggtgcccgttactcgaagctgggcatagacgctgccgcacgtaaacagggccgataatagtaaaagtagtacacttttcttcatggttatattcgggttggtttttactggatggtatgtcgtgggtccgatgcccccggagccgtcccggacacgggcggctccggagatgccggacacggaattatctcatttcggcggactccttgtcgagcggagtgtggcggatgcaccgcaccgagtaggcgttggcccgctggtagttgttcaggtatacgctggtgccgttgagcatgatgaaacgcgccgcattggtgaagatgttgcctgcgccggcgatgatgggcatgttcgtccagtagacgccgcggcctcccgatacggttcctccgacgacggcctgtcctgcccacggcatcttgagcgggctttgggcgaatacggcggccagatcggtcaccttgtaggaggtgtcgccgtagaccatcgtttcgagtccggtgacggctttggccatctcgatgaattcgttcaccgtcggtacgcggtagcccggagggcaggggttgttgtcctgcgtggcggcatcgagcggcgccgcatacgtcttgtcctcgaagcggccgccccagagtccgtcccggttcgacgtgtcgtcgcgcgcccagtcgtggggttccttgttggtcggcatgaaaccttcccggcccgactcccggcggtcggcggtgggggtgttcagcggtgcgagggcgttgacgaacgaacctgccgtgggcgatgtccatttggttttttcgtgtccgtcggccttgcgcgaccactggaagagcgatccgaaggccgtgtggtcgttggatgcggcggcgacgctcttcgcgccgagattgcggtcgagccatgtctgttccgtatcctgcccgttctcgtccttgacggtgatgttcacggggaagtagatgatcttgtaatagtcgtcggccgaatcgtagttgcggtcctttacgccgatcacggtcacttcgcaccgggcggttttatttccgccgtcggtggacgagacgcggatggtcgttttgccgtgcgatacgggaaccagcactccgtcgtcgtcgattccggcgacgagcggatcgtcggaggtccacttgagctttttgttcgtggcgttctccggcaggatcaccggggcgaaccggaaggctccgacacccggatcggccgcgaagtcgaatatcttggacgtggcgtcgagcgtcaggctttcgatgggaatgctgttgtccacgtcgtcgatcgtgagacggatcgcgtcgttgacgtgcatgtcgttggcttcggccgtgagcgtcacttcgccgaaagccagcgccgtgaccagaccgctcttgtcgacggtggccacgttggtattggagctgtaccaagcgattctccggttggtggcgtccgccggttcgatcgtgaccgaaagctggtacgtcttgccggggttgaggtgcagttcccgaacgtcgatgcttactttctcgacatggacgaatgtctcctcgtcgtctttgcagccggagtggacggcagcgacggcggcgatcagaaaagcgtaaagaagttttttcatattttagggtttgtttgttggttgcatgcggcggataaatcgcctgatcctgtaagcaaaattatcaggatgaatattttttggcccccgtgtcgtgaaataaattagcgggaacggtttcgggaacggtttgattggccgggagcgttcccgaaaaagtcccaaaaaggaagaaaaccgccctgaaaaaactttttcaggacggaattgaggctgattctgctattctggggatgcttctcccgcttcgccgaatgtgcgtgccgctattgctgcggccttacgtcggtggattcgcggatgttgatccgtgcgtcgagtaccaccgtgcggtccggagcgtcgggattcttgatcttttccagcagcaggttggccgccgtttcgccgatcaggtcgaggggctgggccacggaactcagctgcggttcggtcagcagggccgactgcgactccgagaagcccatcacggcgatctgttccggaatgcggtaaccccgttttttgatcgccttgagcgccccgatggcgagctggtcgttgaaacagaacaccgcgtcgggaatgcggtcgccgtcgagtatcgcgttcatggtctcgaagccgcattcgcgggagatgtccctgcattggacgaaggtatcgggcgcggggtcgatgccgtgtttgctgagcgcctgcttgtaaccttggtggcgtgtggccgagttgaaaatccctttcggtcccatcaggtgcagcggccgggtgcgctttgtcccgttggcgtagagaacgtgctccacggcgaagaacgccatccggaaatcgtcgatgaccactttgctggcttcgacctcgttgctcggacggttgaagaagacgatcgggattccgttgtcgatcagtctccggtaatattcgtcgttacggtccttctcggtgacggagaggatgatgccctccaccatgctgttttccagcagatgcagattcttgagctcgatctctgcggattcgcccgactgggtgatcaggacgttgaatccctccttctcgaagaccttctgtatctggatgatgatgcgcgggaaaaacgaattgacgaattcgggtacgacgacgccgatgaccttcgagcgtctgcgtatcaggttctgggcgtacggattaggccggtagttcatcttttcggccatttcgagcaccagccgtttggtctccggcttgacgtcggagtgatcggccaaagcgcgtgaaacagtggatttggatatgcccagagcttgggcgagatcctttatcgtagcatgttttatcatttccagctttttcacgcaaaatagtattttttttacagtttacaaaaaataaaagattcccgcttcccggaagattattcgagcacgacgataaatcccccgttctccggcaactgcatgacgaggggttccggcgccggcagcgcgacttcggccgtctgcagcgaaccgttcgccgcgtcgcggacgatctgcgcctttcgggccgtcgcggggatcaatccggcgggaatcgtcaccgtggcgggagcggtgttcacaccggctatgtaccacgtgccgcccttgcggcgggcgatgacggccagccgcccgatttcgctttgcggcagtacgaccgtttcgtcccataccgtcggcaggcggcggatgatgtcgagcgccgggcggtaacgctcgtcgccggagaggacgaacggattttcggcgatcgtcagcagcggtgagtcgagcagcagcgcgaacgccagctggtgggcggccgtcgtgccgccgggcatagtgaacgcgaccggagtgtagtccgcggcgcccagtacgccgcgcgtgaagggcagggccgcattgtggctggccggaatgttctggttttcgtcgccggggatgtagcggtccggatcgggagtgcggccttcgtcccgcatccgcttttcgtagttggccgtgatgcggttgagttcgatgccccgtacgccctcgcgggtgatttcgttggggtaggtgcggatttcgcccgtcggcttctggcagccgtggagattgaccatcagcctgcgccgcgccgcgtttttgagcaggtgggtgttgaagtcgatctggcgtatgccttcgccgttcatgaagtccaccttgacgccctttatgcctatcgccgcgaccgagtccagaaagccgcgcatctggcggtagtcgtccgccggatcgttgagtttctcccaatggcgccatacgaacagccccacgccgcgggattgggcgtatccggccagctcgtgcaggaatttccatttgtcgggacgctcttcccacccgtcgtcgacggtgctgtactcgatgcccagcgacgctgcggtgtcgatcacccgcttttcgccttcgagggtcatgaagccgccgtcgatgccgctccaccaactccagagcgagcgtccggggacgatccacgacgtatcggcgaacagttccgggtcgggagcggggttgagactggtgatgatgtcggtatttaccagtgcgtcgaggtcgcgggcgatgatcgtgacgcgccacggggtgacgatgtcgcctgacagctcgaatccctcctgttcggtgaagtcggcccgcaggctggctccgggttccgcgcgcaaacgcatgccgctgtagtcgtacagcgcggcttcggcgatcatcacgtattcgtcgggggttcggtagagcagcggcatggtctgcaccggtccctgccgggagacgatgtgcaggctgtcggccgtcgtggatatccactctccggcataggtgagcagtttccacccggaattccgttcggcgaaccagactctgctctggtggggcggccgccattgggcagcttccccgttgacggtccgcgtgccgtctcccggcaggacgaaccggtaggcgaagccgtcgtcgtagagacgggtctggagccggtatttatagcccgaaggacggtgcgtcacgtcgaagaggtattcgttgcaccgcccttccgacacggctttgcgtcccgtgacggagtaggtctcgtcgattttccgcgtgcctgccgggcgcagggccgcatcgcggaacagctccgtgccgtcgacggttacgcccatggccgaggtgtcgatgaccgtgcggccgtcgtgggttacggtgtagtacaacccctccttgccggcgaatacctctgcccggatgttgcccgaagggcttttttgtgcggtgccgccgcagcctgcggacagaagggccatgaaggcgaaaaatgctgtttttctcacgttgcgttattttttaagttccagagtttcccattcgatgattcggccctgccgggtgagggcttttaccgttatttccgtccgctccccgtcgatgggtaccgtatgttcgaacggatagtcggtgtcttcggtcgtccgtccgtctacggtgaaccagactttccgcaactgcgtgtcgtcttgggtgagaaagacgaatacgttgtttgcggcccggccgaaaccgacccgcatgcagcgtacggcgtcgtcctgcgttgcggcgtaaggggtttgccagcgcgtctctgcggtgaagagcgcggcgagctgcggccggaccggggccggggtttcgatcctgaccgcggctatcccgtttcctgcgacgcggaccgtgaaacgtccgtcggcgagctggcccgatgcgccgctgccgcctatgacctgcgtcctgtagtgccttccgtcggaatgtccgctcagggcgtagtccagcgcgacgtccgtttcgacggtttcagcagactggttcatgaaaacgatatacagcgcgtcgtcgtcgacggccgaaatgtagttgagctgccggtcgtccggtgccgccagccccgtcggcatccacaaccgggcttcgcggccgtagattgtgccggggaggtgaccgtagaacctgctttgcaggtaggcgtatccttcgatgaattcacccggaaaatccacctttccgccgctccggtagagggcctgcgtgacgagaaaatcgtaaagcagcgatatgtgcggcatgatgtggttgtagtggaaggagttggcgcccagttccatgtggccccggagcggatagtccgccttttcgtatacggtcgttcgggccgtgttgatgtggtagcccggaaaattgcggtagcggcctatgacggcgtggtccgccgtgcgtgccagaaacccgtcgcccgtgtaatgcgccagccgcagcatccatgcggcgtagttggccatgaaaatcccccggtgtccggtgctcgttccggaggattccggggtaagcccgatctccgaaagccgccatgccggaacccgttcggcgggagcgtccatctgcgcatgtcctttcgacttgaggtattggtagtgcggggccttcccgtcgggattgactggaatatcgcagtccgggacggcgggggagtaccagacgtactgcgtgtagagtttcgccccgcggtgggcggcgcggaggtaggtcttgtcgcccgtcagttcgtacatttcgagcaggtcgatccatttcggggcgaatcccgtccagaagaagaatcccccggcttccgggtcgcggaaatcggcggccggcgtgtcgatgcgccggcggatgtaacggtcggcccccgcgacggcttttttcaggtatccggtctctccggtggcccggtaaaggtgcatggcgtttctccatgtgccgccctgctcgacgacgtccagattgcgcacgcgcgtggagtggtactcttttccggcgaaggagagcaggtaaggcgcattgtccttgaggatgctgctgagcgccgtcagttccgagaccgggcagcaggggccgttcatgcgccgcgaagggtactggatgttctgcgtcgaatcggcgcagaagagcagcttctcgcgcgaaagcacgtattcgtataccggaagcgccctttcgagaagcatcgtccggttgtcgttcaggacggcgatttccagcggattgagactcgaaacgtttttcaccgcgcccggaacgtccgtcgcataggtgcagcccttttccttgtccagaaaacggctgtaggggccgagtacgtaggagatcatgttttcgatcgtctcgttgagcgaaccgagcgcattgttccggttgcctgtgaagccgaacagacgctctgcgacattttggagcgcatccgtggtgtcgccccgctctccgcagagcagtgcggaaaagacgagttccccgcccggagctgtttcggagccgatgccgcccggaaccggggcgaacagcatcggcgagaccaatccctgccggtcgcgcacggcgacgccgaaacggctgttggcggccgtcggcagcggatcgaacgggaattcggcggggtgggccagaatgccgtatgtcgcgttgcggtaggtgacgaatgccgaagggacgggacaccggaacgcgagcgtgaggtaacttttgtcggggaaccgtttctcctgccagatcagcggctgccagatttcgtcggtccgtttcgggtctctccccgcaaaaccggtgaatccgaccgaataccagcctccggttttcgccgtgaggcggtaggtgagcaggggccggcctgtcgtggtgtcggccgtcagctccgccgcgatgcggaaaaggtcgttttcggggtagccgaaggtgatcttgtctgttccttccgcacggtggaagacggggcggacgacgatgatgcgctctgcgttgaagaggtcggccgtccgcgattcgacggagccttcgaggatttcatcgtcgaagccgtcgcccgactgatcggctttgcggtccgtacggttcaggtccgggcggtcgctgagccatgtagccacgttgtactgaacgtcggggatgtccgccggacgcattctcagctgcgggtccgcagccgaaaagaggaccgtgaattccggcaggtagtcgggcaggaggtgctgcccgccgaacacgaccgtatggtcgggtttcaccctgaattcctgcgcctgcgccgggcggcacgctcccgccgcggccagtatgatcagcagtatgcggccggtctttgtcatggttcgaggtcgaatttcagggtctgtattccgtagcccggcagggtgatgccgaacgctccgtcgccgccgggcgtgattttgcgtccggttgcggaatcgtcggccgaagcggtgccgatgcgcctgccggcgatggccgcggggtgtaccgtcagcgccgtatgctggggccgtggcgtgctgttcatcaggatcaggaatagcctgttccggtccgtcgtcagggccgaaagaatttcgatgtcggtattgtctgcctcgaacagccctttgaccatgattggattcgcctgctcgccgtatacggttcccggttcgaagccgaagatgcgctgcggaccgactttcggggtcatgaaaccgcgggggaacgagattcggcggccgctccgcatttcggcttcggcgaagacgtaatcggcgatccaccccagctgccaccacgcatggtgcgggaagggaccgggaccccggtcgaactggctccagtaataggtcgccatgtgcgtgtccggtgcgaggtgcgcttcgcgcgccgtagccgcagcccgcgcgaggtcgaggaagagccggtctgcggtctcttcgtacagtcttacgaacatgccgcagtggctggtgagcaggatcgggccgctcttgaccgccgacccggcgcagccgccgtgctcgaagcagagaccgacctgactgatctgccattcctgcattttccgccctttgtactcgatttcacggttgcccggcgtcggatgcgtgtagatcgacgtggcgtacatccgggccgtgcggagtgcggcgtcgcggtatcgggtctctccggtcaggccgtgcatgtcgagcagggcctgcgcggcctgtcccgtggcgaagtcgttgatgaagcgcgcgtcgccgcagaccccggtgaaagcccccttgtccacggcgttgcggacgaaccagtcggcgccccgcaccgcggcgtcgaggtatttgcgttcgccgagcagcttataggcgacgacgaagccgtaaaacgtgggccggaggtctttcaggtcggtgaacagcggtttcccgtcgtgtttgccgtaggccacggcaaaaccgccgtcggcctgctgcagtgacagcagccgttcggctccggcccggaaactgctgagcagcagcgagtcgtcccgttcgaagagcaggatgttgcccaagtccatgagcgtatagtacgtgatgccgatcggttcgatatggtcgccccactcttcgacgaacttttgctttttccacaggtaatactgtcccatggccgcgccgtggttgggatcgccggccggggcctgctgcatcagtttgaagttgcgcatgtagggaagccgctcttcggtaagccgcggatcgccggtcattgaggcgagcatccacgatgcgccgatgtcggaatttttcatggcgtcgcggtcggcttcgacgactccgcccagatagtcctgcgctccgatggtcagccccttgtagtcggcggtccgccagaaggagagcgagtcgtcgagaatgtagtcccagatcgcttccatgcgcttgtagagcgggagggtcgtatgtttgagcgcgagggagttgcccagaccgtaaatgtcgtaaacggcgtgtttgtgcgcttcgtaccaccccttgtccgtcatgctgacgcggaatccgaaccggacggagtctcccgcctgcttttcggacccctcctgtccgagtaccggataatagagcgtcggggagagttctccctgccggttcatgtgcgaaaggccgcaccgccacgagatgccgtgcgtgcgcttgtcgccgctgtattcggaacgcgggtagccgttgtcgggaatcagcgccagcgtattgcccgctttttcggtcatggacgtgatcatcgtggtgaccgtattgtcgttgcatatgaccggcaggtggggcagtccctgtccgtacatgtaggcgaggtggaatacgggctggatgtagtcgccttggaaaaagcccggaacgacgctccagccgagccgctcttcgggaagtacggccagcgtgggcgtgcttaccgaatagtaccccttgcgcgccgggtagaacacgctttcgatgcgtatgtccgccggataatccgggtcgggactccatgtcgtgcgcaggcggcccagttcgttgcgggcttcgaagcagacggtgcgcccctctttccagcctttttcggggtagaagcgcagcgcttcgcccgcgcggttcatcggcacggaagagaccgccttgttgaaatccttggcgatgtagtggaaccgcgcgatgtcgaagttcatggtgtcgccgccgcggttggtgatcgtttccggttccgccgagggcttttcgctgctgaagagtatcgtatacgctccgtcgggcactccccagcagcggcctttgcggtcggcgacccgtgagattttccatccttccgcggtctgcttccagcggatttccagttctttgtttctgacggccagttcgtcggagggcgtgcaggcggccgacagcagcaggacgaatgcggagaatattttgaagtgcggtttcatggtttcggtttccggttcgaagttatgcaatttattcgacaatgatccccatcagggccttgtgccttccgggggcggagtcttccggccagaagcgtatcgagcgcagtgtgtgcggggcgtccaatgcaatcgtattgcagctctggtggttgccttccgtgcggaacaggaggttcccgtcgccgtcggtaatgcggtagttgcggatgcactggggcatcaccgaatcgaaatgctccatttgcacgttctccagtgcgtggtcgaaatcggtgtcgaagaacagcctgatttgccggacggtccgttcttcgcccaagtcgatgcggaccgacggcgttcggtcgtcgggggccgggatccagccgttgggctgtatgtagggccggaagtagccgttgaggaggttttcagccccgaagcaggtcagcggcgcggagaattcgagcgcgatgtttttcccttcgggacggcgctttgggcaccagaattcgaacgtatcgaccccgatgtcctccggcggagtctgcctgccgaaattggagaccgcgggattgacggtgttgaataccgaagtcaggccggagacgatctccgaactcatcggaatgcttacgtcgggattggccatgaagcagatgaagacgtactgcggcgcttcgtagcgcattccgaaatcgacggtcagtctgttttctccctcccggaggtcgaaaacgagccgcttgtcggttgtgtccggggtgtagttgcccctgcgcgacgaactgcgcagttcgaccgtcagccgggtcgccttgtccgcttgcacggtgagaccgacggccggaaccgggccgccgaccgggataagctcggcggcggagcagtccagccggaagcgggtgccgtcggggcgcagccgttcgagcgcaaactcgctggatgcgctgatccgggccttcgggggcagcatgccgcggccgaaccgttcgcccggcaggaagtgtccggtgcggagcagtgcggactgcagctgacccatacgctccctgccgataaggtcggccggtttgaggtggtcgcgcagggcgattgcggccgccatgccgatcgcctgcccgccgtgtgcggcggtgcacatgacgcgcgtggagccgttggccacatggctgacgctgatgatgcggcccccgatgaagaggttgtccgcatcgggcgtcaccagacagcggtagggaatctggtagatgcccttgctgtgccactggttgcaggcgcgccctgcgccgtaaacgccgtcggcggggtgcaggtcgatcgaccagccgccgaacgaaacggcgtcgtagtgctcgtgctgttcgatgatgtcctgctgggtcagcatgtagtagcccttgaaccgccggctttcgcgtttgccggggaaaagcccgacccattcgagcgtgtagttctccgtctccgggtacttgcccgaatttttgatgtgattccagacgccgtagacgattttccagagttcgaatttgattttttcggtatcccggatcgtgtccagccgtccgccgtactccagccaccagtatttgcagccgtgctgcgaggtgctgaaatactccggattccggagccggggaatcagctcctcgacctccttcagggcgaattcgggagcttcgaagcgtacgggacgccccgtgtccttgatgtagaacaggatgctgtgccccagcagctcgccgtatcgggtcttgtcgggcgcgaacttctcgccgtattcttcgcggtcctcggctcccatgcggtattcggctcccgccatgtaggcgagtgcgccgtcgcccgaacagtcggcgaaaagatcgccttcgatcgtgtggtgcgttccggtctgcggattgaacgccgtgaccgatctgacggtgcggccggacatttcggcgtcgtatacgcacgtgttgaggtaaagcgtgatgttcggttcggagagcaccttgtcgatgagcaccatgtcgaacagcacgggattgccttcccggttgcggaaggtgttctcgaccagtatttcgtcgatgacgcccccttcgcgcgaccagcggttgttgttgcccatgtgcgaggtcgctcccagcgcccacaggcggacttcgctcgaagcgttgccgcccagcacgggacggtcctgaatcagcgcgacgtcggcgcccgcacgggccgcggtaatggcgcagcatacgccggtaaggcctcctcccacgatcaccagactgtgacggctgtgtactttcgccggtttgcggcttttttcgaattcaccgataaacatatgttatttgttttttgtcgtgaggaaaatcaggccgcccaataccgtcaggacgatacccgtcgtgaggggaacgagggtctccccgccggacaggagcgcgatcagggagatgaaacagcccgaaatcgccgctccggcgccgatgatgcggatgctgttgttgttatccgtgccggcgtcctcggcggcgggcgccgctgcgttctctgccgcaggcatcggaacgcagacgcgcgagccggagagtttgtgatagatttcatagccggccagcagcagcgcggggaagagcaccccgaccagcatctcttcggcccggctgagcgagaagccgacggccgcaggcatgatgaatttgagaacggcgttgacggtcagactggtgacggtcgtgctgaggatcgccctgccgttcaggttcttggagaagaggctccagatcagcggcaggtagaggggcactccggtgagtgccgccacgctgattacgacgttgacgatgccgcccatgttggggatgagcagcgccacggcgatggccagcaccccgaagccgagcgtggagatgcgggcgactttcatcagcgtcgtctctccggcggcggggcggaggcgtttgaagatatcgttggtgaagacgcctgccgagatgttcagcgtggcgttcagcgaacttgcggtcgcgaagatcatgccgccgagcatgagtccgagcatgccggcgggcatcgtctgcttgcacatcagcaggtaggcgttttcgttttcaagccccgaaagtccgggttcgaagacgcggtagatcatcggcggcagcatccacaggatcggactgaaggtatacagcacgccgaacagcacgccgacctttttcgcgtctctgggcgtgcgcacgctcgtatatcgctggacataagcccagtttccgcccagaaagaagaggttgtagagcatgaacgcgacgatgaacacccagttgtattctcccgcgaagagcgtgaagaatccctccggaacccgtgcgaggaactccgggacgccgcccacttcgccgaatgcgagcggaatgacgatgatgaccgcggcgaagaggatgatgaattgcagcacgtcggtcacgaccacggcgcgaaggccgccgagcgagacgtatatcatgcagaacacgccgagtatcaggatgctggacgagagcggaatcccggcggccacttcgatgattttggcgatcggatagaggaaggagccggtggtgaagatcgagatgaaaaggaagatgtaggtgtaaagcttctgtgtcgaggctccgtagcggcgtgtgatgtattccgcggcggtgagacagcccgttttgttccagcgcggggcgataagcaggccgacggcgaatccggccgcggccatcgtgagctgtatggtgacggcgacgaagcccatcgagtaggcgatcgacccccataccacgaacgttccggccgagaagaagcccatgaacagcgacagtccgctgatccaccaagggacgttgccgcctccggcgaaaaaactcttcatgtttttgccggtcgaggagaacagcgaaccgacgaacatgatgcccgccgcgaagacggcgatggttatgtagtccagaatttccatagctcaggttgtagtttacgaacaaaaatagaatttgccggaagatattccgcacgatcggcgaataaaatcttcgggaacgatttcgggaacgattgcgattgccgggagcggttgcggagttgccggatgcgggggccgggcggggtttcggttcgcaggcggagccattgcgccgaaccgaattattgttatctttgcagggcggccggacgtctcaggcggactgcggcggcggatcgcattaataaatatatatggtaagcatcatcgtagccgtcgccgaaaacggcgtgatcggcgataagaacgccctgctgtggcatatttccgaagacctgaaatacttcaagtccgttacgtcgggccatcccgtcgtcatggggcgcaagacctacgagtcgctcggacggccgctgcccaaccggaccaatgtggtcgtcacgcggcaggagatggagattccgggatgcagggtggcccattcgctcgaagaggcggtggcgctgttcccggccgaagaggaggtcttcgtcatcggcggcgcacagatttatgcgcaggcccttccgctggccggccgcttctacctgacgcgggttttccatgcctacgagggcgatacgcattttcccgcatggaacgacgccgagtggcggctcgtgtcgtccgagtcgttcgcttcgggcgcgaattatccctatccctttgcgttcgagacctacgaacggcggcgaaattaggtatttataccactgcacggctcggccgtaatccctacctttgcagacgcaaaggtttttttatgcacatgccggacgctttttttcgcactgcgcggcggatgcaggcgactgccggaccggatgcgggaagcggtgcaaatccgccgggcagtccggaccgcatgcggcgattcggtgccggcggaagggcgaacgaacaaagaaaagagaaaaatggcaaaatatttcgacatgctgatggaggacgtgcggatgaaggagggccttcagtcgtgcatgaactgcggcgtctgcacgggcgtctgtccggctgccgagttctacaattacgatccccgtcagatcgtgaacatcgtgcagacacgcgacgacgacgccatcgaggagcttctgaagagcgatacgatctggtactgcggcgagtgcatgtcgtgccgtccgcgctgtccgcgcggcaacacgccgggctatgtgattcaggcgctgcggaccctttcgcagaagctggggttcttcgtcgagagcgaaaagggccgtcagcagctggcgctcaagcgtatcatcggcgagaacatcctccgcacgggttactgcatcgttccgcggctcgtcaaaccggaactgcaccccgaacagggaaccgtgtggcagtggatttacgataacgacaaggagatttacggtcagttcacgccggtctacatgcgccacggcgcgggtgcgctgcgccgtctggacgagaagtcgctcgacgagattcaccggattttcgaggtcagcggcggcaaggagatgttcgacgccatcgaggagcactccgaccgcaaggcccgcgaactgggttacgaagagggagccgatcagaagtacatgatggacgtcttcctcaataacagcaacgaacactattagcagatgataaaacgaaagagttggcaggattaccagaaggagattgccgacgaccactactattacgcccgcagctgtatccgccagaatttctttcccggcagcgagaagctgttcatcgacatgctgcgcaacgatctgggcaaggatctgacggacgatccgttgcactcgtcctgcacgggcatcggctaccactcggacatcgtgccgctcgaaacgatcatgacggtcgtggcgcggcagttcgcgctgatgaccgaagccgggtatgaaaacctcgtttcgtcgtgcatcacttcgttcggcgtctacacggagattctggccacatggcacgagttcccggagaccgaggcgaagacccgcgagaacctttacaaggccacggggcgcgaattcaaaaagcctgcgagtctggcccacacgtcggacgtcgtcttccacttccgcgagcagatcgccgcacgggccaaacaccggctggtcaatgcccagacgggcgaaccgctgaaggtcgtggagcatatcggctgccactacgccaagatattccccaaatcgggtatcggcggatcggaatttccctacgtgttggccggcatggtcgagtcgtggggcggcgagtgcgtggactatcccgaacggcggcattgctgcggcttcgggttccgcaactatctggtgcaggccaaccgcggctattcgatcgccaattcgcacaagaaactggagagcatggccccttacaagcccgatttcatcgtggccaactgtccggggtgcgcgatgttcctcgacaagtggcagtacacgatcgccgagatggaggggacgacttacggccagaacggccacgggattcccgtcctgacctacgaggagatggccgggctggtgctcggttacgatccttgggtgctgggcatgcagatgcatcaggtcgacgtcgaacccctgctggacaagatgggcgtcgagtacgaccccgcggccaaatacctcggccgcaacggaaaatatatcggtaaacctgcgtcggcggtggtgaactgctgcccgacggacacaatatacgacatcagagagtaatgaaacgagtggcagtcataggcggcggcgttgcgggcatgcaaacggccctgcgtctggcagaacagggcatcgaacctgtaatcatcgaaaaggaggccgaactgggcggcaaactccggggctggcacgtgctgttcccgtcgtttaccccggcgtcggagattctcaccgaactgcgccgccgcgtcgcggagcgcggtatcgaggtgctgacgcagaccgaagccgccgggtttactcgcgagggcgtgcggctgaccgacgggcgtacgatcgcgtgcgactcggtggtgttgtgttcgggattcacgctgttcgacgcgtcgatcaaggaggagtacggctacggcatctacgacaacgtctttacgacggtggacatcgagcggatgctcaacgaaggccgtgtggccaaggccgacggctcgcgtcccaagcgcatcgctttcctgcactgcgtgggttcgcgcgacgaaaaggtctgccagcagcactgttccaaggtgtgctgcattacgggcgtgaagcaggcgatggagatgaaacagctgtttcccgatgccgacgtcttcaatttctacatggacatccgcatgttcggccccggatacgaagagatgtaccgcgaggcgcagcagaaatacaacatccactttatccggggacgtatttcggaagccagcccgacgatcgacggccgcgtgcagatcaaggctgaggatacgctgacgggacgtccgctgcgcatgagcgtcgacatgctgattctgattgtcggcatgcgggccaacgacgacaacgccgtgctggccgaaggcgcgggcctgcaccgtgcgccgagcggtttcatggcgccgcgcgacatgttcttgggcaacgtgaagagcaacgtggagggcattttttacgccggaaccgtcacggcgccgaagaatatcggcgaatcgttgaacgaagcaacggccgctgccgacgccgcggcccgatatctgggagcatagcgtatggcggcgatcaatttcggatataccatctccaagccgcgggcgatcgacatcgaccgcaacaacctgcgcaagagcgacgaaatcctgcacgaaatgccggagctgcaggcctgcatcggttgcggggcctgcacggcggtctgcacggccggaaacctcacggagttcaatttccgcaaggttcacacgctcgtccgccgcggcgagtatcagggtgcctacgaggagatgaacaaatgcatgctctgcggcaaatgccggctggtgtgtccgcgcggtatcaatacgcgcggcgtggtcatgcttatcaaacgtaaactgggagacttctgacgatgacttttttcgcaccattctgcataccgttcatggtcggcgcggccgtgatgttcgtcgtactgctctggaagtggggttcgtggctctgccgactgccccgcgccgacaagaaacggattctgttcggactgccgacgcgccgcacgctggcggccgtgtgggaggtgatcagcgaatcgctgctgcaccgccgcatcttcaaggtcaatccgctgctgggctacatgcacatgagtctggctttcggctggttcctgctgatcgccgtggggtggatcgagaccatcgcttacctcggattccggtatgtgccgctgcagggacacgtctttttcaaatatttcgccacggggctggaacataagcccgtgttcgacttcctgatggacctgctgctgcttttcgtcctttcgggcgtggcgctggcttggggcaagcgcgtttactcgcgggcgatgggcatgcggcgtacgaccagacacgtgctgggcgaccgcgtggccctctcggcgttgtggttcgtcttcccggtgcgcctgattgccgagagcacgacctgcgccctttacggcggcgggggattcctgacgggggcggtcggcgcgtggatggcagagcacgtcagcacgctcgcgctgatgaatctcgaaagcgcggcatggtgggcctattccgcatgcctcggtattttcttcgtggcgttgcctttctcgcggtatatgcatatctttaccgagattcccctgatcttcctgcggcattacgaactccgctcgaccgaaaaggagggggcgttcgatcattttcaggtcgaagcatgctcgcgctgtggtatctgcatcgatccctgtcagttgcagagcgtgctgggaatcaatgacgtgcagtcggtctatttcctgcgcgaccgccgttaccggatgctgcggctggcgacggccgacaactgcctgatgtgcggccgctgcgccgagaagtgccccgtggacatagatctaaatacgctgcggctcaactcgcgcgatacgatgcgcaacgtgcccgacgagaagcgctacgactatttcaaagggttggaccgctcttcgggagagggcaaggtgggctatttcgcggggtgcatgaccctgcttacgccccgtacgatgtcggcgatggacaaggtgttccgcgccgcgggcgaagaggtgtggtgggccgaccgcgaagggggcgtctgctgcggccggccgctgaagctggccggcgagaccgattcggcgcgcaggatgatgcgctacaacaccgatctgttccgcaaacacggcatcacgacgctcgtgacctcgtgtccgatctgcctgaaggttttccgcgaggattacgaactggccggaatcgaggtgctgcaccattcggaatatatcctgcgtctgatccgggccggacggctggatgtcgtgcacggcccgacgcgcttcacctaccacgatccctgcgaactggggcgcggaagcggcatttacgacgagccgcgcgccgtgatcgaagcggtgggcgaactgctcgaacccgcgcagacgcgcgaaaacgctccctgctgcggttcctcggtcgccaatacggccatttccgacggtcagcaggtgcgtcttgcgcaggcggtggccgaagaactggaggccacgggcgccgaagtgatcgtgacggcctgcccgctctgcaagaaggccatcggccgcggcacgaggggcgaggtgcgcgacttggcggagatcgtcgccgccgggttgaaataagactgagttaggttagtgagtataagatgaaagcaaagaaaacgattttggataccatcggttctacgccgatggttcggatcaatgcgttgtcgcccaatccgaaagtgaagatattcgctaagctcgaagggttcaatccgacgggcagcatcaaggaccgcattgcggtcaagatgattgaaaccgccgagcgcgaaggccgtctgaccaaagggaagacgatcatcgaacctacgtcgggaaataccggcatcggactggctattgtcggcatcgtcaaaggctatcccgtggagatcgtgatgagcgaggccgtgtcgatcgaacgccgcaagatcatccgcgcatacggcggcacggtgcgtctgacgcctgccgccgaagggacggacggcgcgatccgtctggcccgcaaactcgtcgcggagaatcccgacaaatattttatgcccgaccagttcgccaatgccgccaattacttggcgcattacgaaaacacggcgctggagatctggcagcagacgggcggacagatcgactatcttgtctgcgcgatcggaacgtcggggaccctgatggggctgtcgcgctttctgaaagtgatgaatcccgcgatcaaggtggtttgcgcccagccgaccaaggggcactatattcagggtctcaagaatatggaggaggcgatcgtgcccgatatttacgacccctcgaagatcgacgtgcaggaattggtcgagagcgaggaggcgatcgacatggcccgcaggatcatctccgccgagggtatcttcgccgggatgagcagcggcgccgccatgctggccgccgtgcgcaccgcggcgcgtatcgaatcggggaatatcgtcgtcgtatttcccgaccgtgccgaaaagtacctcagcacgacgatgttccgggagttcgaggattgaggcccggcaagcgcgggcttggggccggtagattcggattccgggagctgttggagaacttccgggttgtgctggatgctgagaaacgaaaaaaaataattgttggcggctgataaatagcatgatagatcgtaaatgccgcattgtgcccggaaaaatttgtagaatccgaatttttgtcttatctttgcacacgcaaaagcgatagtacatcactaaagacatatcgcgggatggagcagttggcagctcgtcgggctcataacccgaaggtcggaggttcgagtcctcctcccgctacttaaaggccgataacgaactgaactttagttagttacggccttttttctataataaccgggacaattccgggacaaaatatttgtctgaattggcttgaaaatcaacattctacatttttgcgtcgggtcgctgaccgcgaaaatgtaaaaaaaatgttgtctgtaaaaactgcgcgaaattctgcgttaaacgagatcctctcgtacacctatccccgtttgcatacgggcgcttgctggtttatcagcttttacgctttcgacccggcaaagggcgaaatgcgtcgaaagcggataaaaatcaattccgtcgggacggccacccagaagcggcaatatgccgcgcaggtatgtcaccgattgtctgcaaagctggaagctggctggaatccttggatagaagcggatgccgatcgctcctacaaactattttctgacgcgctgattcattatcgaaattacatcaccaaactcttgaatgacggagtccaccgggcatcaacgcaccatgattatatctgttttgctcgcataatggaagaatggaatgataatcagcgggtgtctatacggtatgtttatcaattcgaccgggctttctgtgttcgttttctggactatgtctatattgaacgggaaaattcgccacgcacacgcaacaattatttggctttccttcggtcattcagcgcctttttggtgcaacatctgtatatcaaagaaaaaccgacggatgggttggtcagtattggcaaggcattgctcaagaaagaacgcaaggttattgccgtggatgatatgcaacgcctgcatgattggctccaagagaataaccgccacttccttttggtttgctactttctgcactacatgcttatccgtccgaaggagattgccaaactccggctgcgtgatatatccgtcagtaaacagacggtctatattgacgatacaatctcgaaaaacaagcgctcggcatgtgtcactataccccagaaaattatcgagttgatggtcgaacttggatattttgacgctccgggtacttactatatattttccaaggatttcagaccggggccggaatgggtaaacgaaaagacttaccgcgacttttggagccggaaaatccgtcctgctctccgctttcccaaagaatacaaattttatagtctgaaggataccggaattaccgcgatgctccgtgctgggtatgataccctttcggttaaagaacaggcgcggcactcgtctttattgatgactgatgtatatacaccgcaggatattcgggatgcaaatccgctcttattgaactatcaaggggttttgtagcaaaatccccaccgattgtcggtggggattcgtatgttcagggaaaaaatttccctgaacatcatttgaaatatttgttcttgagtgcgaccagcttatcccaataggtgacaatcaagccgtccatgtgatagtggtattccccggcatagttgggcacgcctccgagccgatttgccgacctttcggtgtaaaagtggtagtaattcgccgcgcggcagaaaaggttgtgcaggccgctcggaatcgcgaatacgggcaaccatagccagccccagcgccgcgactgtcggacgtggccgaactcatggtcgtagaccggttcccggtcgatgttccccggcgcgataaagacgtaccgcccaagcgtcatgcctccccggacatgcttcgtcgcatagaacacggccccgcgttgctcggtgattttcacgcggtcgaaacagaatgccaagtacgcaaggccgatcaggttctgcgggagctgccacaagtagagtagtaccgcccatgttgttttcagaaatttcttcatcggttccgttttttaagttcgatataatcggtgtatacgattcgtgtgtgcgggttcgacgacatgacctcctgccgtatcgctttggttccccagcggatgaagaggaagcgccgcggcacccgatgcacgacctgccgaagggtgtcgatgctctccacgcggcacgcgaccgagtcgcgctcgatcaacccttcgacagtcacccacggatctcgccagcggaatgtccgcatcgagtcgataatgaccgccccggccgaagtttcccggacgacggccgtgtcccggagcttcgcccgcagctctacgacggtcgccgtcgccgtcttggccgtcgattctacccggcggagcttgatgccgaggtcgcggatgctctcggcatccgccgcccggagccgctccagctccgagacgcggagattcagcaccatgttcgacgcggcggccttgcctgcctttgtccggtagatttcgacatcggacatcagcgcggtctggttcgactccaaccgacggcgttcgcgtttttccgagcggagccgcgcactctgcacccacaacaggccgcccgctataaacagggctatgagcaggaagcgtttcatgccttttcgagcgttttggagattttgagaatcagccccgcataatccgccggcttggccgtgcagtagccgcaggccgcaacccggtaggcgaactggtacacgtcgtccttgtacggcatcgcgggggcatagcgttcggtcagcaaaattcgggagtggtcggtcagacactccctgacagacgtataatctcggaaggcgcgatccacgacatatttgtagcgcccgtccggcatccgcgtaatggagtgtactttggggaatcggtggccctgcttgtcgtcgtcgaaatactcgaacgtccgcacgtatttcaccgccccgcgccacttcttcgtggcggttatgccgaacaggttgtgcccgatggcggacttcccccagccagtttcgagcgcggcctgcgcggccacgaagagcgggttcagcccggtttcctcgcaggaggccgcgatgtccggccagtaggttttcttaaattctttcggtgtcatgatcttggtcgcctttataattttatatgccgcggtcttcctattcgtccttttacattgaccacgagcgcctcgcggccaccagctgccgagataattttcgctccttttacaatatccgggatattgattgccgagccgacctgatagccgtcgcacatcaggagataagtggcggcaaaaccgtcttctgtttccactttctcaagggtgtaatttgctttcatggtagtatggtgtttgagtggtttttactcttcgtcgtaaatatccgggttcggcatgaattcggggccgggggcttgctcgcttctggccgggccgcgggggctgccggactgccgacctgccctctccatgtactccagcaccgcggccacgatgccctgcgtctcccggttcttcaacgccgaacccagcgcggccgccgcatccgcaatcttggccttttctttatcctcggacttctcatatacgctcttcagctcgatgaagccgatgaacatggcccccaataccgtcagaatcggaatcagcggcaggcggctcccggtctgctcgttgatctgccatacggtcagcatctgcaccgcgtcgatggccgttaccacgaaaatcaggttgaaatacttggcgatcttctcgacggtcttgcggtagccgagcgatgagcgcagctccccgcgtttgcgggctttccggatgcctgcccataggtcgaggaaaatcacgaacagtacgagcaggtaaacaatcgtgagaatgatgagctgcggacgtatcgccgcgaaaatatggtctatcatagttcagaaatttcaaaaaaatgacgagtaaggttaagtaaatccccagtgaatgagtcataatacaaccatctcccgcaaaggaatatttgttatcggtcacaccccgccaaaaaagttatacatgtactatcgttgccgtttcatcgtagtttcgggctattactctgaaataggcgcgtgccccctcggttcggtattgaggattacccgtaaacaatactactcctccgtaaaatgaaacctgcatcctgcgctttccggaaggctccaactttccgccgcggtcgcctatattggtgccgcgatgcagctcgaatttcccccccccacgaaaccgcggtcggcaatgcacacgacccacctttccaagaggtctgcaacggaaattatcggcatccagcccgcggcgtttaccttcgttgcgtcgaacggtacgggattgatccgtactgacgtccagtttacctcatcccgcgagaaggagtcctgtacgagcttgaaccccgcattcagaggacggttttgtgtctgcccggtttgaagattccggcggtatcgcttcttcgcgtttttgtagtgcaggatgcccacgaaacattgcttcagaatcggatttttcaagtccgtggcaggctttacgcagagcattccgccctgtactttccacgtaaccgccgggacggcttcggcattcatgggatagggtaattccgtccacttattcactccgtccccgatcttatgacgacccgtgtctgattcgtagacgacctcgccatcgagtagtaagggattggccgctttgagcgccgctgccgtatatttcgggtgttgtattcttccaatcataattgcatctgcttttctgcctgcgtcttgcattgctccgcgtattcgaagtatgctgcgaactcgtccggcttggtgtcgcgctggcggagaatcgccagttcatcggcgatcgagtactgctcgcggatcagcgtctgcactcgttcctcataggtcataaccggggatgtttcgacacattccgtcagaacggggcggccttgctcgtcctcggttatcatcttaccagcattctgcccgtcgatcagttcctcgaacctctcgttggtgatctctatggctccctcgatgggggtttcgtaaaatccttgcttccagtatttcatagcttcctgtattttatttccagcgtccgatcaccagccaatggacggtttcggtagaggatgcgagacctccgttcttgtcggtgaggttcgcccagcgcgattggtagcgtaaatattgggcggtcagttccacatacgacgcggctgtgatgacgttgccgttgccgtaataagccgtcagaaagcatccgaacggctttgcgatgaatgcaggactgaaatagtactgatacgccccgccgggggatatcccccattgaaacatcagcccgtccggtgctttgtagtaaccgttggatgagagcgcttttgtcagcgttacgttcgacaggtctttggcggccttatcgccccacgtctttttctcgctgtcggtcacgaaacggtgcgttgcgtccgtagtgatctgtgaagcgtgaatactgcctgccatttcaccatccgactcgtaggggagagacttccatgcggtaacaccgtcgccgattttccgcctgcgtgtgtcggattcgtacacgacttcgcctttgagaagcaccggatttgcggcggccagtgcggccgccgtaaacatcgggaattgaacccgcccggttatcttttcagtagctgccatagcgtcagttcattccggggatggtacactgaatgacgaacgtacttgccttgaactcgtcgatggccgcttttgccgctgcctctccggcacccttcgggtcgtaaaagttgtcgtatgacttcttcaagtcggccgccagtttcaacgacagcacggagtagttgagcttgattacgttcgactccgtcacttggatatactggtcgtcgcccgtgtagacatcgacgagatcctgcacgggcaggtactgcggggtgttgttgttctggaagaggaactcgatgtacttgtcgccgaccttggccccggagtaaggagaattggccgtcaccacggtcttgatggatgatccgcgcagcacctgatcgagcgggatgttgatcggcacgccgatacggctgccgttccgcgtgaggtagtaggtcgcggcgaacccgctaaccgtcggagctttctccgtgctgtattcgggcagggcatcttccatgacgatacgcccggtgtaaggtacggccgccacggttacggtgccgtcggacttgaacgtgatggaagcagtagcgaggaataccgtgcgaccgctgtcgtccgaagccatgcggatagtatcgattaatccggtaacggccgatgcggaaacctcggtgatggaaacgaatccgctcacagaatcttcgatctcctgcacggtgacattttgtgcgaccacaacgcattttttattcgcattgatcgccgcgacgatgttttttgcgacttgtccctgcgggttgagtcctccggtcggcgggttcaggtagccttcgtagttgaatgtaaacacgtccgctttctcattccaccctgttttttcggcatcggtcacgagccgatgcgttgcgtcggccgtgagctgggcaagagaggtgacattgccccagccgagcgccgaccatgtcttcgtgccgtcgccgaccttgtatttcagtggcgaactaccccggataagtccgtactcgccgtcgagcaggacgggattcgctgccgtccattcggcttcggtgcccgttacgaatttgatgcgggatttgagcaggatttcctgcaataccgctaaagtttgattttctgccatgatattgtgtatttaactgttgctcttcaggtcggccgggctgtatccgccgaggatcaggcggtcgttttttttgatgtagtcgcccgcggatgccactgcggggaatctatcgtatcgtttccttgttgcaacgccgtcggttctatttaccagatagtagatttggtaaattttgattgttccgtcttcctccgatgtttcgaatattcctgtaaataattgatagcccccgtctgctttttgaacttgaataatagattgttgggggagttctgccctttcttttatgtagatattcgccgtaatgcctttttcgagcttttccataatcttgaggcaggtggcaggatatgcagaactcgtgaggtcgataatatcgtatgaggcattgattatcgtggcaattatcgcctctccgtaggctgtctgcttaaaattgtctgatgggccaaaccaaaggaatagccctgttttggcggggaagcatatgctttttatctgatttaaaaaattatcatcggggattgtcaaggtgagttcccggcgaagctctcctttgcacatgcgcctgcgcgataacgggatgaatacttcgagcgagtattcatcaacctgacggcagtctttgtaaactccgtcaatgcgggacgctttgaagtgggttgctccatctgtaaaatagtcgatggtgaaatcgattcccgcgtccggaattgccgcttttacaagagtaccgtcactttgccgttcatagaatgtttctatgtaggtaaggtcggtaagtatgttccagcgtctatacgatgtcatggttcttgttttatgcaaaaatatttgattgctgtcgctgcggaaaggacaactttattcccgccgtattgatggaatttgccagaaatcggtcgggagttcaggttccggaagttctgcccggtcataataattggcttcatctttttctgacaaatggtatttgaaggtgtagctgtttagggcggcctctttgtgtttgacttcgtactccgtgacgattatttgtttccactccccgtctgcgtataggtagcgattgctggagtgcagaaactcctgccattgccgggctatgctgctcgaactgatgtaacctgtgttttgctgccagattgatgtgtaatcgttgcttaattccgcttcgcggccttgattgatgaacgtgtcgacctcgccttctggaagtaatgtcgaaagtccggatgcgattatcgtgtcgaatccgccgagcgagttttggaataagaaacagcggtctcgaaagttgcccgaccgcaaaatatatcgctgggcgaaagggtagttctttgcacctgccgtatcaggttcagagacggagttcgctcccaatccgtagatgtcgtatgcaatcggtgtcagttcttccgaaacgcagatattacgccagagtagctcgaacgaaacgttgatccggacgatgccttcttcggatgctgtgaaaatgtcctgtgtgcgctcgattccttcggctgtatataggcgcgacttgattcgcagaaattgcggatctcgattgagttttaccaccgataaccattgcggttgccatgccggcatggtgacgatttgcccttgccaagtcagaaagtttctggcccaccaatccagccctactttgcgaggagctgcaaccccgccggcaatgacctgaaaacgatatgttttggttgtcgccgtgtcggtcagcgttatatacaaatatgtaaagtcggtaacgccggtttgtcgtggaaattcacattccagcagggtatggacgatgtcccgcaggttgatcgttatcaaactctctgcatcgtaataaagcgtcagtttgtcacatatagttgcatcatcaagtcttactgtcatgtaaatacaagtcaggcttgaatttttgttcctgatgatcattttccccaaattctcagaaaactgacaaatttcgggcttctcgattatttcgaaggtatctaccattggctcggcttctattctcggacaaaaatatctacatgacgcgcggactgaaaggacattacacttcgaccaactccgcattcgagtgaaggatatcgtgagtggtattaccggttatttcaagggtttttatcaaataacgcacgttgaagaccaacactttgacccagaggcgtaggtttgcaatatctgatgcggtcaggttgagatcgactttaagcatttctttgtcccgtgccagccactccgcgtagggtttatggaatctgttgtacaaaccattttcccctccaattgcaagggagtactcgcttcggtcttcgctgccagcagaaagatcgggaataccgccctcgaaataatatcctttatccgaaaaattatttttgatcagcaagccgatatacacttctgacgggcgattgccgcctgcggtgggaaaatctacaataggagttatggcgttcagtccaattgcttcttcgatcgatccgtcagcatgtatttgctttgacgggtatacggccaaaggaacgcatttcggacatgtgaagtcgatcgaacagtcgtagttctgatcttccgagtcggcagccggttccattttcgtaaacccggcttgatgtacgatatccagagtggctattggtgtcgtatatttgttccatgcggcaccgcgtcctgaataatagagcagagcgtcgattttcttacctgaatagatatccccggtttgggccagtctgatatttttatagtcgggagacaccctgtatttgttgatgatgtcctgcagagaatagctttcgataatctcatcagttggctcttggcccaaatcctcttcgtaggacttggtgtagttgtcatcctcgttacggaatgcgagggtatagcctttcttttcataggcggggagcgaataattgtcgctgactttggccgtccagtctacaaatttattgcttgcgagaatcgacttgttactcatcaggaaatactttttcccggaaaaaaacaacgtgcagcaaggtattttgagtagactgataagaaaatcgctcaagtccatgtccggcatcgagtcggcaagatcgagcgtacattgggtaggatataaccccggccgggcaccgggcgatgtatcttttaccccgtatcggttgtcgtattcggaacttttgtaaagtccgaggatcgctaacatattgaggagtttttcgagttccggttcccccaactctaactccggaaggattttatcgaggatataacgtactttgatcgctgggacaacataaggccgggtggtgtaaagccagttcgcatatttatcgaccgttgagcattctgctttcgtcggccccgacgtcacatactcgatcgaggcgctcattgccttgcgcataatctggggcaggccgaactcgtcatatagtcctttacgggcgttttctaccatcgtcgagaatttgatgtcctcaaatccggagaatgggatgtcggtcagctttcctgtgacgatgtggtcgaattcagccccgacgaatgagtattgtaaggacttatcggagtagtcgtcatatttcagttcaccctgaaatgcgactatgccattgaataacgcctcgcaggcggcagtcttgcgtgacggccgccgccggatgccgggtgtgaatccgaaaaatttgcagtttttcggcgacagtttgaattcaacattcgtggaaacggccactggcaccctgtcatcttcaaagattggattgtccagtgtaaatgtcacatcctgatcaggctgtacatcgaggattatgccctcggatcggaattgtatcatcgttttttacctccaatttgcccacgttcccgcgtgcggttgtactctttcattttcgcaacgattccgttctcgcccagcattgtcacgtaggcaagaatcggattcttcagcacgtcgcatagacgatcgacggccgcgatgaatttgccggccgtgcctgcgtccaaagaggaaagccccgtgtctgttgtgtcgaatgacgggatatctcctgttgggccaccggatacgaatccgggtaccggtgtattttgccggtatacggcattgaaatcgaagctgccgagtgtcccctgtcggcgggccgcttcgatcgtgttcagtacgggaatcaacgaggggttatccattgcggccgctggaacgacatactccttcccgttttccgataccagcaccgtcggcgatgagatgaagcctcgtttatccggagaataacgggcgttgaattttttgccgtcctgcatccgttcgatgacctgaccaccctcttcggcgccagtcgttattggggttgatgcaatcatagcgatttgtgcggctcccatagcaccgacgatagcggcaaagatcgcacccagaggccatccccattcagccagtgttttcgtgacaccagttgccgtattgatgatggcggaggtgatgttcatggccttctggcgcttcgcctgtttgatttgcatctcttcttgtttggcttcgagatctgcggccattcgctcctcctctgcttgtgcttgctcttcggtcatcagtcctgctttgacacgcttctcgttggcttttttcttcttatcctgatttttctgatatttctttaattctgcgttttcctttttggtcatcatattgtcgtaggtagtatacacctgcagcgccgtttccgtagctgcgccaatcgctgtcatggcggcatgtactgcttgcaacgcttcttcggtagaagcagccccgttcttcagcacgtcaaaaaatttcatccagtccgattgtggtaggcccatgaacgttgggtcgttgccggcaaaagagaatgttttctgctgcccgtcgccgagaacttccaatacgccgatgatcgctgtcctgacatcttcgaaacgattgacgagattttgcttctcttgagccgagagaagctgcgtgtcgagttggatgccgtcgaacattccagactcgatgagcgttttaagttgcgcagagagttgagtcaggtgttcgagttccaatcgggactcttcttccgcttgggctttccgtagctgtttgcgttcagcggccgagccttggaagtcgaggagttcctgcttgtggcggttcttgagctgtttcttttgcagctcataggtctcctcttcccgcttcagtcgatcgtcgatctcgtcgagccgaattttggtgatgttgcgctggtgggctttctccagagcttccaatgccgcggcgttgcctgcgtacctctttttcttcagttcgtagtcggcgttctcccgcttgatccgatcggtttccgattgctggagaagtttgtttatctcctcttctttggctgcggccgcctttttctgctcaagtcgtttgtcggcgagttggttctggattttgagccgcgtagccccttcatcgatatttttcgcaaggcgtttttccaatgccgcaatttccagtttcagcagctcttcgttgaattgggacgcggatacgatttctccgttctggtatttctccttgagtttcagtttcgcggtcaggaactctttgtctttttcgagcgaccatttgcctgtatcgtccgggtcggtgggcgttgtatttgtggtcgtggtggtgttcagattgagaggggtggcgaacttaccgtagagagtgtccagcatcgagagagcctgctggccttcggtcacggtattgcgtaattctgtggtgatttcttgtaaggcgatatttcggcctgcaggattccatgccgatccggtgaggttcagccccagatttcgtaattccatattgaggtcggaaactgcctgactttgttttgcagaatcgtttccggccgcttttatcttacccgtgaaatcgacaactgcggcggcgatcaatctctgcttatcggcggtgagcgacgattcgtctccccattttttatatttgttcgtgatttcgtcgatcgcctttttcgtggctgtcatctcatcgttggcgatgcgttccgcttcctgctgcctgaatttgagcttgatatttttttccaattcgctgtttaccgactgaagcgcaatggcgatatcctcgttgctacttttctcggtaagcaggttcggaaggtagttgccgtaccgttcattgatgattttgattgcttcggctcgtgcgcggctcccggaggctgcgcgggtcgcggcctcctgcaattcgttgagcttccgtttctcgttgtcgatttcgaccgcagcttcagcggccatgttcttgacctgcttgtgggctttgaatattttgtcgctgaacagggttaccgcaccgatggcgactgaaattgctgtcacaatccaaccccacggcccggctttgatgacgttgttgaatatctgtgtaaccagcgtagcctgcttcgttatggcgatatacgcaatatgggccgctcggtaaatcaccatcgccttgtgtgcagcaaacattatcgttttgtaagctgcgatggccgcaacaattgggatgatcgctccttttgtctggtataggaatttcacaagacccgtcagcgccttcagaaaggttacggtgatcgaggttgtcgaggtaaatgccggattcagtgtttcgccgaggattacggcctgttcatggagcgccttcttttgcttttcgtattgggccgtggcactttcgtttttgatgttgaactcttcgatgacagacgtgccggtttcgaacgcacgattggcgatctcctgttgccggcgcagttcgtctgtattggctgccaagacgcccaagacctgcacgctacgttgtccgtcgagtttcatcgagttcagggcgttcacgatcgactgcatgccttggccggacttacccataccttccagaacgcggataaatgcctcgttcatatcttcgcccatgagcttctgaaattcgccgaggctcattttggcaattttggcaaagacctctgtccgcttgtacatggcggtaattacctgcccgtaggaggtgcctgccgtttctgcctgctgccccaatttgtcgagggtgccggcaaggccgaggacggactgaattgagatatttacgttcggcgccgtaccggccgccctctttgcgaagtcaacgacaaaaccctcggccgctgtggaggccatgccgatttcgttgattgccgagccgaccttgagcatactctgctcgatgccgtattgttctcggagatgaaaaatatcgacgagtttaccaatttgctggatggctgcttcgacatttccgccgaggtcgcgggttagcgagactccgattttgtcgccggcccggacaaattcgagtaggtgctgtttaccttcgataccgagtttgcccgcaactcgtacaatatcgagcagtgagttctgtgcggttcgggtgtctatcttcttcagttcttccgatacttcgcggatctcggtttttgttgttgaagtggtcttttgggcatcggtcagagcttcgtcgtactccaaaaaggcggcacgggatttcttggtgcccatgattgcgaacgacatcgaggcgaacccggccgtgatcgcgccgaaaaacttgctgaacccgccggccagtcgttgcacgacattccccgtgtcgcgtgctgatcctttgagcgccttgatgcggacatcgacctgacgcaattccatgcgaaacttctcccattgttctgtatgaggaacggcattgcggaaagcgttcatagtcgctctgtggtgctgctgcaattcccgcaacgtcatcttttcaagagactgctgtcggatcaggttctgtagacgggtcttttgatcatccagtgctttgctctgtttgtcgatctctgccgtaagcgcacgatattccggggtgttcttcttcccttgtgcttccagttgtttctgggaagcgataagtgcatcaagagcgatcttcccatcgtgggtggatcgtttgaggtcttcgatacttttgcgtccggcgtcgccgttgatgatgatattgagtcttaaatcttcatcccgaagtgcttttgccatattcctaatccgtcagttattgcttgatttctgcaacaacatcgtcggtcaggccgtacatcaagcgggaagcaatcgactcgtagtgtccgtaagcgaaacgggtgtgaatcttgcgggcacgccggacgatcttggaaccatagcgcagaacccgcatgtcgaggaagcgttcttcgatcgtgtgctgataggtcattgtcgccgacatctctccctgttcggaaacagacatcgaacgctcattgaccagtcggccggtgcgggagtggagcttcgttgccagcactgttttctggttcttcagccagcggttcgactcgtcgagcaaagtgcgccgtatgtactctcctttgacagtcatttgttgcagtttgcaacaaaagtagccgcccgaaggcggctacaaaggacagggatatgtgagcgaaaaagttactttttcacctttggcgaagatgaaagatagctggccagcagccacgcgaaaagtaaacctatgcctattgctccgaacatatcagatcgagatttgtgttaatttatgtccgaggtcgtgcagcgcggcctcgatctccttcgcacgtttttccgagggcttggagtacccgcatatatactttgcaagtagggtttcattgatacccatgcggcgggccatctggcggacgttgatttccgggaactgagcgaaagccattgcgacccggttgtccgacgtttccgccggctggtcgaaaaagccctcgaaacttaaatcttcgtccagttcgggccaatgaatacccgaccgggataattcgtatttcatgcgctgctcatcgcttgcccgtgccagacgggggaaagcgcggagaagcagactgcccgtccggccgtcgtcggtcgtcaggaaaatccgaccattttcgaaccatatcttttgcgctttcatattcgtattatttatcgaaaaactccttccaccgttcaattatcacgtctttattctcctctatgcccataagagcgtgttttaactcccgtggcttcagaccgaaattttctatcagctttatctctggttcgatcatgaattttgcgtcacattctccgttgctgacgtgtacgtgaactggttcgtgatcgttcgagtaaaaaaagaacttcagtcctaaatagtaaaaaagtatgggcattgtgcagttgtttggtttctggtacaaatataggaataaaattattcccttgcaaataaaaaggaatatttttattcctacaattattttgccggagttcagaattcaatctcaatcatccagccgacccagctcccgaatactttgtataccggaaccgtatttgcaaccttgattgtcatgccggccaaacggggacaggcgttatatcccagagtgtccgcccgtaacgttttcaaaatcatatcgaccgtagcgagcatcgacagatattgttcgagttcatctttatcggtacgctgtccggccattgccttttcgaggacgaagatggcggccgggagttgatcctgataggagttcgatgtttctcctgtttgccgtagtgatggataggcaatcacgacctgacggccgtcggcgctcttgagccgctcggttccgtgcgtgtcatcgacaacggggattacctcgttctccgttacacgcatattgaccagatatcgtagtaggttaatgagtttttgcattgcgttttgcttgctttacgttgtggtgtagaatctggaatatagtatataggccctcttcgtcgatgtcgttcagcgtgccgagtgcccgatcccgtgccagttcgtaggctacatctgtcaatgtgaacttcgggccggtatcgtgggcagtttcctcgctgctgaagatcgtgcgcatgtcgatctgttccccagccacaactatcgtcccggtctggagaaatttgacgcaggcggagaaccacatgagaatcgtctgtttctgccacggagctatccggcgggcatggcatacgtcccgctcaaaggtctcgtgacggatggggacgatacaccggccggcccggttggcttgcttcgaaggctgtcgatacaggaaagcgatcatccggtcgagggccgcggggtgccgggtgttcaagaattcgtcgcgggcgatcagggcattccgaaattccacgagaatcaggtcttgcagagcgtcggccggcccacgcaaccgatggcggccgatatggatttcgggcagcggattctgtatcgtgtcgaatgtcgggagcagaccgtcctcggtgtcggtaaacagccagccgaggaggttttcgcaaagcagaaaaatgttggcattcttctgttcggcagcggctcgattgagtttttcccacattaccgaacgccatgtccgtttgataccgaggagaagatagaggacgcgcacatgaaactcaagcggagatatgaggccggattccatatcccaaagcaggcgcatcgtaacgcgggcttgttccggtgtcatctcgctccatttcgaggggatttccctgcatacgccgatagcgggtatttcgatcgtattcattattgaacagaaaagaatttgtttcggggatcgttgtccggtagaagagagtatttttccgcagtagccgataaagcctcgtgaaactcttcgagggcggttgctgcttgatgatcgagggctgaaaggtagaatttcaacgcatcagtggagggggtctttccggcccctttaccctgaaatgaatctgcaaaccgctgcgagatcccaatcgggaatacggacaccgaaagtctctggacggctatcaccatcgccttcaaagctacaaaacgccgcgctgcaagagccatgtctgaatctatgtctgacaggagcgacatataacgatctccggcaatcggcctcacaaagcgctgctgcacttcgaggatgaagggtataagcgtatagaaggtgtagaacgagccatcgagcgggtagatgctttcgaattggtcgagggtacggagaatcgactgttgttgctgggtgcgcagcggtgagtccttccactctttgatgtccgtttgctcaaggaagagatacaattcgtcgagcgttcggaagaatgtatcgcgcagaaccgcatcgtccttctcgatctgccatgcccacggcagtttttcgttttcgctgatttttacctttctgccgctgtcctcatggctcacgaggtttcgctggtagaagtgatgcatggctttatacgccaccggcaactgcacccgccgtacgagcatgtcttctggatcatcggatgacacttccggatcatattcgtccgtcatataccgggagtgtgcccggtcgaatgtagctttcccgatcagtttgataacttcgttttgggccagcacgatatcctcgctgatcccggtgaagtcattcgccttgtaccatgtgccggtgagattgtatagctctgcggagccttttttcgttttattgaaaatcatggcgtcagttttttatgcggtcattgggggatgtctcgctttcggtcaaaggtttgctgtgatagaagtcgagttgtaaatcagtgtcggggaaattaaagcggatggcttggttgatgggttccaaaatgtcgtatgtgggtttggcggtgttcgacatcatgaagagtttgtaggcgtaaagcatttcggaaccggatgcgagcttcccggcaaccatgatgttcgacagagatgcatgcagaccgaggccggatgtgattgccgagctggccgcctccatgactttgagttgcgattcgatgaagtctttaattttctggtctatcgcctctaccttccagatgttggtttgttgcgagagcgggtcgaaaacatccactgtgtggaagaattttccggcattcttggccccagataacacttcggtcagcttggtaagcatggttgccgtgagtttgccgatctcctcttctacctgtttatcactccatgccggattgttcttgcggatgtacgtgcgcttcttctcccaatatccgtctggagaatgaacatgatacgcagcgttgaacccgttgtcggtaacgtatttgaatatggccggaacttcggagcctcgcatgatccagcgcagagttccccaatattccggaatcgaatagaaatctcgtgcgaacgagtaagacgagttgtaagctgccgaagcggggtatctggccgggttgctgctgtcgaataccgggtaggtttggatgccggtgtcgatgcaatcgttctcgaagttcccgacgaaaatgtgccttacgtcctcaagacgacgggtgtcggcccattcgaggcgggcatttttcgcagacacaaactccagagctgcgattcgcggcctttggccggagatccgtccgcggcgttcgagcagcttgatgtcaaaaaatcctttgagatacaagtagtcggtcatcgccgcgtcgatgtacttcaggtagtcccaatctttcaaccatgccattatctccctatcatccttgaactccttcgttatctcgccattctcgaaacgcaggctgcgcagaaaggggccttcgccgtacagcaatcccttctgacgtgcaagaataccgggggcgagattgttttcgtccataaggtcacggatttgcactggcaggcggttgttgtttccgtagggtacgatcttttgtccaccgacatactgcggcatatattcccaattctcccgttctgcttgccatagcagagtgtcgaggttgttcgcttgagccgttgagatcgtatagacacagtcatcgaccggcagggcatatgaaaaatccgaaatctgggtggcttttcctgttttattcattgcaaaattactttttgaccgttaaaactcatcagcaatggctgataaaagcgccgagcttggcaggtgtcgaggtcaagatatgcctcgacgaattcggcatctcgatggttctcctgtttttcacgtttcagcagacgggcatgccgaacttcgatcactcctttgcttgcgcgagccgtagcgtcgtaggacatgaacgtaaagccgaacggaatcccctcggcggataagcggcgcatctcttttattgcatcccataaatccatagcacaaaaatagattgtagacctgcgaagcaaaggacaaaggcccggagtgccgggctggaatgatattgattgcagaaagttcggaatgaaagtcgaaacggctgattgtagattgaaaatgcccgatttttgcctctcttttcggggtgtttttatgatattcggttgatatagagcatagtttgtccggtcggatgaaaaacgatttttgttgagagaaatttaaggccgtcccgccctctcgacgagttgcgattgcatgaccctcgaaaaggcgatatatgacaaaaggcctgccggggtggggttcggggcggggaatggttgcttgcggctgggctgggaggtgtggctggggtacagccgatcgcaaaccatgtacggccgataagagaaaggccgaccctctttcgtagggccggcctgatgtgtgttgtagaactgtcagcgtcgataaatcataatgtccgtgtatctggaattgtaattcaactgcgctcccatttctttccgcactgcgttaaggaatggattcgcattgacctttgcctcggagatccactcgcatagttcaatgatcgaggatttgttggaggtgaaatagaagtaggatgtactcgaaagcagggtcagcacgtcgagatagtcggatagccgccaccggcatttatatacccctacctcggtcgataggtagggtggatcgacaaggaatacgacaccggggatatccttgtattgattgaacaattcccgataatcggcgtgaacaacctcgatcccgtcgagatatccttcacaggtgtagtctgatgcccgcaggttattatataacccagcattttgaagttccgtatagtctgtcacgtatttggatgagaacagcagcgaagacgaaagtgttatataatcgacatagccggtcttttcggccgaccgtactgtgtcgagtatcgttgttcgcatttgaggcgtcagtctcttggccgtagggtaatcacctacgatcgaacggatatcatggagtagtgcgtttgtgcgtttgatgttctccagacgtacatggtagtcgtcgaagtcgttgtagataacgcgggcatcaggtcgctcccgtttggtgacatgcgagagtaggccgctgccgccgaagagatccacgaataccgtagcgtgatcgaactcccggagtgccttgcggaattcgcggataaagcgtttcttttggcccatgaacggcagaggggccgatgtgtagtttttcatagctgagtgaattttcaagccgcgaagatcgcatgcagaattcatcccgcagccgaaaatgctgggatcacactgaaatatccgtacagtccttttcaaaccgggcgatgatcaggtatacttgccgttcgcacactccgtatttttcagccagaacggccgctatgtaggtcattttaccccccccctcgcggagcttacgatagtcttcataaagatcaatgtatttgcaatcgtccagtcggataccgacggacgataggcgtcgcaggagttcgcggttgaacgatataacctcataaagtttcattgcactctgttttttattacctttgtcgtctcacctgcatactgaaagcaaatgcgtcataaacgcgacagaagactatccagccctcggtcgtgcgtttgtggcgcatgcttgcgtaagtatgtaggtgagatgactacttgcggccgggggctttatttgtacccccgaaacagtttgcaggtttgaatataatggctacctttgccattgcataggattgagaaatgagaatttctctattccggcggaggcggagacgtctccgctttttttatccgaaagtcggttcgtagataatatcgctcctcggtgatcctttgacgatttggatcaacggcggcgtcatcatcaggtacttgaaagagtcagacgggttggtagaccgcatcggcagctcggcgaccgggagatgctccgaccgtttatctttacagattttacctttcgagacccgtgtccgagcattttcgagcgaagccttgagcggtttgcactggtaagcatcgatgagcacctgcggcagatatttattgtgtccggccagcaattcctgcatgaagatgtactcgtcgccctgcccgatattcccttggcctatggacatcaactgtacactccaacccgtaggatgctcgttgctgtcgaattcgatcgcgtgtttgagctgcgacgcggtgtcggcacccattttccggtagttgttgcctgcgcgatcgtaatacagcatcacgtatttgttcctgtggtgcgcgaaataggtgacgaatttgtctgccaattgtcgaatcgactctggggaaagggtataaataaacttcaatacgcgcagtatcctcggttcttcttgggcgacacacatcgaacacatattaccgaagtccacgccgagcgatagcgtccgctgtggattgcaatatcgcaagactcggctgtcctcttgctccagcagtccgaatcgctcgtatgcttcttcatcgattccatcgtagtaaaagtgccgttctccgaggttggcataaaatcgctctccgccctccagagtcggtttcatcgaaagaatcgcggccttatagtcgctgaactgctcggcgaaggcatcgtcgaaccactcggcagtcaggatatcgacgttgatatagctcgatgcaagcataaagaaggtcgcggtttccggaagtcggcgcagctctacccagcggctccgccaaagacgtgccgtgcgtagtttgtttttgtactcacgttcggcttccggtgtccgggttcgttgccattccaattttgcggcgacatattcatgaagggcttgattgtataccaacccagcctgcatgaccagtgtcagccgctcggtattcattgccgaggctcctttcagtatccagtcatattccccgatgtgggatacatcgggcatatccgtggtgaaggagtagccacggtaaaacggagagtttccatattgcacgctgtacccgcggacggctttcatcaggttggcgatcttttcttctttgaaatactttacctcgtctccaaacacatagacatacgagctgccggccagtgtcgaaggtcgatcgagggagccgaatcggatatttgtaccggtatgaaaaatgattgtacgcttgtaggatacgagacggttgaatggcttccagaaatgcggtttgagccatgtgggcaggtgttctttctctttttccgtgtatgtcggcggttccttttcgattacgtagtggacgccttcatgcagtcctttgcgttcgaggccctcaagcacaccgggcaggatattagaggtgaggttcgagaaggtatcggccacccataccaaaggggcacccggcatgtcgaagataatctccgcgagtcgttcggcttgaaagtccgtcgtcttggccgagccgcggcccaagacagcgcggagctttcgcggcatcagcaacgatgctacttgggcgtacaggttctgatattgtacgtcgatgcaggggctgtccccggcgttaattctcttcctgtgcgacattgataatttcgataaaatccacatcttcgatccccgcttccatgcgcagacgtttttttacggcatccggtgccagtacggaatcgatctggcgcgatagcgcgtctctgtttgccggcgggaggctgacatccgaagagtcgagggatagaagacgaatcggtttgatatattgtgaggatgggagttgttccgggtcgggttgatcgagacggaggatttttgcggcctttgcccgcatgtctgccgccacggcatagtcggcggcacaggtcgctctttgggcgacgatgctcgaccatgcttcgaggtcgtcggcgtatttttgccgaagcgcctctttcgttacgcgccggttcgagtagaagagattcacggcttcgtcataaatatcgacggcacgtgcataggagagtttgaagggcggctttgtcaggaacttgatgacatttcggcggtcatgttgtttggagagggagaatacgagattcaacaagtcgatatataactgttcctttgccgagagatcgtcttcgcaacctttgtcgatgtagtccatgatgcgctggtaggattgctcgtcggtgaatcctccgaacacatccagcttcgtcatttcaaacgaacggtctcgttgtactttgtagagttgtgtcgtcgccggaatgtttccgccgagagcctcatccatgagccttatttcgagtagtgcgcgtttctgcaagagaccacgggctatcagcacggcaacgcggctgttcgggtcgttgtactcctgcgtaaactgctcgacgttcgcgttgatgctgcgggcgatatcttccggcggccagccgagcgcaccgagatcgaccaacctctgctcctcttcaggcgcgaggttttcaccgatgctcttatggtcggatagttcgttcatattcttcgatcattttattgacggctgcaagctcgcgttctttcgccttcagacggtttcttcgctcgatatccagatggggcttgctgccgcgggttatctcgtgtttgatccgccagatgcttcctttgagattcttctgtctggcgacaagggcaacaggccccattttacgcagggtcgccagttcctgcatctccctgaagatcgagtgccggccgagcagcgcatgatgctcggcgtagtatgtgaattcgtagagaatttttcgattttcggaaaaagattttataagattttcggccgtcgcaaaacattcgtccagtgtggtacaatcgaatagccgccggtgcgcatctacgtaatctcgataggctgtaattttgtcggctgccagaattttcaattcgggcggacaatccggttcagagagaaacgcccattgctcccggaaggccgggcgggagctgggcgggggcgtcgtgagcggagaagtccccgctgtcttgcacagcgtgtcgataagcaacgatttgtaccgatcgggacgcgctgttacgagctgggcgagatgctcgttcttggcgtaaagagagaggagccgaagccctgcttggacttcggctccggactctaaccacttttgaacggcatctcgcattacgaccggattttggtgagcaagggggataccgcattccagccttcggcagatgctgcaatgaacttacgctgacagagtccggcgatcacgacgttctcgcagggattgctccgcaggacgagtgtaacgaagttgccgaaatcgtgcgaaacttccgtagcacggacaccgcggcgatactcttttgcataatccgcgacgagggtttcgttgtcggcatcctcttgcatcgttccgcaaagttcgaccagagccactttgttcaggagcatcggcagacgttctgcgtagtgtcgggaaccgtctttgcgaacgtataccttgagttgtgccagatctgcaaaatccaccggagcgaccggagcgcagttggccgggacaaacacgaattcgtcggggatagaggcatccgcaatcagagcggggaattgctttgcgaagggggcatcatcaacgaatacaagcgtacagtgtccgggagccgccttctgccacagagcctgcaacaggtctttcgtgccggggtaggccgcgataacgataacggaatcgtcagccggtactccttcagcatccgaagaggccggtgcgggggcggcatccttttccggaaggggcgaaagaggtgccggttccggaatgggggtttcttctggagtgttcctatcggggcttacgactcccgcatctgcggctcgtttttcaacttcggccgtaggtgtggccgaaacagccggagcgcctttggccccggtctgtcttgcggtgttattatttcccatactatgccccctcttcctctgtcggtgccgatgtagcctcgtcggcgagttccggcatcttgcctttgtagatgcttgccccgatcaggtctcgctgctcctgcttgaacgtgagcttccgcttgcgggcatccttgttgttggtgtactccgtcgtcaggaagagcggattgcacttcgaaccgcgatattccgccgtattgccgttggcgcaatcacggttcaatgcgatgaacccacggttgcgtgcgtactcagtgaaaccggcaatctcggccgaatcgcccggatgctcgaaggcgatgccgactttgacgccgcgggcgtcgggatctccttcagactcttcggtacattcgatcgtactcggcgtagcgtagatgccgattgctttcttttctgcgatcagttccagatcgcttttcatgacgatgtctccgatttcccgcgtcggttccgcagcgacgaattcgacagggacgaggattattgtcgggtttttgggacgagggcagcctgcgccctcgtccgttttcagaattgatacagggttatacatgataatcggtgttaaggtttgatactatgcgccctcgtgggtgtcttccacttcagcggcagcgttggtctttttccagaagtcggtcgagccgtcatccgagattgcggcctgcgggtcgtagtcggccggaacggaagcgaagagcatttcgccgaacgcgaagccgacaccgagccaaaattcgccgtagtagcggacttcgtaatcgaccttctggatgtcggtgatcacctgcggctggttcaggttctgcagcatgatgaagttcgacttcggcgtgcagaagatgatcggcgagccgtacaggcagtcgagtacctgaagcgagaagttcgtgaaatcgacacggtctttgccaaaatcgggattctccgtgccgctgctggctccccacttgtctttgtaacctcgtttgtatttcacgtagagatcggcagacaggaagatattcatcttcagggactgatacttcgccagaatcttgtgggcgaagtcatcgatgtactcgacgacttcggcatctgttgctgtgcgcagatcctttgcgttcgggtagaaattgatacccttatcgcccgacttggccgcttcgacgagcagcgtttcgatgccgttcatcgactcttccggcttgccggcatcggtcgggttctccttggccttgtacttgcctttgccgatcatcttcatctcgatgtcctgaaggatcgacggcagcagaatcttctgcacgatgtagcgtgtgatcggcatctgatcgggggacagacgctcgttgtagagcgacagcagccacgagttggcgacgtcggccgggacgatcgcaaagttgatcttgtgccggtaattctggattttgatggcagtgaaccgtgcatcgccagacggagtccacttggccgagaactcctgtacgacggacgtatagtccgagcggacggctttgtaggtttcgatcgcacgcttcggcgtcatgaacttcgccgaggtgaacccccggtagatgtcctgcatgagttccagactgttcccctgcgacgaataggtgcccagctcctttttcaaatcatccacgtcaatcgtggctgcggagaaagtcggaagctggcccgtggccagagcttcgagtgcgaggcgattgtgggatgccttcgcgtcgatcgtgaaggtacggccttcgcttctcccgaatacttctgttgcggcaggcttatcttcgcgggctttggcgagtttctccttctcctgctgtaagatcgtcatctgggcagacatcgacgcgattttttcttctgcttttgccagttcctgccgtaacttgtctttgtcgtcgccgccggagcgaccgatggcatcgaggaagttcagcaaaagctgttcttgctgtgcgtcgtcatttgcatcgctggcggcgtatgcgtcgtagtgctgcaaggcttccgggccaaatttctgttcgagaatcttacgctgatcagcagagagtacctcatgcccttctgcatcacgcgaaagattttccaccccgacagttcgggcgaagattttcgaaataaagttccagttcaatttcatgttcgatataattatgagtgaatacttgcgcggataaaggcgtgatcgacgcattcctgtaaagtggcgatgccgtcggcaaggccgttttcgatagccttgtctgcgaagaaagtcgcgccggtcagtactcccggcgcgtcggcccggagggcttgccggcccgctttgacgtcggcatggaacgcggcgaccaaatgagacaggcgcatgcggatcagcgtgtactctccggtgagtgcttggcggtatgcgaggtttttgtcggatgactcttccgcgtatatctcgtgaaccttttgtccggacttctccaatgcctctcggtcatcgatgaaatatgtatatgcgccgattgaccctacttccgatgtgatggcgttgtcgcaatagactgcgtcgcattgtgcggcgatccaataagctgctgacgcgcaaaaatcggcatgtgcgagcagaggcttccctgtggctttgaatttgcggatcgcatccaacatcaagggaacagccgtcgaattcccgccgccggagtcaatgtcgagaacgcaggcaacgacgtttgtgtcagccgcagcagcgagaagggcctgtgcatatgtggcagttccgatcgttccgcaggagtcgtatttggtaatcgtgccggatattgggatcacagcaacgcaggggtcgccgcttctggcggcattcgcggaaacggcgcgggcatctacatcgtaaagcatgatgtcgaattctcgctcggcagcttggagtagaatgtcctgctgctgaagcagcgaaatggccgttggtatgagagtggaaatatcgtgaacgagccaacgaccgcggcgcagttcgagggccagcttgacgttgttctccggggtgatcaggcgtttcatttcttttttatgcaaatctacttggtcgcaggccgcataaaaaggacggcattacccctttaccgcttcgattgatgtctggtatttgcaggtggcaacgagggtttcttcctcggtcagtgttagcagggccgggatgtccttgctgccgaaaacaagggagccgccgcgccatttgacgcggacgattgcaggctcatgcaggaaagcatcgtcagaacggagtgttgctgtcagagtaatcgtcaggagttctcctgcatcttcacgggtcgttgccgttttgagattgccgaacggactgatcaagggaacccgccgaaactcggcggcagggcatgccgccggttttaaggcgatagaggtgataattttaagcatattatcagtgaatttgtagaaataattacgattttcggttaaacttttttcggctcatcgacgagcgattcgatgtagtatgcacggcgggtcagtttccgcttcaaggcttccagctccttcagttcccgacgataggcccgcttgtggagggattcaaagtattcagccgagaacaatttacgggagaggatgaacgcttcgataatctcctctttgcgttggcggagggctttacggcgctgcacgaactcccaaaagtcgagttcaaagtaggcgcgcagggagatattgagctgcttggtcgcttgggccgaaaggtagatgaacttattttgaaagttctgggtggcctcgttgataggcagtataaaagtcactgcgaattttccgcaggcttctttgggcgggaggcttgcagcttgagtgtgcccgatgatcagtttcccgaagcaatttcgggctgtcacgatataagcgccggaggtgtcccgctcgaagagataggcgagataatccatgtgtattcggtcatctacatcgaaggtgagtctcatttccatattcgtttgtcaattccggtttttaaggttcgtacatacataggatcgagcctgatcagagaatcgtcttttatgtcgataaagcagcaacggtttccgaaatcgtctatccagtcgaacagcccgtcgttacacatggactgcacgatttcaatgaactcttcgggattgcctgcgatagccgcaatctgctgccagcggtaaggtggcaggcgtgagagctgcgctaccaataaacgaaggtacctcaagaactcttcgtcggaaaggtcatagtatgttttcataaaaaggatacctattttgggcaactacacgaactacaataaactacatgttgaaaatcagatgtttacaaaactacaaaagtagcttttcatagtgattgtagtttttagagtttgaaagtgaataaaatgtagttttatgtagtttttttgttgttaaagtagttatatttatttcgttgattattagtgttgtagttcgtgtagttcatgtagttggcattttttcaatccgtggcggtacttgcggcgaatacctgccaacttgcgaaacgccggactccggcggtaatgctcgacggtttcgatgatcctgttgatttcaatacatgacgcagcggcagcttgggccgcggctgtcatagacgaggagcaggccgcaaatgcatggcctgctcttgaaagggaacccgatatgtcatataggtcattcatacggatcgcattttacggcatgattgctgacggcaagcccctcgccgattaatccccggtaatcgatcagaagcgagtcgaggtagtcataaagtcggtgatatgaatagatagggtagtgttcgccgttcaaatagcatgcggaaaaatccccggtttccggcagatacatcaacttgatcgctggaatgtgcaacgggccgagccgataggcgacaccgatttccttatcgaaggcgacctgatccggagaacacttgaatacgatcgccgcacacccaaccaatggaacgagtcgatgtcccccatgggtgatctcgttacgaacatcatcacccggccgaaggatcggtaactgctggccgatgattgagaagccggttttgtctcttttctgcacttccatcttcaatccaaatgccgaatatcgactgatgtagtttgtgagcatttctttcatgatcaaataattttatgccttgaggcggttatttgtgggcgaccggggactcgaacccctaatttccgaatgttcttcttataccaattttcccattttataagatgcctgtcgtcgccccactggttttacattttcattggcacactcctttcttttttcacttttcataaattcttcgcttagtccttattcgtgaatcttccgccagccgatgatcttatcatctatcggagaaccacaccacgaatccacccagttcccatcgttatcaatatgccccaaatcatacggtatgatagagcttggattccgctttacaagcacaacccgtcccggttcgggtggttctttcgggtcgtgccagcgcgtcagtagttcgtgttcgcatttggccccagaaatgtagctttcgcgggcaatctcacactcgttttttcggcgaccgttatcgtcaagtatttcataattagcagcgaaatctccgcctctttcctcaatctgtttcattcactgttagttaatcaattatatattaccaaaacctactccgccacttttggcgaaagcaatagcccatgcttcggccgtggtctttgggaagtcctgcgagaagtgaatgtaaccatcactccctacttcgaatttgcaataacatttggcgcaccacttcccaatgttagacgtactcacttcccaaccacaccaagggcaccgaactatctccagtacgctgccatttccgggtacctttcggcatcggctatgcttcctgcacttcatcttccttgttcagtttccggataaaattccttcggtggtactcgtaatccggttcgaactctccgtcctcgccgttttcgaaccacatatcgtcgaatgcaccgattgctttcgcccgcatccgctcctcggcctcctgctcggcaagttcgacggcagtataggccgtggaagcatcgatcatgcgatctccgttattcatctgtattgcatcattgtcaatgaatgactttgctttttcgcttttcataatttttgttgttttatttcgtttgttgtgtatattacgccgcaaaccgctgcggcacgatgttcaactcgtaaagtttcgccaccagcgcctcgcagagaacccgtgccatgttcacttcgacggcgttgccgataaattttttctgctcttcctgcgtgccgatcagtacgtagttctccgggaagcccatgatccgcatcagctccgggatgcgcagcatccgcatccggatgtccaccagtccgtacagcgccatgaactcctttatctgcaccagcatcggcgtatcttccgggtaaatctcgtaaaccaacgtttcgtcctccagcctgatgaacgagggcagctcctcgccgtccgcttcggccgtcaccagccgcggcggccgcttgtccatgcgggcgatcagcgtgaaacacggccgatcggtagcggcacccgccgaggcgaactgcgggttcatcaggtattgccatttgcggttggcagtcacggtctgggccggagcgtcgagcgaactgccgacgttgctgaagttggtgttcatgatccacggcgtgacgagccgctgcttcgggttcgtcatgacggccggagccgggccgtccgttcctgacgtctggccgccgccggaatagtagttggcgaagaacggacgcaccaactgaaagcgatcctttgtcgtgacagtcggtgacggccgctcgatcgacgagttgaatccgttgccgtagtaggccgagacgaaggcgtggtgatcccggcaggtgatcgcgcccgcgggcgcatcgacggctgtgcatttcccctccggagacccgccgaagtgcttgcagaggtagtacaccttggctacgccgagacggttctgcgtcgccacggtcgggcacggttcgtcgatgccgggtgcaacatacttcccggactggttcatcgagttgtatttgacgaggaacgcttcgcgcccgccggcgacgaacttcaccagccccgcgtggatgcgggcaagcgatgcctcgaccagcggccgcttccggtcgaagatcgactcgccctcgtcctcaaggtcgaggatttcccgcactggccgccacttgcgaagctgctggccgaacaggtcgccctgtgccgggttcttggtgtgagtcggtttcggaaagacgatcggaaggccgcggcgggcgaagatcccgaagaaccgtcggcgggaagtgtacgccccgaagtcggcggcgttcaggatgcggtggccgaagtcgtacccatagccccgcacgttgtcgacccatttccggtacagtcgcccggcatccctgctgacgggcttgcccctctcgtccagatcgccccacgacatgaactcctccacgttctcgatctggatgtaatcggggttcagcgcctcgatgtagcggaacaggtgttcggccagcgtgcggctgtcggcgtcgcgcggaaggccgcctttggcccgcgagaagttcgtacactccagcgaggcccagaggacgacgaaggcgtccggatactggcggcgcatccgggccgcatgggccgcgagcggccccaactccagcgtacggatgtcctccgtgtagtgtagcgcgtcggggtggttggcagcgtgcgaagcgatagcattcgcatcgtggttgacgcaggcgatcaccttggcgcaaggatctccggcatgccgcgcaaagtgtaccccggtcgaggtgccgcccgcaccgcagaaaaggtcgatgtatataactttgattgccattttagaatagttcgggatgttcgtctggtagctgcacgcccatccgccgaagggcatagcgtagcgtgtagccgttgttggtgtagttcattgccatttggtagagtttcggatgtagagtgtacagtatgtgaaagcgcctccccccccctccgaggtgtgcgccgaacccgcagaatacgcagccggttcgggtaatgcccggtatgtcgtaaatcgggcaatagggtatgtcgaatctgtgaatgtagtcccggcagtccgcggcagtccagatcgacagcggggcgctgtgaaccttgcggggattatccgaaaagacgttgcacccgccgcgacggacatacatggtttgccgcagtttgctttcgtcggccatcgtgccgaccatcccaaggctctgtgtttgggcgttgaatttgcggaaaggccgctttttcagtatttcgcaacacttttccgaggtcatataaggctcacttatcaggtagcgccatttttctgagagtacgccggcccggcgtactccgtcgccgtagagcctatatgtccgtaatttgtcgctgttggtcgtccgaatatttcggacagcttgcgcctgctctttgcttacaagaggaaacccatatcgggccatgacctcgcgtgggggcatggccgggtggatgatctcgatgttatccgtatgccgcacgaaccggacgatttccgggtattcgttacctgttgagcagaacacgcccttcatgttaggatcgacgaaccggcgagccaagtcgagcaggacggttgagtttagtccgccggaaaatgatacgtagggcgtgcggtcgtgctctttgcagtaggcaacgaacgtttccatggcgtagcatgtgtggtcgatcttttgattgagcggccacgcctgacgagtgcgaaggtcagatagagtaagcggtttcatgtaaaaataaattttgatttcgaaccggtatttcatagttgcaccaaatacactcctgcatgagcgtaccgctgccattgacgatgttagagcggatgttgttacgtttcatcgggaatttgattttatgccaatcatcatagagataatccataagcaggcaatcatatccactgaccattgcgaatccttttatttgatgaagtttccaagccagccgttcgtgatctgcatccgtaaagtcgaacaggtagtctccacccttatgtttactcccgcggctttccaaaggatacggtgggtcgcaataaaaaaatgcctccggaaagtcgagcttgtcgattgcggcagagaagtcgctgttgatgatctggaagttgcggcggatttcctgcgctacttcatgaagtttctcaactccgtttttccatcggctgactgtttctcctccctgtgcgttcacgtgttgtttggacatgtgccaccctttattttgtcgttgcacacccagtccgaagaacgactgccgcacacggacatagaaccgtcgagcgcgttcaaggtctgtaattccttcagcccccccccagcatttccggtattcgagttcagagcatggagtcagttctaacatccggatgagttcatcttcatgttcgcggagctgctcgaagaagttggttatttcgccgtttatttcgttggctgtccgaatgacattgcctcggtagttcaatgatacgaccatcgatcccgcgaagagatcgacgaggtgagtgaacttcggtggaaaattctcgtagagatattctataaaagaaaacttgccaccgaagtagttgaaggctatctttttgctattgttgccgctcattgttttggaaggttgtagtgccgacgttcggcggctgttaattcggttgtaaattcgaagttatacacccacacaaaggggttcttttcccaaattccgcgatcttcgagcctttccattagagtctggaaactggcgattgcgttgctacaatgcggatagccgtctacgagttcttctttggtaaaatgtagttccgggcaatagtggacgtaatgcccctcgatggaggtaaacggtcgtactccctctcgctttgcagcttcttcggtgatgtcttgtagccgttcgccatgccgggctgttatccgaaggaagtagcgggccatccgcgccggcatggattgcttatttcgccagaatccgggtttgtcaaggtattctccatatccgagttcttgcagggcttgaatgtctgccggatcgtatttgtaaaatactctatcaagacccaaagggtgcggaatgtacggctctttgataaagataacttcgccgaccttgtaccggggacgaacgagacggcggcgagcaagaaggtctgcgcgactaccatctggaaggatgaaatcgccgcgaggattgagcaaataatcgtctggctgcgggtctgtcagccgacgtgtttccgtcttgtgccgcgcaacgacttcgcgctgcaattcttcgagaaaaccgatgcttttcatagtttctttcggttaaaatgttcgatgatttcgtctttggtagctttgtggcacagttgcttcggtgctactgctgccatccatttagcccggatgtcgctggcccgcggtatcagaaccttgaaccattcaccggccataatcagccgttccccggtttcagtctgtacggtatctttcagcctttcgaagcggatgacggcgtgagcgacgaaccattgctcgcggtcgttgtctctgttcatggccgccagtgccttgaacatttcgatattttcgtcgcagttgtaaaagtcttggtcaaacaatcccagatcattttcgtcgagttgcagccaaaagcatgtctggtctgtgtcggccagaaaaaagttagaccaatcttgccttcctccaataatttgcctgccgatacctttcacccacttttcgagtttgatttgctgctgctcatcccgaacgagtaccatacatgaggtttgaaaactcattgttcccctcctttctttgcaagtgccgccataagtttttttgcatgctccacggccatagtataggggtcgcggcattcgggtttattcactaactccgggagtatcagcgccgccgcaaagcctataaatgcctcgctgttcggcgttccgatattcgcccacggcccggcgggcgcgtcatcgcggagcatctgtccgtcgcccgtcagcaaccagagcttgtcgatttcggggtaatgttggcagatgcgggtggctacatcgagcgagattccattatttccctttttgatctgataaaggttttcaccgcggggcaagccgatgtgtcgtgcgaatgcgttagcggtcattttcgattgttggatgaccatttcgatgcgctgccagttagtcggggtttctttttccgcctgtttctgttttgatttgttgttttgcataggattgaatattaggtgattaaaatgatagttgcgtaggggtgaaaggttccggatcgtcttgttcgtctggattgtctgtgtaactccgtgaggtgtcgaggtcgatgccgtaattctcgcagatcattttgtagtcgaagagcattgccgttgttgttcgccctgtagctgcgtctccggccgggacgaatcctgtcgggttctggatgactttgaaacgctcggccttttttgtgccgaggaattcccggctatgttccagatagtatttcagcgagtcacggggtatctttttgctttcggaatctcggctttccttggcgtatagctgcgatatacggaggaatgatacggataggtagcgtgccccttccggtagctccagtggcgtttttgattctttgatcggaattccttttttcgtggacgctttgatgtggtagtccacgccgatccatatttttccggatgatgcaaggatatcgaccgtttcccagaatccggcgagttcgttgttttcgttggtcttgagattctgcgtttcgcacatccttgtgaccattgggagtatttcggtgtatgtgaaaggcaggtgaagcagatgctcgatgctgcggaaagccgcggtgatcgacacccagttcctgaaggtgcgatcctcgatgattttgcctacgaatgccacggagaagtcggcggcggtttcgtcgtacatgtggcggtaattactgcggaactgattgcggtgcttgagcagctccccagttaggtgggtcaggccgcgcttttcgatcagcttgagttcgttgtacctccttttctcgtcatcggaaaaggtcgtcttggagaaggtgagaaataccagtcgggaaaaaagagcaatgtctgctgtcggcatttcttgcccgctcagtatcacgccgcaatccacggccgtagtttcccgctttttatcgttgtccatgttcatgcgggagcggccggcaccgtcccataagcccttcaggaattcccgtttctcgatgtcgagcgtgtttttgtactcgtcgatgtggacgatcgcattagacacctcggccacggcctcggcaagcgccgctttcgtcgtattgttgatgttcggcgctatataggacgggataaaaaacgatgtcagcgagtgggcgagttcggatttccccgaacctttggggccgaagaggttcagaatcgggaatgatgtcgtgacattcacgacgagatcccggaagagcgacgcgatcaggaagcagagtccgaccttcgcattatcgccgaacacctcgatgagtcgtgtcgcgtagtcgttgagcgttatgtcattggtaatcgcatagacgaagcgccgctgaaattggtagctttgcggatcgtctgccgtatctttggaacatcccggcaaatagaaaagctgcccgcggacgttcaccaagccgaaatcattagctttgacgaagtgcccttcatccattgcgccgtttccccatgcgtatatttggtgccgtttctgccatccgagctgtttgatttcgtcggctgagggagtcccgtcgaacaggtattttttgagtttggtcagttcgccctgtccggcttcccagatgtagttgcctttcgattccgtacggatgcggaagtcggcaaacgatacgagcgaacgctgatcgagtttgatgactgcttcctctcctttgtcgttccgcatccggaacagacgccgggcgttctggtcgtctttgacatggacgatcggttcgaggatgaagttcgaccagcggacatcggcatttcctcgtccggcaccgtaataactattgtgtgagatatagaacccgtattccgaaatcatgtcctcggaatagctttcttccttttttcgctgcgctcgttcccgttcgagttggattttttgtagctctgccgtccatatcttgcggttcttgtactcacgcgcgaacatgtccagatacatgttgaccgtactttcgtcgcggcatagagccaagagctgacaaacttcggatatgacggcgatctgctcggtctgggagttcttgccttccattttgtgagcgcagagccacgggataaagtctgttgtggaattgctcaacaattcttcgtacccctttgaatattgccggaaataatcgtcagggtctttgtagttgtctttgatttccatgacccgcacggccagcccttcgcggagcatggtttcggcgtttttgacaacggccttctgcccggcatcatccatgtctccgatgatgattacggtgtcggcgaccttctttatgagttcgatctgctttggtgtgagggcagtgccgagcggggcgaccgtattgtctacgccgatctggtgcatgcggatagcgtcgggattcccctcgacgagattcattgtgcggacggccgcagcctgacgtgccgactcgaagtatgcgaacagatgctcaccttttttgtagaccgccgtgtcgcccgtgttgatgtatttcgggagctttttggggttctccttatccataagacgaccggagaagccgacgatgtttcctgtccggtcgcgtatggtgaacatcagccgcccgcggaaagtatcgtacagggagccgtcgcgttcgcttcggcggacgaggtcagcgtcgatcagtagttgctccttgtaccctttttgtgtggcatattcgcggaatccgcctttgtacggggcgaagccgatcagcatattgtcgatcgtctcctctttgaaccctcgctcctttgttgcgtatttttgggctgggagtgattgcttgtaactttcccgaaagtattcgagggcgacctgattgatttcgaaaatgcgagagcggcggaaccgggcctctttttgctctggagtcagctcctcggccttatattcgatgttgagtttttttgccaaatactccaccgcttcggggaacgtcatgttgtagagcatcatcacgaaagatatggcattgcctttcgcactacatccgaaacaggtgaagattccctttaccggggacactttgaacgaaggtgtcttttccttgtgaaagggacagcagcattcgtaattgacgccggccctcttcagacttactccttcgcccccgattatagagacgatgtctttggatagtatttggtctatgacgtattcaggtatcatttgcgcggtgtttctggcgggactttccccctttgggaaatcccccccccgatttggttataaagattcgatgtgttcgacgattatgccggccctgtcgtactgttgctggaaatcttctttgattcgcgggcgtttttcctcttgtatgccttcatacagaccgcagcggtatattgtgagcgcgcggcgtatcgtttctaacagctctttgtcgagatccattatggcgtagtgttcccgattgtctttgtcgcaatacatggctaccagagtttgaggatgagcgctacggcgacgattgtgttcaggataaaacagatgagggtggggatcagtccttgccggtcatctgcacgggcttgcaacagtgattttgcaatgtagagcagaatgaggaagtcgagaaaacccgttatacaggcgaggataatcaatatgatagtttgcatggttctgtcgtttaaaatgttacgttgatttggtacttctcggcgatgaattttgccaacgcctcgcgcttggacagcgggatttgccgggcgccgcacccgtaggcgttgaaagtcgaggtcgcaacaaagagcatctttgcgcctactgtccggagttcttcccgactgtggatgtccagcccccgccagaactcgatgaatgtcttggtttgttccatatattttttaaatttttgattcggtggaaaaagagggcggcgaaaatctaatcgccagattaaaagttggccgccctctgcgtccggtactatctcacgacaggatgcggacacggtcaggactccgatgccctattgtcagggacagactttcggcggccgatgttatacgccgcatcttttcgatgtctgtcccgttgtagatgcccaacaggcggttgccgatcatcaggcggctctcctccgtgtcgaggttcacgaccagcctcacgttgttgggatagctctgaaccatcttggtttccttcccccgcaggtagcgggtttcgcattgcggcatactgtacgccggggttgcagttgattttctgttttgcataggattgtgtttgaaatggtggaaaatttctctacatttgttattaacattgttatttacaaatgcaaatatcagtaattattaggattaatccaaataaaacctaataatttttacacttaaaaattagcctcaatgtatagtattgatattagggaatttagacgtgcaaataaaatgacgcaacaagaacttgcggactattttggcgtcgttcaggggtttatctccaatatggaaaatgggcgtgaaaaagtgcccgacaaatacattagtaaaatattaggtgatccgaatgtcgattcttcaatggtgaaagtggtagcaccggagaacgaggtgaagatgcctcgtgaagtattcgataaattttccctgctgctcgaaactattagttcccagcaggggacgattgcggatcagcagaaggtgaatgcggaacaggggcggttgattgctgatatgtaccagaaaatcgaccgcctgacatcatcggggagtcgcactgtccgcacggaagacgatgccggatgtgccgctgcaaaatagttctctttggtctccagacgatagtcatccccaaatattaaaagtatgaagaaaattatcttattggtggtgttgctgtatgcatcatcctgtgctgttcaatacaatgaagcatattatatggctgattttaggccctatacagaagagggttttattatttcccctctgtcatcgtatgccgcaccttataaacctttggctaccatttgcatagaatttactcccggttacgatcgaacctatgttaacgaaaaaatagtggagagtaaggtaaatgacgatatgtacttatcggcaaatggaaaaaagcagcaatggcggagtccgacgcaggacgaaatgctgaagaagttggtagattatgcgaaatcgataggtgcaaatggactgttagactatcgttttgaggctgttcgccctgtaaaatcaaattttaatcaggtgctttattatagattaactgcctttgcaataagtatataaaatgtgttgttccgggacagattcgggacaaaaatgctgtcgagtgacccctgaccaaaatgtaaagtgttgatattcatggccacaaaaaagcgggaaaaggatacttcaaatcctcctcccgctaccaaaggggtcggattgaaaaatccgacccctgttttttgtaaaccgacggcgaataatgcaggctggcggcgatctacaagccgtgcgctttgataatcctccggaacatgcttttcacgacgagcgtgtggaacgggcggatcaggttgaaatagaagaatcccagccggttgtggtatcggaccaaggtgctcaggtggatttcgcgcgcttcggcgtaaaccgagaggtaggctttcaggtgtttgtcgtcgagtgaaattaccgtttcattgtcggttttgccgacgaccgacatcatgcggtaatccctgccgctgcggattgccttttccagctgtttcgcatcgccgttgtcggtttgcagtccgaacggtctgaccagcgcgttgcgcagtttgaacagcgtgtttacccatccgggcatcgtcgtccagaatgccgtcatcaggtcgtcgggcgagattttgcgccggcaggtcatgccgtatgtgaagcagtcgtggtaatcacccggcagacagggtgtcagcagcgaccggggcggaatgtcggtcttgtgaattttcatgtcgttgtgttgaagttgcgtttggtttcaacaagatacgcaaaaaaacggtacgagctgccgtcgggtcgcaaactccggcgcgtaatttgccggggaaggtgtaacgtcaaattccaaaagttatgaaagaggatacgaaaacgacctgcacgccttgcgagcagaatttcgaacgcaaggtcgatgaactggtgaaggagggcaaggccccgaccgccagagagcgtgaagagaaggaagccgaagtggaagcggctttctccgaccgcgggaaagagaaaaagtaacgccgctgggtgtgtatgcaaagagcctgctacttgtgaggtagcaggctcttttatgcgtatatccgtgttattgttgcttcttgtaggcttcgatgccgctgcgcaggaactgcacgaagttttcgacgttgaggtcgtatccgcgcggcggcacgagcgttttcccgtcgcggccctgcagtacgtagtagggctgggcgttgacgccgtaggttttcagcgcatagtaggagttgatcttgccgagacttttgagcactttgcccgaatcggtggtcacccattcgctttcgggcaggactttcttgtcgtcggagtagagcgccgcgatcacgtaatcccggcgcaggatatccagcacctgcggatcggaccaaacgcgggcttccatttcgcggcagtttacgcagccgtggcccgtgaagtcgatgaatagcggcttgtcgactttcgcggcgtatgcttcggcctcctgcaggtcgaagaatccttcgagtccgtgcggcaggtgcaggaagtcgctgtgcttgggtttcctgccgtctgcggtcagcagcatgcccggttcgcccgacgctgcggctgagccgacctgtccgatgacgaagtcctgcgtatgcaggggcggcaggtagcccgaaagtcccttgaggggcgcaccccacatgccgggaatcaggtatacgacgaacgagaaggtgatgatcgccagcgccagccgtcctacgccgaggtagggcatgtcgctgtcgtgcgcgaatttgatttttccgagcagatagagtcccagcagtgagaaggttacgatccatacggccagatagatctcgcggtcgagcagtccccagtggtaggtctggtcggcgaccgaaaggaacttcatgccgagggcgacttcgatgaagcccagcacgaccttcaccgagttgagccagccgccgctcttgggcagtttcttgagcatcgaggggaagaaggcgaagatcgtaaacggcagggcgaatgccaccgagaatgcgagcatcgtgacgatcggactccagaattcgcccgaagtcgatttgatgagcaccgaaccgacgatcggtcccgtgcaggagaacgacaccagcacgagcgtcagggccatgaagaagatgccggccaagcctttcgaatcggccttggcgtcggtcttgttcaccatccacgagggcatcgtgatctcgaaagccccgaagaacgaagcggcgaagaccatgaatacgaggaagaagaggatgttcgggagccagtgcgtcgccagccagttgaagatgtcggccgtcacggtgtcgccgcccagaatgcgtgtgatgacgatgatggccgcgatggggagcgtgtagagcgcgacgatgaagaatccgtacatggcggcacggaagcggccgcgtgcgggacctccttcgcccttcatgaagaacgaaactgtcatcggaaccatcgggaacacgcagggggtcagcagggctgcaaagccccagaggatggcttcgataatcagcgcccaaagcgtaccgcttcctgcggcgtcctgctgcgccgggacgatctccgcggcagttgtctcggccgtgccggaggccgtatccgcggcggcttccgccgggggggctttggcggaggagtcgttattcggggagacggctgctgtactgttagctgcagccgtgccggggcgtgcggtcagctcgaccgtcagttccgtgtcgtcggggggcatgcagcttacctcgtcgcagatcatccattcgattgcggccttgacggtggctttggccgcggcgagttttacctgctgggcgaagcgggccttgccggcgaaggtgccgatctccatctcgaatgtcttgtcgtaatggcgttccggcgtcgaaagctgttccacgccgccttcgagcgttacgccgtcgcccggcgtaaagacgatggccgtagcgttggggccgccttcgtagggtcccatgtcgtacatatggtagggggcgggaatcgacgcttcgagaacgatccggtagacatcgccttcgaggtgctccacggagcttttccagctgacgttctgagccgtggccgccgtgaaagcgaacagcgcggcaaccggcagtaaaagtgtgcgaaacagtttgtacatagtcgtggcgcgttataatttgtgcaaagataggtgttttttgcggataaattgctacattcgcacgatgattcgcctgtcgctcataatccccacgcacaataggtccgaacggcttatcgccgcgctcgaatcggtcatacggcaggatctgcccgccgccgactgggagtgcgtggtcgtgagcaacaactcgacggacgacaccgtcgcgcggttcggggattttgcggcccgttatcccggcctgaacctgcgcctcgtgacggaggacggtccgggcgtctcctatgcccgcaaccggggcattgccgagacttcggccccgctgctggttttcatcgacgacgacgagcgtatcaatccgggattcctgcgcgcctatgccgactttttcgatgcgcatcccgacgccgtcgtggccggggggcgcattatcgccgagtatgtgacgggacgtcccgcgtggctctcgaaatataccgagatgccgatcgccaatccgatggatttcggcgacgccgtgcggccgtttcctgccggccgggtgccgggcggcggcaacatggcgttccggcgttcggcggccctgcgctacgggggcttcgacccttcgctggggcgtgtcggacggatgttgatcgggggtgaggagaacgatttcttcgaacgcctgatgcgcggcggcgagacctgctggtatgtgcccggtgcggttatgtggcatatcattccgcccgaaaaactgaccgaatcctatttccgccgcctttgttacaacgtcggcgtgagccagcgtctgcgggcgggcatgtatcgccgctatccgaagacgcttctgttcgagtgcctgaaatggggcgcgacgctgctgctgtcgattacgatgccgccccgcaagtcgctttggctgatccggatgcgctatgagatcagccgggggcttctctccgatccgcaatgaaaaaccgcagtccggagactgcggttctgtctgtcttgcgatcttctctttagaaaagatacttttcgtttttgaccttgttcacgagccgggagatgtcctcccacgcttcttcgccgaatgtcgtgccgacgacctcgatgaccttgcccgccgtgatggcgccgatcgtgccgcactggcgcagcgaaagtccgtcgcagagtcccgaaaggaatcccgcggcgtagaagtcgcccgcacccgtcgtgtccacgcgtttggccgcggccatgatgcctacatgcaccacttcgtcgccctgcttgatcatggcgcccttgatgccgatcttcaccacggccagctcgcacatttcagaaattacctgcagggcgttcagcggttcggcttcgcaggtgaaggtcttggcttcgtcctcgttggcgaaaacgatgtccacgtagtcgcggaccagaccgcgcaggaattcgagattctcggccacgatgttgaagctggccagatcgacggcgactttcagcccgcactccttggccgtcttggcggctttgagaatcaggtcgtggttctgcaccagatagccctcgacgtagagacagtcgtaatggtcgaaaatcgacgcttcgatctcttcggccgtcagttcgagcgcggcgcccagatgggtgaccatcgtgcgttcgccgtcgggcgagatgagcgacacgcatttgcccgaacgctccgtgccccggaagatgaccggttccacacccaagttttcgagcgcctgcacgaaaaagtcgcccgtcgtatcctgtccgaccttgccgatgaacccgacatcgcagcccagtttggccatggcgcggatggtgttgcccgccgagccgccgagtgacagcgagtagggcagtcctgccacggatttcgaaatttcggtctgcagggtggtgtccacgaggctcatcgagcctttggcgagtttgaagcgactcagcacggagtcggatttcagattgaccagcatgtccgtcagggcattgccgatgcctataacacgtttcattcggtaagttcgggattgcgttttggattatatggagagtatcttgaccagttcgaggtccttgcggtcgatgcccttgtcgtgcttcacggctttggcgaaggggacgtagacgatcttgccgttcatcgtgccgatcatcacgttgcgctgtccgtcgagaagcgcttcgatggcggcttcgcccatgcgcgaggcgaggatgcggtccacggccgtcggcgatccgccgcgctggatatggcccagaatcgtgacgcgcgcgtcgtactgcgggaactccttcttgacacgttcggccagcgccgtggcgccgcccgtcttcgggttctcggccacgatgacgatcgccgagttcttgctcttgcggaagccgtggttgatgagttcggccagctggtccacttcggtttccatttcgggtatgatcgccgcttcggaacccgtggcgatggcgctgttcatcgccagataacccgccgtgtggcccattacctcgacgaagaagagccgttcgtggctcgacgccgtgtcgcggagtttatcgaccgcttcgacgatcgtattgagcgccgtgtcgtagccgatcgtcgagtcggtgccgcccagatcgttgtcgatggtgccgggaagtcccacgatcggcacgttgtattcctcggcgaagatgccggcgcccgtgagcgaaccgtcgccgccgatgaccaccagcgcgtcgatgccggccgccaccatgttgtcgtatgccgccttgcggccttcggtcgtggtgaattcctgactgcgggccgtcttgaggatcgtgccgcccaattggatgatgttgcttacgctttgggatttgaacgatacgatctcgttgaatacgagacctttgtatccgcgcatgatgcccttgacggcgaagccgttatagattgcgctgcgggttaccgcgcgtatggcggcgttcattcccggagcgtcgccgcctgaggtcagaataccgatgcatttgattccagccatagtttttcgtttagaaaacaaaatcgctcaaaggtagtaattatttcaattttttcaaaaaacgagggcggttcccggaggatccgccctgcgtttcgaaaaaactttttattttacctaacgcctgtggcctttattcggtctgctctgcggggactcggccggcgtccggctgtcggaccgaatccggttctgcggattcggttttgtcgcctcccgtctgcactttcacccgtttgccgttggctttcacttccagtccggccttctccctgtcgatcgtaatgtcgatcgactgattcgggacgctgatatgcagcgttttgcggccgtcctcgatgacgttctggctgtcgtactcctccagcagccgctcgaccgtcgtggtgtcgttgtcgatgattatctcgctgttgagcatccgttcgataacgctgtgtctggtccggatacggtcgccgacgttctcgcggatggcgatacaggtgcaggcgatgataccggcgagccacaacaggaagattaccagtatggtcttgcctccgggcttgcgcgaagcgatgaggcacatcagtacgtaaatgagcagtattaccagtatcagtacaataagtatgccgagcgcgggaacccacagcgtcatgcccagcgggaagaacggaatggagatgctggcgccgccgatgatgagcgcgaagagtccgataatcagcgcgcaggccgccatgatgagtccgaatacgagcactccggcgaagagcttgaggaggatgagcaccaccttgccgaataccgacacggcttcggcgacgatgggtttggccttggcatcgggatcgcagctcgcgctggcttcggtggtttcgcggatcgactgcgccgtgatcttctcgccgttcatttcgagtttctggcgcgccgtgcggggagccggaacggcaaaccacatgatgatgtagcagatgacgaagatgccgaacaggttgcccatcatcggaccggtccagcgcatgaagggaatccactggaagacggtgagcagtatcggcaggaacatggccagccgtatccagaccggatcgacgtcgaaatacttgccgatgccggcgcagacgccgcccagcttggcgttttcggtgtcgcggtagagacggcgcgggatgcgcggctcttcggggcttcgtcccggctcctcttcggagatgtcctcggcggtgcccatttgccggatgatattcagaatcaggggcttttcgaccacgcgggtgctgtcctgcgccgagaggatcagctcggcgatgcgggcttcgatgtcggcgacgatctcggctccgtcgggagtctccttgtaggtctttttcaggctttcgagataggcttccagctcctgataagcgtcggtatccatcgtgaacgccacgcccgaaatgctgcatttcttaacctctttcatggttgctcggtttgggggttagttgcggccgacactgccgccgctcgacttgttgatgctggtctgacagtcgccgctgtagcggatcgaactgccgctcgatgcgtcggcgtgcagacgctccgtgcagtttacgacggctttcgccgcgctcgaagtgtttaccgagcactcggcggcgacgaagtctccggccgaaagtttcgcggccgagctgaggtcggcggtgcacttcgcggccgagcctttcagcgtgattttcgatgcgctcgaagcctccacgctgcaggagaccgcttctaccgaggtgttgattttcgatgcgctcgatgcggctacggcgcaggattgggccttgaccgaaacgtcgatctttgcggcgctcgatgcgtccatggcgaatttgtcggcattcagcaccacgtcgcccgaaattttcgcggcgctcgatgcgtcgagggcgcggatgctgccgttggccggaaccgtcacggtgacgtcggcgttcgagaggttgtttatcgacttgtcgatcgtcgcggtgagccggccgccgttggcttcgactacgacgtaatccataacgttgtcgtcggcggcgatggtgattttgccggaggtcttgtcggtgatgacgaccttgacggcgcgtgcggcgtcgatgcggtcgaaggccggggcctcgatggtgcgtgtgacgatgttgccgctgcctttaagccctttgccgaagaggacggacggcgctgcgatgcagacgaaatagaccgttacggagagcatggcgcccagcaggactgcgatcaggagtatctttttcatggttgtgattttttgaggtttttattgtttgccgtgacgaatgatgcggatctgtcctacgagttcgtcccatgcctcgtcgagcgtcgtgaggtattcgcgccccttttcggtgagcgtgtagtacttgcggggaggtccctgcggggactcttcccagcggtaggtcagaagccctgcgttcttctgccgcgtgaggatcgggtagagcgtaccctcgactacgatcatctcggcctgcttgagttcggcgatgatcttcggagcgtatgaatcttcgcgggagagaatggcgaggatgcagtactccagaattcctttgcgcatctgcgcttttacgttgtcttcggccattgtgctattcggttaatcgcttcggagccttcggtacgatcagccagaggatgatgtagacccagatcgaaaggccgccgaagagtatgaggatcagtgttgctatgcgtatgagcgatacgtcgagaccgaagaattcggccagtccgccgcagacgccggcgatgatgccgtcgggagtgcgcagcagtctcttggtgttgttcgttgtcatggttttatcggtttttgttgtgaatgctgaatttgcgggcgggttcttccgggatgacgatccagagaatgatgtaggcccagatcgagagtccgccgaaaagtatcaggaacagggtgatcaggcgcaggacggtcgtatcgacatggaaaaattcggccagtccgccgcagatgccggcgatcgaacggtccgtgcgcgagcggaacagtttgcggggttctggttcgggctgttcctcctgcggggcgctgccgcggcgttcgccgaagtcggcgggcgatcccatgcggttcatggtctggcgtaccgtatcgagggtgatgacccgcatcggcgacgaaacgatctcgcggaaaatctcggcgatgcgcgattcgatgtcgcccatggtctcggtgtcgtattcgggcaggcggctgcggatatcttcgagatagtttctcagtacgcggtaggcgtcttcgtcgagcgtgaaggcttgcgaaccgatgtttacgtttactgtctctttcatagtcgtagaagctgatttagggttaatgtgtccgggttactgctactttggtactgcaaatataatacagtttttagtattatgcaatacaaagtactatattttcttcaaaaatatttccacctatgtttatagatgaccctcattttgtccggaaaaatgctgccggaccgaaaaaaatgcgaaatttgacgttgcgatgttgcgttttgcccgtcggcttcgtcttacagatacaatggaggaattcgaattcacccgatatgtcgtgccgctgcgcgatcgtatgttccgctacgcgcagagtctgctgctttgcgccgacgaggcggaagacgtgacgcacgacctgttggagcggttgtggcgggagcgtgatcggctcgacggctgccgcgacgtcgcttccttcgtgatggtcgcggtgcgtaactgctgttacgaccggttccgcagccggcaggccggcgagcggcgcgacaatgcggtcgcggggtgggccgaacgttcgacgacgggcgatgcggagggctgggaggcgcgcgatctggtgcgacgcgcgatggcctgcctgcccgaacggcagcgcgaggtgctccacttgaaggatatagaggggtatccgacccgcgaaatcgccgagatagcggcgtgcgacgaagcgcaggtgcgcgtgattctctcccgcgcccgcaacggactgagagaggtactgaaaaaaatgatggacgatgaaagagcaggacgaaagaattgagcggctgctggagcgctatttcgatgcgcggacgaccgaagccgaagagcgcgaactgcgcgactatttccggtacgtggatgagattcccgcatccctgcgttatgcgcggacgatgttcggcggattggacgctctggccgaagagcggtatcccggcgagggcagtgcgcaaaccggtccggctgtccgtccggcggaagggatgcggcgttatgaaacgcgctccgcagccgggcgcggggcgcggggcggccggaaactccgtcccctctggggtgtggctgccgctgcggcggtggtgctgggcgtgtttttctatgccgaatatctgcgcaagccctattgctatatcgacggtgtggcgatttacgacaaggaggctgccatgcaggcgacggtttacctgcagggactctcggatttcggcgatcaggtccgcatggtggatgaactgataataaacgaataaaacgatacgggtatgaaaaaactgtttgtttgtacgggagcgctgctcctgctggcggtttcgcctgctgcggcgcagttctttgtttcgctcgctccggcccatgaagtcgctgcggcgcagaaagctgattcggcctgtttccgccgggccgacggaaaaccggttgccatcgagaccgtggagcgcgattcgacgggaatcgatacgctccggcggatcgatacggtggacagcgacctgatccggctgcgcgacggcggccgtgacggcaacatgatcctcgaagtggcgggtttcgggcttacgctggggcatacgccgatgcagcgaatggagctgaaaaagccccgcgtctggttcaatgcattcagcaatatcgaattgggattcacgcagttggtcggcgtcgactattcggggtatgcgtccggggaaaagggctttctggatcagcggctgggatcttccttccatttcagtttttcggcggtgcagctccggctggcgctcaaccggagccgttcgctctgcttgggggtgggcatgcagtacacgctcgacaattaccggctctctgacaataccgtcacgctcggcaacgacggaggacgtatcgttccggtcgcgctggacgaacccgccggcaagtcgaaagccgtcacctcctcgctcggcattcccgtccggctgacttacactccggcgaaacaccttcggatcacggccgtcgcctattccgacttcctcttgggcgccgatgcgatttataagaaaccgaaggagaaaaacagcctgtccgggttccgggcctatcagttcggggtcggtctcagtgtcagctatcgtggtttcgggttcttcacccgttacggcgtgactccgctgttcaaacagcatgcgggacccgactgccatgccttctcgttcggtgtcggactcatgctctgattggaacctaatacgtgtcgattatgaaacgattgctgttgattctgattctgctccttccgcagctgcttgccgcgcagagtgccgaccggactgccgtgcagagcgttgaccggactgccgcgcagactgccgaccggataccggccaattcggccggccaccgttccggccgcgaatatgccatcgaaaccgtggaccgcgattcgctggggttcgacaccctgcggcggctcgatgcgatgggcggtgagctgatgacgctgcgcggagacgggcgcgaggggagtgtggtgctcgaagtggccggtttcggcctgacgctgggacgtgctccggaggcggattcgcaggcggatctggtcatgaggtccgggcgtgtgaagctctacttttttaacagcggcgaattcggctttacgaagctcgtcggcgtcgattacggcggctatgcccccgaagagaaagggtttctggatcagaaactggggaattcgttccactgcgccgcttcggtgatgcaggtgcaggtcgccctgaacaagagccggacgctctacttcgccaccgatctgcggttcgccgtcgacaactaccggcttgcggatgccggaatccgcttgggctacgaaaagggccgtctgctgcccgtggcgctggacgaaccagccgacaaatcgaaattcgtcacttcgtcgctggggattccgctccggcttatctacaagccgttcaaacattttcaggcctcggtggtcgcctattccgatttcggaatagagctgacgtcgctccacaagaaaccgcgcgtggagtacgagctgtcggggctgcgaacctatcagttcggtgtgggaggaacggtttcctattacggcatcggcatcttcgccagctacggcgtaaccccgctgttcaagaagcatgcgggaccggagtgccatacgttcagtttcggcatctcgctgctcatgtaaccaaatacgaacggacatgaaacgactattgttgattttgatactgctccttcctcggctggccgcggcccagagcaattccgtaaacgactttttcagccgttatgccgccgccgagggctttacgagcgtgcagctggaacagaagatgatgcaactgatgagccgtcaggccgcggaacggggcgacaaggggcttgccgtactgctgaaggacattcagtatatccgcatcatcgctctgaaagagggtgacggcggtcggttcgtccgggatgccgaggcggctgttgccgccgaccggaagtttcagcctgtcacttccggctcggagaacgggcagaccacgaagttctatatccgtgaaaccgcgctgtcggtcaaatcggaactggtgatgataacttacggcgcgaaggagacagtcgtggtgaatatcttcggagtgttcgatctccggcaggtcgcccgcctttcgtcgatacgcccgaaataagggccggattcggaaaattcgggcggcttcatcaagcggtcgccggtatgaaaagtagatgcgccacggattccgtggcgtattttttctgtattctgtgccggatttcggcgttgtatggacgatgcttgttgctgtctgatgagcggcatttgctgcatgcgaatcctgcggaagccggcgcggcttctgcgtttttttattttcggagccgattcccgtgctgttgcagggccggtgtctgcgtcgttgcggacggaatctcggaggctactccggggatttttcactctccgcccggatcgtgtcggtagccctcctcgtcgtagacggggcggtcgttctccgcatcttcgtgcgctgcgtccggaatccggtcgtcgagcgggatttcggtctccaacagctcttcgtcgatcaggttttcgtcgcgttcgccgcctgcgaatccgttgttctccgtggagatgacagtgcggtcgttgggaaattctacgatgtccatgcttttgtcgttttggtttttcgcgtttcgtcgcaagaacgataccgttgctgcggaactgtgcggaagaaaagcacggtctgccgtcgtttcgggtattcgccgggacgctccgcggctgcggccggaaatagtgcccggagaatcgtgcccggagagggatcggggtgaatgactgaggagagttgccggcggtgagtcgccggggaagaaagtgggggacatgatgcaagcgtctgcgttccggagcatgaaaaagggcgggaagcatattcccgcccttctccggattgttccggcacttttattagtcttcgaacttcgcggaaaggaactcgcggttcaggcgcgcgatgtgcgcgatcgaaatcgacttggggcactcggcttggcaggcacccgtgttggtgcagttgccgaagcccagctcgtccatcttggcgaccatcgccttggcgcggcgtgcaccctccacacggccctgcggcagtttggcgagcgacgatacgcgggcggcgacgaagagcatcgccgaaccgttcttgcaggttgccgcgcaggcgccgcagccgatgcaggcggcagcgtccatcgactcttcggcgtcggcctgcgcgatcggaatcgcattggcgtcgggcaccgagttggtgcgtaccgagatgaaaccgccggcctgaagaatctggtcgtaagccgagcggttcacgacgaggtccttgatgacggggaacgccgccgagcgccacggctcgatggtgatcgttgcgccgtccttgaacttgcgcatgtaaatctggcaggtggtagccgcctgaccgggaccgtgggcgtgaccgtcgatgtgcagtgagcacatgccgcagataccctcgcggcagtcgtggtcgaacgctacgggctccttgccctcgtggatcaggttgttgttcaagatgtcgagcatctcaagaaacgaagtgtctgccgagatattctcgactttgtacgtctcgaagccgcccttggtcttagcgtccttttgacgccatatctttaatgtaaaattcataatttcaaattgttattaaagttcaacgtcaaaagcttagtctttgtagttgcgctgagcggggtgtacgaattcgaagttcagcggctctttcgtcagttcgggagcggcgtcctcgcccttgtattcccaaacggcggcgtatacgaagttttcgtcgtcacgcttggcttcgccctcttcggtctggtgctctacgcggaagtgaccgccgcacgactcctcgcggttgagtgcgtcgcgcgccatcagctcgcccagttcgaggaagtcggccagacgcagcgccttttcgagctccacgttgaaatccttctcctgacctacgactttcacgtctttccagaactccttgcgcagcgcctgaatttcgctgatcgccttttcgagcgactccttcgagcgggccatgccgacgttctcccacatgatatggccgagtttcttgtgaatgtcgtccaccgactgcttgccgccgatcgacagcaacttggcgatcttctccctgacgcccttttcggcttcgtcgaaagccttggtgtcggtcttcaccttcggagcctgaatcttgtgcgagaggtagtcgccgatggtgtagggcagtacgaagtagccgtcggccagaccctgcatcagggccgaagcgccgagacggttcgcaccgtggtccgagaagttggcctcgccgatggcgtacaggccggggatggtggtcatcaggttgtaatcgacccagatgccgcccatggtgtagtgcacggcggggaagatctgcatcggctgctcgtagggactaacgtcggtgatctcctcgtacatgtcgaacaggttgccgtaacgtttcttgatgatctccttgcccagacgctcgatggcggtcttgaagtcgaggaatacggccagtccggtctcgtttacgccgaagcctgcgtcgcagcgctccttggcggcacgcgaagccacgtcgcgcggcacgaggttgccgaaggccgggtagcggcgctccagatagtagtcgcggtcctcttcggcgatgtccgacggcttcttggcgcccgaacgcagcgccttcacgtcttcgagtttcttgggaacccagatgcggccgtcgttgcgcagcgactccgacatcagcgtcagtttcgactgctggtcgccgtgaaccgggatgcaggtggggtggatctgcgtgaagcaggggttggcgaagcctgcgcccttgcggtagcactggaatgcagccgagccgttcgacgccatggcgttggtcgagaggaagaatacgttgccgtatccgcccgttgcgatcacgacggcgtgtgcgccgtggcgctcgatctcaccggtgacgaggttgcgggcgatgatgcccttcgcttcgccgtcctccacgacgatgtcgagcatctcgtgacggggatagctcttcaccgtgccggcggcgatctccttgttgagtaccgagtaggcgcccagcaggagctgctgacccgtctggccgcgggcgtagaacgtacgcgacacctgcgcgccgccgaacgaacggttggccagcaggccgccgtattcgcgggcgaaaggcacgccctgtcccacgcactggtcgatgatcaggttggcgacttcggccatgcggtagacgttggcttcgcgggcgcggtagtcgccgcccttgatcgtgtcgtagaacagacggtataccgagtcgttgtcgttctggtagttcttcgcggcgttgataccgccctgcgcggcgatcgagtgcgcgcggcggggcgaatcctgaatgcagaatacctttacgttatatcccagttcgccgagcgaagcggctgcggatgcaccgcccagacccgttccgacgatgatgatgtcgagcttgcgcttgtttgcggggcttacgaccttgatagctgccttatggttgctccacttttctgcgagagcgccggcaggaattttagcatctaatttgaaagccatatctgttgtgtgtttattgttctggataatcggttagcaggcgcctgcgcagcaggggcagacactcttgatgaagtagatcaccacaacggcggcgaagccgaggaagatgaccgtcgccacgatgttggcgatgcacttcaggcggggataccacgtgtcgttggcccatcccacggtctggaacatcgaccatacgccgtgcgtgaggtggaaccagagggcgaagaaccacacgaggtagatcaccacgtaataccactgcgagaaggtgtaggcgatcagcgaagcgccgtccgccggatggagtccgagcgagttctcgtggccgcccaatacctccacgagctgcattttagcccagaagttgaagaggtggagcgccagaccgcccagaatgatgaatcccagtacgagcatgtttttcgatgcccacgacacgcccggttcgactaccgtcacggcgtagcgctgactgccgcgcgccttgaggttctccaaggtgaggatgaccgcgtagatgaagtgcacgacgacgccggccgccagcactgcggtgccggccagagcgtaccagttggctccgagcagcgcgcagatcatgttgtaagcctcaggcgagatgatcgccacaatgttcatggacatgtggaagagaataaagagcacgaggaaacaccccgttacgctcatcactaacttcttgcccagcgaggaattagataaaaaacagctcataatgatttaaatttgtttatatttgttaaagttttgtgttcccggacgcaaagatagccattgtttgcagaataacaatagaaacgggcgggaattttaggccgaaaaggtgggattttatgaccaagaaagaactgcgcgctgcgatgaaaaaacggaacctctcgctctcttccgaagagcgtgccgcggcgtcggagcgtatcttcggccgggtggagcgtctgcccggattttcgcaggcccgctgcgcggcgtttttctgcgcgctgcccgacgagccgcagaccggtgcggcgctggcgcggtggagcgccgcgaagcgcatcgtcgtgccgcgggtcgagggcgatgcgatgcggttttacgactatgtgcccggagagctgtgtcggggcgctttcggaatcgccgagccgtcggctgcggaacggccgtgcgatccggcggacatcgacttcatcgtcgttccgggagtggcttttaccgccgccggagcgcgtatgggccgcggccgcggatattatgacaaatatctgtcgcagtccggtttccggggtgtgaaagccggcgtctgctatgcgcatcagctggtcggggagctgcccgtcgagccgcatgacgtctttatggattacgttgtcaccgacgattgaggatatggatgtgaaagaatttatcgccgcatacagggaggctttcggcgaacggcccgaactgcccctgctgttccgctatacggacagtccgatgcgcccggtcgaaaaggtcgggggctgtttcttcaaggcgctggccgaagcgcgccgggggctgcccgtgagtctgaatgccggcaatatcggctgcgggggcgggaagttctacacgggattcagcccgatgcctgaattcgttccgcagttcgtgtcgctcaaggagcgctataagcggacgcccgaaatggtgctggagttcatcgccgctctcgacctgcgtcccgcgccgaaggcgtggctcgaattcgtgcgggcggacgttgcggagacgttcgacggagcggagggagtcctctttttcgcggcgcccgatgcgctggcggggctggtgacgtgggcgacgttcgacaacaatgcggcggacgccgtggcgtcgcccttcgggtcggggtgcagctcggtcgtggcgcaggccgtgcaggagaaccgcaacggcggccggaggtgttttctgggccttttcgacccttcggtccggccgtgggtggagccggatgttttgagcttcgtcgttccgatgtcccgctttcgggagatgtgcggcatgatgcatgcaagctgtctgttcgatacgcatgcgtggagcaaagttcgcgaacggattaataacgacaattgattttatggaaaaaagaagagcggcgctggtgcttgccggcggcggagcgcgtggagtggcccacatcggggctatcgaggagttggagagtcagggattcgaagtgcatgccgtggcaggcacttcgatgggggcgctggtcggcggcatgtatgcttcgggacacctcgaagcattcaaggagtggatgtatacgctcgataaatacaaggttttcagtctggtcgattttgcgctgagcaccgaaggtctcgtgaagggaaaccgcgtgatcggcgccatgaaggagctggtgcccgacgtgaagatcgaacagatgccgctgccttttgcggcggtggcggccgacctgctgaccgggcgtgaggtcgtgctcgaacggggcgggctgtacgacgccatccgtgcttcgatttcgattccttcggttttccggcccgtccgccggggcaacatggtgctggtggacggcggtacggtcaatccgcttccgctgaaccgcgttcgccgcgaaccgggcgatgtgctggtcgccgtggacgtgagcgcgccgttttccgacgagatggccgcgcgggtcaggtcctcgctgaattattataaggtgattaccgcttcgtcggagatcatgcagcagcatatcgcgcgtctgatgtgcgagatctacaaacccgacctgctgatcgagatgccggcggaccgtttcggaatcttcgaattctaccgtgcgcgggagatcgtcgaagccggccgtctggcggcacgcgccgcactcgaacagcacatggtcgtcgccggatagcggatatcctctgccggaatgcaggaaaaaccgggccgttgtggcatgatctttgtcttggggaagaagaaaagattgcgacggcccgaattttgaagaattcaaaagtagtgacgcaacttcacacagatttgagggccgtcgcaatggtttttatgacgcggatatctccggggacggacgcagtttttgtcctccggggatttttatagtactctgcactacaaaggtaaataaagtttctgaaattgcaatgcccttgaccgaaagtggtattcgtgcgcctaaaatatggaaacgggcggactgtttgggcatcggggcttgttgttttctcgtatatgggctgactttacggcttgttttgccggttttttccgcggctgtaaataaaaacgttccggccttgccgccggaacgttttcgtgtaatccgttttatgcgtgactaacgtctgtccttgccgtagacgtaggccgggatgcggtggctgcgtttgccgatcggaacgccgatgccgagcgtgacattcatgatgctctgtctgactgggacgaactgcggcgtgtgtttggttatcaggacgtccgtgccgatgaagaagttgatccagctggggcagaggttgagtcccagccccacggcgccgccgcgattgtcgatcaccgagtagcttcccgtgagcgtgaaccagcggatcgggtggaaattgaccgaaccggtgatgttgtgaaaggtcttgtactcccagaaacgggccgaatacaacagtccgatgccgattttgtggcgccatacttcgtattcgagtccggcgttgatcgttgcgcgcagcatgcgcgacacgctttggggcgctcctttgtgaaattccagcacgtcgatgtcgaaatcgggcgattcggtgccgtcctccgtgacgttgacgcccgtgaacgaaagctctttcgacgagaagcccgtgacgtttttcttcttgctccagccgatgaatcccagatcgtttacggccagcgacgcctgcaggttgggcaggatgtcgtacgtggcgcccagatcgacggcgaagccgtagcctgcgggcgacgtgggtttgaagtcgatgtcgtccagcttgtaaacctcctcgccggcgtcgttgcgcttggtcgtgacgtcgagaccggcggcggtgatgtcgagtccgcctgcggcgtcgatccgccactcctcttctccgtgcgtcacgttgaatcgggtgaagtacatgcgggcgcgggcggctccgacgaggaatttgccgcggacaccgatgtaaagtcggtcgttgagcagcggaaacgagtagctgaaggccgcttcgaggtagctgtcggccgtgagcccgatgttgtggatgtcgctgcccgtgccttccttgaggaatgcgaagagcgagtagggcagcgtagcgtcggcggtcgcgcgggcgttgaggtcgaacgaccagaaattcttgtggttgcgcgtgaaggcgccgaagccgatgaggttcacgcgggtgtcgatgcccagcaggttgtcggccttgagtcccgaaagcgcctgtctggtcgaaacggcttcgtcgagcagcgtgaccagtttcccgttgcggggatagagcagtttgtccacggccagattgccgctggcgttgatgtcgatgctgcccagaccgggaatgttgacatagccgcgcagcggtgcgaaagccgggttgaactgactgcggaaggtcgttccctccatgaagtaagccgtcgggttctgggcggcaacgcctgatgccagcagcagcgttgcgagaaaagcgtatgtttttttcatgtgcggtgccgggttagaggttgagtttcagaccgccgcgcttgacaagacgcagtgcgatgacgattttctggtcgggcgtgaatccggagccggggaaatatttctccagtttgacggggaggatgatctccgtgccgtcgatgatctggcgcaggtcgttctcgtggagccgcgtttcgccgatctcggtctttacgttgggttcgacgcgtatgtcgaactccacctccgtggggtagaatcgggggctgaactgcaggctgacaggcagtgcgctgatgatttcgccgtagatgtccagcgtgtttttgggatttgccgtgcctttcggatcgaggttgtcggccagcatgtccaccacgtcgctgccgaggtcgatcctgccgaggtcgtaggttacgtcttcgattttcagatccgtcaggtagctgccggccaaatctcggacctcgccggccagctcctcctgcaatcccgtggtagcgcggaacatcgtgatgaatacctgcttgaaatctttcgggtccgtgttcggcggaagcaggggcaggaacgtgccgagatacttgtcatagagcaggtccgctacggcgttgattttggcgtcggacctcttcatttgttcgatcagttcgtcgagcagctcgtcgatataggacggggtgtgctgaatcttctgaagatccacgtattttccgcctgcgggcagcggcgaaggcagccagatatcggcttcgtcgaagagggctttgatgtcggtgccttccttgctcagttcgcccatgctgacggtgaccgtagccagcggcagccggaattcgtcgccgatgacgacgccgtccgtgtcgatttccgacagatcgtaattgttgtcgatacacgaagttacgagcataccgaacagaaacagtggtaaaatcaatctcatagttttgagggtgtttgcattggattgcaaatatatgccgttccgacgaataaaccaaagaattggacaaattcgtcagcggagcggacaaatcggcccgctatatcgtcctctgacgggcttcaggggtgcatctgcgggttttgcgaaatatttgttacatttgcgttgctattgtcgttatggccgaaaccggaaaaaacaacctcagggaacaggtggcgatgctgccgctgtcaccgggcgtctaccagttcgtggaccgctccgggacgatcatctatgtgggcaaggccaagagcctgcgcaaacgggtctcctcctatttcgtgcagagcaaggagcacagcgccaaagtgcgtgtgctggtgcggcagatcgccgagatccgccatatcgtcgtcagcagcgagaccgacgcgctgctgctcgaaaattcgctgataaagactctccagccgcgttacaacattctgctcaaagacgacaagacctatccgtggatcgtggtgcggcgcgaacattttccgcgcgtgcagtccacccgccagctgacgcgcgacggctcgcagtatttcggtccctacagctcggtgatgatgcagcacagcgtgctcgaattcgtgcgcgaagtggtgccgctgcggacgtgcaagctcaatctggcgcccgaacagatcgccaaaggcaggtattcggtctgcctgcagtatcatctgggcaactgcaagggtccctgcgtcggggagcagagcgaagcggagtacgcaaagctggtcgatatggtcgtcgcggtgctcaagggcgacctgcgccccgtgcggagctatctggaaggcgaaatgtcgcatgccgccgccgggttgaaattcgaactggcgcagcgctacaaacagcgtctggacgcgctggacaactattcgagcaggtcggtgatcgtgagcgcgaagatcgtcgatgtggatgttttttcgcttcttccggacgacgatgtggcctattgcaacttcgtgcgcatccgccacggctcgatcgtgggcgtctatacggtgaaactctctacgggcgtcggcggcgacgaacgcgacatgctgacgctggccatccagcatatcgtggagcatatcgcgggaacgctcgccaaagaggtcgtcgttccgttcctgccttcgacgacgctgttgttcgacggcgtgaccttcacggtgccgaagcgcggcgaaaaactcgaactgctggaattctcgcagaagagcgcccgcatctaccgcgccgagcagctcaaaagcctcgaaatcaagaatcccgaacgctataccgaacggctgttgaacgccctgcaaaaggagctgcgtctcgacagacagccgcggcacatcgaatgtttcgacaactccaatctgcagggggcctatccggtagcctcgtgcgtggtcttccgcgatggaaaacccgcacgcaaggagtatcgtcacttcaacatcaagaccgtggaagggcctgacgattacgcttcgatgcgcgaagtcgtcttccggcgttacagccgtcttcaggaagagggggccgagctgcccgatctcatcattgccgacggcggaaaggggcagatgggcatcattcacgaggtgctggagtatcttgggctggacatacctgtggccggactggccaagaacgaccgccaccggacctccgaactgctctgcggctatccgcccgtgctggtcggcatccgtcccacttcgccccttttccactttttggcgcacattcaggaggaggtgcaccgtttcgccgtctcgttccaccgtcagaagcgcagcaaagcgtttatccatagcgaactggagcagatcgaaggcatcggcgacaagacgatccgcacgctccttcagcacttccgctccgtggccaaggtcaaggccgctccggccgaggagctttcggcgctggtcggtccggccaaggcgaaaaaaatcagggctttttttgaaaaatagccggattctttgaaaattgcaaagattcgactatctttgccatcccgattctacggatgaggtttgcccggatggcggaatcggtagacgcgttggtctcaaacaccaatgacagcaatgtcgtgccggttcgaccccggctccgggtactgattaaggtgtcaaaactttgattgtcaaggttttggcgccttttcttttttgccatgcccttctgcggcggtttgcttttcgcagatttgttcaggcggtgccgctttttgagaaggagcgtgattttgcccgttcgggaaatttcctgcggcggagcatgatatgcgctttcgcgttatgccgtctctccggtgcgattttgagttttgatacttaagtttgccattcgagttcaatttttgcattaaggagatgcggggaaggcgaatgtcgtatatttaatgcaataaaaatcagcatgcatcccaaattccaaatatataccgatatttcgtctctgccgataagcgaacacgaggcctatcaggaggagggtttctgcggtatttgcacgggaggtaccgctgtgatagaggttttttcggtgcgcagtccgatttccgaaaacgatatcgtgacgattctgccgttgcagctggtgtcgatccgcgaggtcagcgacgatttctcgatgacctttttcaaagtagacaaggggatgttcctcgacatcatgagcgggttggggaaaataaccccggattttttcttctatatgcggaagaacttcctgtacagcgtgaacgacgtggaccgaaaccggtttctggggttttgccgggcgatcgatctcaggggcagcaacaacgatccccttttcctgcgggagaccattctgcacttgctgcggatttattactgggatttctacgtccttttccagcagaagacgagcgccaagaagcgccctttcgtgaataccaacaaggagaatatcgccatgcggttcgccatgctggtcagcgaacaccacaaaacgcgcagggaggtcgctttctatgccgataagttgtgcatttcgcccgtatatctgaccaaagtcattcaggaagtaaacggccagtccgcccatgaaatgattgcggactacgtcgttatcgagatcaaaaccctgctccgggacgcgaggctcgacataaaggccgtggcacgacaggccggctttgccaaccagtcttcgctgagccgctttttccgcctgaaaacgggcatgtctcccacggagtaccgccgcatgatccatgccacaagataagttcttgttccgtcctcggtttcggaattccgtatcgtgcaaacccgtccgatgaccgatgtgcggcgttcgtaaacagacgcgccggtttttctgccgctgttccgatcggctccggcggagggtcgttttgttccgggaaccggaggtaaatcgttgtatggcagacaacgctaaactaatctcctgtgctccggctcccctgaacaaaacgccgttccttttacggcttgtgacggaattgctccgtaatgtcttccattgcgcccgcaggaccgattctgtagagccgctgattggtcgtcggtgaagtcagcggccccagcgactcgacccagccgcccagtttgatgtagtcgaacacctgcggcgcgaatccttccggcaactcctgccgtcccgaataccagccgacgtgcaggaccggcaactcctgccgcacgacctccgccagccgggcgatccggtgcggcgcggcatccccgcccataaagcagacgcaggtcaccgaccgtccgtatcgctccagcagggcgcgcagttccggggcgtcgagcacatgccccgcatcggcctgcaggtgggggctatgacaccccggacagcggttcgggcagttggcgatattgatcgccagcgtcgtttcgcccggaatctccgcgaatacgatgtcgaaattgtagtatcggactactgtttccggagctgtcatacggcctcctgagcgggcgaacttttctgtccggccggttctttctgtgcgagcggttcctgctgcgggtgcgcaccctgctgtccgggtgtttccgtgccgcccgccgccggtttcatgttgccgtaatagcggcgttcggcctcctgctggcgtgcggccgagaagttcgagacccgtttcatgtagccgatcacgcgcgtcaggtaatccagatcgtcgctatggcatgcgggacacgctttcagatagcgtttgtcgatatgcccgcacttgttgcagaccgtattgggaatgttgaacgtaaagtagttgcagccctcggccgcggccacgcgcagcaggtggcggtactgctccttcgaaagatgctcttcgagattcatgtgcagcgccgagccgcccgtgaggtggtcgatgtagcggcgtccgtgcagccggaatttgtcgacgacgttcagcgactggtcctcgacgacgtagaaataggagttgtagcagtcgcgcggcacggcgtatccgtcctcgcggtcccatttggcgtgcttcacgccgacgttttcggcggggatcatctcgcagttgaacatcagctccttggtgcggtatttcttgttgtaacgctcgatcagccccagtacgttctgcacgaaagcgacgtagtcgtcgttgtcgtcgatgcggattcccagaaattcggcggcttcgaccagtccgtttacgccgatggtcaggtattggcgcgaaaggttgatgtagcccgcatcgaagagcggcagcatgcctttggacttcagttccttgaggttttcgttgtaagccgtctgcactttgtgtaccagatccgtgatctcttccagataggtgagatagtgcatgccgttcttcacggcgtactggatgcagcggttgaggttgatcgtcagcacgctcttcgagccggtcgagacgccgcccgcgccgagcgtgtagctgaacccgttgtcctgaatctcgttccgcaggcggcagcagctcgacagcgagtcggcgttgtcgctgatataggtgaagaacgagtgcccctcggcgtacatctgcgccgtgatgtcgccccactcccggtccatcacgtcgccgtctttggtcagcagcgccatcgtctctaccgggaaagtcagcacggtcttggtgcgctcgcggttgaaccacgtcatgaaacgcttctgcagccacgacagcgactcccagtgcggatgcgaaccgtcgggaaaaacgaactccccgaacaggctttcgaagtagtagcggtcgtagtaggccacgttccagaacacggcttggaagttgcgcgccccggtcggctggttgatcgagtagacgatctgttcgaagcagtcggtgattatcttgtctattgtccggcgtttcttcgagaggtcggccacctcgtcggcccgcttgtagtaatcttcgccgtactcctgctcgatgaaatagttcatgtacatcaggaattcgggcgtggcgcatgcgcccgaaagcatcgacgacacgatgaaaaccatgttgacgaatccgccgcagaacgatttgagattcgtcggacgggtcgagttgccgcccaccgagagtgtgccgcccaagagccacggatacatggtgatcgaggcgcagtagttggccatcgacgtctcgtcgttcttgtagatgaagtgctccttgagcaggtgcaggtatttgtccgacagttccttgccgtacatctccttgatgcggtcggtcagcaggcggcggttcaggcggatgaagttctgcttcggcagctcgccgatcagcgtggcgatattcttgttttcgacgttggcgttggcgtcgtatttcgagccggtcgccgggttcgaggcgtcgcagtagttgatcagaaattcgagtttctcgcggtcttcgcgctcttcggtgtgtttctggcggtagagcatgtagctcttggccaccgcgaagtaacgctcggccatcagcgccacttcgacctgattctgaatctcttcgacgctcatgccgtcggacacgtgtacgcggctcagtatcgacgtgatgtcgtcgtcggtggcgtagctgccgaccgaaaggaaggccttgcgtacggcgcgtttgattttctcgacggaaaacgctttgcgcttgccgtcgcgttttacgatgtaaagttcggaaatgcccatattttctcctgtttttgttgttggccggttatgcgataaagcccgcttttgccggcggacggccgcctgaaaagcatggtttcaccaaaaaaaatcagtgtaaaacaaagttgctgcaccgctctatatcccgaaagcgggtgccgtatatcggtcaggcaggtcttctgactcgctccttccgcacgccttcccgtccgacggacagtggctctgagagtgtgcggagcgcaacggagcttacagctacggggatagtccctgatttgcacaggagttcccttttgatcccaagccggcagccgccggcggggaaccttgaccgggagcaaatatagagattgtttccgaggcggcaatcgttcggcgctccaattaatgaacaaattgtaaacaatacggccgacggcggccgacgcggaaaaaatatgccgcgtccgccctcatgcggtgatttttcgcaaaagctgtccgcatgcacctctctttggggaccgggtggcgcaaaaccgataaattttgctacctttgccgccgtatgagagcatccgtcaaaaagatatacgcttcgttcggtcccgacgccttggtcgcgttctggctgggcgtatggtggatttgcaacctctttcaggccggtttcacggagctggccaacgacgaggcctactaccatatgttcgccgaaaacatctcgtggggctatttcgaccatccgccgatgacggcgctgctggtctggcttggggagcatctcttcggcggggagttcggcgtgcggtttttctttaccctgctgcagccgctttacctctttgtcttctggcgcatcatccggccctccgatgccgaccgccgcgatgcggggcttttcgtcatgctctcggccgcgacgctcatgctgcagttgtacggttttatcgccgtgcccgacggtccgctgatgatgaccgcggcgttgttcctgctcaccttcaaatggttcaccgaagggcggcgcgcggcgtggctctggatgggtgtggccatggcgctgatggcctacagcaagtaccacggggcgctggtggtgctcttcgcgcttgcggcgacccccccccgcgtgttcctgcgtccgaccttatatctcagcggcgcggtggcgctgttgctgctcgtgccgcatttcgtgtggcagtacgagcacgactgggcgtcgctggcctatcatctggcggggcgtaactcggtcttccggcccggttacgtcgccgaatacctgctcaacctgctggtcgtcttcaacccgttcttcgtgccgctctatgtccggtcgtggatcgccgtgaagccgcagaacgccgtcgaacgcgcgctgagattcattccggcggcgtttatcgtctttttcctgctttcgacgctgcgcggatacgtccagccccagtgggtgatcgtcgccgtgttcggactgctctatacgctctttacctacgcccggcgtcatccccggacgcgccgctacctgatgcgcatggggtgggtgacgctcgccctgatcgccctgacgcggctggtgatgatcttcaatccgctgggcatccgttacgaagtgttcgacaaccgcaccagttacggggagatcgccgaaatcgccgacggccgtcccgtcgttttccgccacggttacgccgtcgcggccaaatacgccttctataccggcggagaggcctactgccagcccaatatccgctaccggacccaccaatggcagttccgtgacgacgatacgcgctttgccggccgcgaagtgctggtcgagacgccttatgacgaagccgacacgacgggccgcgtccggagcgtcgtactgcccaacggcaagcgtttcacgtggttcgtcgatacgcatttccatccgacccgccttgtggacatctccttcacggggcttcccgaacgagtcgccgcgggcgatacgctgcggctttcgctgcgaatcgacaatccctatccttataacatcgacttgggcggcgacatgtcgctcgtcatgctctggaagcacggccgtttccgcgtcgaggagttcgacaccggggaacgtttccggattcccgccgaggaggagatccggcgcgaagtggcgttcgtcgtgccccgacagctggccgggaccgatttcgacgccggcttcgccctgcgccgggaagggtatacgaattggtttaacggaaaacccctccgcacggaggttgcgcgatgatcgagcagtttctcaaattctgcatcgtgggcggttcgggcgtcttcgtcgatttcggaatcacctacctttgcaaggagtggctgagactcaacaagtacgtcgccaattcgctcggctttctctgcgcctcgacgacgaattacattctgaaccggatctggactttccacaacgagaatcccgacattacgggacagtacctccgttttctgggcattgccgccgtggggcttgtcatcaacaacctgacgatctggctgctgcacggccgcttccgcctgaatttctatctggccaagcttttcgccatcggcgtggtcaccttctggaacttcttcatgaactatttctttacgttctgacgcttttattcctaatttatttgacttcgattttcttgatgaacttggccggatttccggctactacagtcataggcggcacgtctttggttactacgctgccagccccgacaatggctccgtaaccgatgcgtactcccggaaggatagtcgaattgataccgatccatgccttgtcctcgattacgatcggccggccgtaagttgcgctgcggttatccggattgggggcgtggttgatcgtaatcagattgaccttcgggccgatgaatacctcgtcgccgatcgtgatgccgccgcgaccgaaaaacgtgcaacactgttgaatgaaacacccccttccgatcgtgacgggtttgccgtagtcgatgtacagaggcggcagcactgtcgtactctcttcgagcggtttgccgagaatccggcccatatattcgtgcacttcttcgggggtgcggtagcccgtattcatcttcgtggcagtttcgatggtggcgaaaatatcgctaatcaatgcctcgtaacccggctcgtcgggcgaaaccatctcgcctgacaggtctttttcaaaaatattcttcatgattttctgtttaatgttttctgatgcaaaggtagacggaataccgtacaatggctttgttgtgcggttcaagttgctttgttgtaaagttcatgaaataaaaaagccccgcatttatgcgagactcgtttcgtgttgcagctcctcagtcggaggaatgccgtacgtttctttatagacctttgagaagtgtgaaagattcttgaatccgacctcgaaacagatttccgacacctttcgtccgcctttccgaattaattcgcgggcggcttcgagacggcggtgtatcaaccattcctgcggcgaaagcgcgctgcactttttgaaatcgcgtttgaatgtggacagactgcgaccggtgtagttggcgatttcttccatcgatatgtcattcatgtaattgctttccagaaaatccaatatgtcgattttccacggatccgcaaaatcgaaaacggaagcatacagatgcttgctcgtattgagcaatacatagatcccctcgatcattttcagatgcagcaactcgtctgtcggctggatgttcgaatcgaaataaggagtcatggattcgaacagacttacgatgtcgggacggttggacggcaatttatataagcttattttatcccgtttggcatctttcggcagggcgttccggtctaaacggctgtaaaaaccacgcaggaattcgggagtaaacatcagaaaaatcgctttgaactgttcgccgttccatgcctgtttggtcatttgtacactgaaatcctttcggataaaggcacaatcgcctttatgcagccgggtgatttccccgcgttcgtcgattaccatttcaccggagtacatatatactaacacatgggaatgattccgatgcaggcagcttttccctccgtcgaagtacatcgctaagaaaaagtccgaatagcgtagcgtattgattccgtctgtcattttagaaccggggctttctgcaatggcagtctgcaaggtggtcgttgacatatcccacggcctgcaagtgggcgtagcagatggtggtgccgaaaaatttgaacccgcgttttttcatgtctctgcttatggcgtcggacaacgccgtcgatgcgggaatttcacgcatggttttccagtgattgaccacgggcctgttgtcgggaagaaacgatttcagataccggcagaaggagccgaattcccgctggatttcgatgaagagtctcgcgttggtcaccgcggcttctatcttccgtctgttgcggacgattcccggatcctgcatcagccgctctacgtcgtcgtccgtaaaggccgccactttatgcacgtcgaagccggcgaacgcttttctgtaattttcgcgtttgcgcaaaatcgtaatccagcttaatccggcctgcgcactttccagcaccaggaattcgaacattttccggtcgtcggtaacttcccggccccattcgttgtcgtggtactccacgtacagcggatcggttccgctccagtcgcagcgtttcagtgacaaatccatattactgtgcttttttcgcggccctgattttgcgcagcgggagtcccagcacgccgaagaacgcttcgcggaagatgccgccgctcatcttggaggtgccctcgcggcgttcgacgaagatgatcgacacctccttgagtttcagccccaaccgccacgccgagtacttcatctcgatctgaaagccgtatcccttcatccttacggcgtcgaggtcgagcgtctccagcgcatggcgcgagtagcagacgaatcccgccgtcgcgtcgcgcaggggcatgcgcgtcacgatgcgcacgtacatcgaggcgaagtaggacatcagcagacgcgacatcggccagttgacgacgtttacgccctgcacatagcgcgagccgaccaccacgtcgttgccctcggcggcggcttcgtacagccgcaccagatcgtcgggattgtgcgagaagtcgcagtccatttcgcagatgtagtcgaatccgttgtccagtccccagcggaagcccgtcagataggccgttcccagcccctgtttgccgctgcgctccagcagatgaagcgtttcggggaactctttccggcgttgcctgacgatttcggccgtcccgtcgggcgaaccgtcgtcgatgacgagcagttcgaaaggttcgggcagcgaaaagaccttgtcgatcatcgccgagatgttttccttctcgttgtaggtcggaatgattaccagtttgcgcatagggccttgttttcggattttctatacaaaggtagcattattttgcaaaaacgcgccgccccggctctttttctgcggggacggcggatatttccggcgctttgcgcgggagccgcgcacgctttttaccggcggcgtttcatcgcccggatttcctgcttcgcggcgtcgctcacgcggtaggattcgatgattttctgcagcgatttgttgtaggtccagtcgtccagcgagcagcttcccagccaagcgtgtgtgcgctgcggaaatttgacgtagcagaccgacaccgcccatgccatggccatgcgggcgtagtaggcttcgtggcggatgccgtcgagctgccgcagaaacgcttcgaggtgccgttcatcgacgaaattgcccaaccccatgactacggcgaaacgcgtgtcgtattcggcctgcgcgtgaaaatagggttgtatgaactcccacatcggctgccgctcggcggcgcggagccgccagcagaagcagtcgcagacggcccagttgtcgatcttgggtacgaagcgggccacgtgtgcgagcttttcggcgggttcgcaccgggcatagccgatcaccagcccctgcagcatccgctcttcgaagtagaaatcctcggcttcggccagatatgcgcgccagtctccggcggcgatctccttggcgatgctgcgcaatacgggcaggcgtatgcccagcacgttttcgacgcccggcatcagcgccgaggtgaatttcatgtatttaggctcggtgagttcgagcagttgttcacgcagcgtcatcgtttgccgaatttgggggttatgccgatgaaaaaggagacgttgagccgcggcatggggcgcgaaagcaccgattcgtactcctcgttgagcaggttgtggatgcagcctttgagcgagaacgacgcccatttgcagtcgagtcccttttcgagcgagaggtcgctcatgaagtagggtttcacgcggcccaagacgccgaggtcgttgctcgacatggtgtaacgttcgctgtaccagttccatttgtaggtcagctcccaccgccgccactcgacgcgcgccgtgagggccgccgaatagacgggaatgtagacgagctgtttgccgaccgattcgtcggccgggctgaacggatcgccccggttgatcgaacgggtccatgcgaaattgccgtcgaggagcagtcgccagccgcccgaagtctcggcttcggccgagagtttggcttcgacgccgtaactgtggacgcggcggatgttgatcggggtgtagatacccagtttgggactgcctatccagagtatccagtcgtcgatgcgcgaatcgaacaccgtggccgatgcgcgcagcgaacgggcgtcgcctttgagcgtcgtttccaagcccgcgtcgaacgtccagccccgttcgggtttgaggttcttgttgccgccggggcggaagtagaggtcgttgagcgtggggtagcggtagttgcgggcggccgaagcccggacgaccacgctgccgcgtttcgagagcacgtagtccgcgaacagcgccgggatgacgggcgtcgtacggtctccgtataactcccaccgcaggtcggcggcgacgcccagccgcggcacgggacgccatttcacggcggcgaacgccgaaagttcgaaccgctcctgccggtagagcgtatcggcccgcaggccgttgttgccgatcaccgagaggtcgccgctgcgtacccggtgctggtggagggcggcgttggccgagaagagccacttctcgccgagcgcatattcggcttcggccttggcgaagagcgtgtggatgcggctccgggcgtcggtattgacgacgaaccgccctttgccttcggggtcctgcttgagcaggtagcgcagatcggtgtaggtgtagcccgcgcgtgcgccgagtttcagtccgttgcgcagccgctcccagcctgccacggcccgcagcgtgcgttcgtcctgcgtattcttcttctgtttgcttttgttgcggtcggacgtgagcatcgccagtccgcggtgcgagtcgaggtaccatgccgccagcgagaaacggtcgccgccgcgcgtggtgtaataaagctcctgcatgacgtgcaggtcgcggaatccgccgttgcggttgcgctgcagggggtaatattcgccgacgatttggccgttgtcgtcggtgacgaactctttcgagttgtagttgcggaagcggaaatcattgtccgaggtactgtagagcacgcgcgtcgaactgctccaccgcgcgccgccgtaggtcaggtgcaggaattcgtcgaacgtggcgaacgacccgatgccctgcacgtaacgcagccccaatccctgctccgcaggggctttggtcgccagcgtcaccgcgccgcccagtccgccgccggtgacgcccaccgagctggctccgtgatagatcgtcgcgtcgtcgatgaaataggcgggtatcagcgaaaaatcgacctgtccgagcatcggcgaattgaccttcatgtcgttccacgtcacctgcgtgtgcgagggcgccgtgccgcggaacgaggcggtcgcgagcgttgcgcggccgtaggatttgatgaagatggtcgagcccgtcgccagcgcgtcggccagcgatgcggtgatgttttcgcgcaggacgagcgtgtccagctcggtgcgctgcacgccgatctccttcatcgggcggcgtcccgaaatatcgaccgactcgatggcgatggtgcgggccgtcgagtcacgctgcgccgcggcgggcagggcgcaggtcaggcagaggagtatcgtcgcggtgcgcagcacgcggtcagttgcgtttggttacggtccggtagcagccgatgccgcacacttcggtcgaaatctcgccgatcagcggggctttggcgttcacgcccgtctgcaccttgatgaagtcgatctgctgcaggttggcgggcgaaccgtcggccgtcacggcgtcgctgatgcgcaggcggttggtcgtgccgatccggtccaccgtcgagaagttgtcggcgtagccccatgcgaacgccagaggtctccactgtccgtcggcctgttcgacattgtcgcgcagccgcgtgcccgtgaatttcaggtcggcaggctcgatccatgccgggcagtaggaggcctgcgtatgttcgtccatccggtcgatcgtgccgctgccgccccggtcgtcggtccatgcggcggagccgtcggcgagcggcgtgtaggtgaccgcatacccccggatcgtcgcggcgttgtcgtactcgctgcctttcagctcgtaccacgtgtcgtcgggcattccgttgccgttggcgtcctgcatgacccagacgacgcccggctcggacgaggtgttcatggcgttgcccttgacgtaaaggtcgtaaccgcccgtgttgggtaccggctcggcgaatgccgcgacgaggtatccgccccatccgccgagcgaaacccagttgttctcggcgaaacgcgcggcggcgtaccggcaggctttctccggcgtatccacgttgtcgaacgcgccgccggagcgcgcctcttcgttgatgaactgtcccggtgcgggagtgtattcgagaatccgggccacgggttcgtccgtctgcgtggtcgagatctcttcgccggagttgcaggcggccagcagaagagccgccagaggaaatgcgtattttttcatcttcttcgaatgttttttacggtttgaaacagaacgatccgggggtgatgccgacgcgtatcgtgtcgacggccgcgccccgcgccgtgaagcggtagaccacgccgtgctggacgtagtcgatggcgtcggccacgtagacctccgaggtcagcggatcgaccgccacttcgtaataggtggtctgcgtatagggcaggaacggcgtgacgggcagctcctcggcgtcgacccgcatgcgccagacgtcgcggttgatgaagtagagcgtgtcgcgcgtgccgttgagggtgaccgacgagggatggtcgcccgcggcgaacgtataggtctgctcgatgcggcgcgtggcggcgtcgatgcggtagagcgccgccggaatgcctgcggtgcgtccgtcggtgacggtccagagtttgccgaagcggtcgaggaccagcgacgaaggctgcggcccgacctcgatcgagtccaccagcgtttcgcgtgcggcgtccacgaccagaatcttgtcgtcgtacgaccagcagtttacgaacacttcgtcgccccactgcaccatctgttcggtcgatttgtggccgttcatcggaatccggccgcggatacggttgctgcgggaatccacgaccgtgatgcgcggatcgtaaaggtcggtgatataggccgtcgtgtcgttggggaagtggatgtaacgcggcgagacgaccccttcgatcactcccgtgacgcggaaagtcgccgggtcgatgacatagaccgcgcccgaattgttcaccacgacgtatccgcgtcctttgtggagggtcatcgactgggcgacgtcgcccagtttcatgccgttcgcgcggatgaagatttcgttttcgacgctccgtgccgccggatcgtagaacgacagcgaagcgttgtcccagccgaagttgccctcgcacgtgatgaacacgccgcgctgcgactgcgcgaacggctcttcatgcagcggtccgtagtccatgcaggcgcagcagaatcctgcgcctgcgcataaaaccgccatatgtcgtaaaacgcgtttcatcggctttcaaatgactgcggctggtacgggctgacgtgtcggatgccggtgtcggcgacggtctgctgcgccccattctccgcagggtgcatattggttgaacggcatgcggcaggtcttctgactcgttaccgttccggcgccttcccgtcccggaggacagtggccaaagagtgccggaacatgttgcgtaacttacagcagcgggaactgttgccggatttcacggcattcccttttaatccccgcgcccttccggggcgtttcgggaaccgatgcgacgcaaaagtaatcttttttcgagacatgccccaaagattcggacgaaaatattaactttgttgagtaaattgcggctctgcggactccggcgagggtgatcggcggagctgttgtgaaaaaaagattaactttgcccgaaaatcggatgttatgacggttgagatacgacggataacccaagtctcggatgcgctcgaagaggcgttcgcgcggctgatgccgcagctttcgccgcggctgggcgcgccctcccgcgaggtgttgcggcgtgtggcaggaagcgaaaccggggcgttgctggccgccgtggccggggagcggatcgtcggggtgctgacgctggcgtggtacgatgcgccttcggggcgcaaggcatggatcgaggacgtcgtggtggacggcgcggcccgcggctgcggcgcgggcgatgcgctggtgcgcgctgccgtggagcatgcggcccgcatcggcgccgggaaggtgatgctgacgtcgaacccggcgcgcgaagccgctagggcgctttatcgcaaagtcggattcgaagaggtggaaaccacggttttcgcctttaaaacagataagtgatgaaaaaattcgtgaagattgcggccatcgtggtggccgtcgtgctggtgatcgctctggtggcgccgatggtgctgcggggcaagatcgccgagattgtgaagcgtgaggccaatgcgatgctcgatgcgcggctcgatttcgagaagctggacatcagcctgttgcgccattttccccgtgcttcgctcgacctgaagggactgacgctggtgggcgaggagccttttgcgggcgatacgatcgtcgccgcgcagcggatttcggtggtcgtgaatgtgatgtcgcttttcggcgacgaggggttagaggtgacgaagatcatcctttcggagcctgcgctccatgcgcacaaactcgccgacggcagggtgaactgggacgttgtaaaggcttcggaagaggctcagggcgaagaggagacccccgccgatgcggaaccttcgtcgttccgcctttcggtccgcgacttcaggatcagcgacgcggcgatccgttacgaggacgattcgacgggcatgcgcttctcgaccgcacctctgtcacttcgcctgcggggcgacatgtcggccgaccagaccgacctcgacctgcggctgacggccaagggcatgcggctggtttcgggcggtattccgatgctcagcggcgccgaagcggagctggatgcggtgattgcggccgatctggcgaacagccgttttaccttctcgcagaacaaactgcgcctgaacgccatcgaggtcggtctcgacggctgggtggagctgaaagacgacgccgtggccatggacgtcacggccggctgcgacaaggtgcagttcaaggacgtgctttcgctcgttccggccttctacacccgcgacttccgcaatcttgcggccggcggcgaactttcgatggcgctctgggcgcgcggcgaaatgcgcggcgcggcgcttccggcgttcgaactccggacggaggtgcgcaacggcagcttccagtactcgtcgctgcccaaggcggtggacggcatcaacatcgacgtccggatcgccaatcccggcggcgtggcggataagaccgaactcgacctctcgaaattcacgctccggatggccgggaattcgctttcggcgtcggcctatgcgaccaatctggtcagcgacccgacgttccgtgccgcggtggacggccgtgtcgatctgggggccgtcagagaggtgtatccgctcgaaaaggggatggagctgagcggtctgattaccgccgacgtgaaggtttcgggccgtatgtccgacatcgaaaagagccgctacgagcggatcggcgcgtcgggaacgttcgtcgtcgagcggctgggcctgaccatgcccgaactgcctgcggtccatatccgccgtgccgccgcgaccattacgcccgcggccatgacgctcggcgaactcggccttacgataggccggagcgatctggcggccaacggccagctgtcaggctacatcggctacctgctgcggggcgacatgctttcgggacgtctctatgtgaagtccgacctgctggacctgaacgaaatgatgaacgtcatgcccgattccgcaccggaagagaccccggagacgtcgtcggccgggacttccgccgaatcggcgcaggcgctcgaagtgccgcgcaacttgaacctctcgctcaataccgaactgcagaaggtgctcttccagaaaatgaccgtctccggcatatcgggcgagatgcgcgtagccggcggcgccctttcgctcgaacggctgcgcatgcagctcttcggcggttcggcgaccgcttcgggcagctattcgacggcggccgatccgcagcgtccggcgctgaagctggcgctgggactttcgggcgcttcgttctccaagacgttcgacgagctggagatggtgcagaaactcgtgccgctgttcgccaaaacgggcggcgattattcgttgtcgctcgacatgacgaccgcgctcgatccgaatatggaacccgacctgcagtcgctcgacgccacgggcgaaatcaagtcggcgaacatccgtatccagaacctcgaagcgttcgatgcgctggccaaggcgctcgacaacgacaaactgcggaaaatcgaagccaaggacgtcgccgtccgtttctcgatcagggacggccggattacgacccagcccttcgacctgaagatgggcgacataaagatcaacatgtccggttcgacgggactcgaccagaccatcgactatacggccaaggtggccctgcctgcgggttctgcgggcgggattttggagtcggtcaatgtcggcataggcggtacgttcacctcgcccaagatcacgctcggcgtgaaggaagcggccgagcaggccgtgaagaacgtcatcgaccagcagatccagaagctcacgggcagcgaatcgctcggcgaggagattcagaagcaggccgacaacctgcgtaaggaggccaaacgtgccggcgacaagctggtcgaagccgccgaagcgcagcgcacgaaacttgtggacggcgccaaggagaagggtgctttggcgaagctggcggccgagaaagcgggcgacaagctggtcgaggaggccaagaaacaggccgacaaactcagcgccgaagctgaaagacagatcgaaaaactcacggcgaagcaggagtagggaatgcttgttcttttcgccgtcattctcggaggaatcgtcacggggcgcctgctgcaaagccggcgcctcgcgttcgtctcccggctgatcgccgtcatcatctgggcgttgttgttcctgctcggactggaagtcggttccgatcccgccgtcgtgggcggcatggcgacgctggggcgtaccgccttcgtgatcttcgtcttctcggtcgcgggaagcatcggggcttcatggctgttgtggcggcgtatccggggccgcagtgcttccgggacggagggcgccgcggcaaatccggcatctgccggctctgttgcgggccgcggatttggggccggaggcgggggctgcggtgcgaatggcttttccgggagtgttgcggatcaatcttccgaagcgctccccaatccggcggcgtgtggggcgtcatgttcgcccgaaccttcggagccggcattgttttgcgcgccgtgttctccccaatcttcttcggcggcgtgcgagccgacgcccgcgcctgcttctccggcctccgagccggaaaaaacgctgtcgatgtggggtgctctgaaagggagtctggtgatcgtcgccttcttcgtcgccggatgcgttgcgggacttttcgctcttgtgccgttcgatgtcgccggggcgcgtgtcagcacgtatgttctctatgcgctgatgttttgtgtcggcgtgacgctgggccatgatgaaacccttgcgggacgtgtccggcggctcgatccgcggctggcgctgctgcccgtgatgactgccgtcggaacgctggcgggcgcggctctcgcgacgccgcttctgccgccgctggccgtgaccgatacgctggccgtcggttcgggtttcggctattattcgctgtcgagcatctttatcgccgatttccggggcgcggagctgggaaccgtcgctctgctatgcaatgtcatgcgcgagatcttcacgctgctggccgctccgctggtcgcccgttggtgcggaccgctggcggccgtctcgatcggcggtgcgaccaccttcgacaccacgctccccgtcatcacgcaggcggccggaaaaccctatgccgtggtttcgattttccacggctgcacgctcgatttcagcgttccgtttctggtgacgtttttctgtacgctgtaattgttggccgcaataaaaatccccgccggagcagggagataaggtcgaatccggtccgagtccggacgtgcggggaatcggactgcggggctgctgccgagtccgggagtccgtgcgtgcggtaattccggtttcggccggggaccttttgtctttgcgggcctcttgtttcctgcgggcgctttatttccggatataggtctgcaacgccgcgacgtattcggcgaaggcgtcgcgtcccgtgtcggtgatgcggcagacggtgcagggcatcttgccccggaaggtcttttcgatttcgatgtaattcgctttcgccagcttgtccagctgtaccgaaaggttgcccgccgtggctccggtctgctgccggataaagacgaaatcggcgctttcgaccccgatgaggatcgacatcacggccagacgcagttcggaatgcagcagggggttgagttctttaaacacggtttcggcgttcgttgtagcgcagcacgattcccgttccgaagaagaggatgacggctgccgcaagggtgagtatgaattgggagacggtctctcctgctgctgcggcccggaagatccatgcggcgagaaatgcccccgaaatgctgatgaaaagcagtccggccagcgatccgctctggttcgaccggttggcttcgctgcggcggaacagttcacccgtgacgcccgccgcaatggctgcgcccatggtcagcagtcccatgacgggcagctgcagtccgtcgcccgtggcgacatatcccgcagtgtagagacatacgccgagcgcataggcccagacgttcatcagtgtccggtcgttggccgtgaccgtgcggtgacttctgtaatggaaatagagggcggccagcccggcgaccgttccggcgaggaccagcagcagcgtcaaatcccggcccgtcgtccgccggacgacgtaatccgccgttgtgacggccagcgccagcgctcctgcgccgaagaaaagcgtgctccgcacgaaactcagtttgcgtcgctgcgcttcgagcgagcgggcgatcagctccatcgcctctttttcggacattttccgttcttccatacggctattgtttcggatgattcgacttgtagttgaggatatgccccggcacgatcatcattgcgacgaatccggcgataaagagcgccggcacccaataaccggtcgcggcgagcgatacgggggcgaggacgatcgccgcggccccgccgacggcggccgggacgaagcggatgacaagccccgtgatggctgttcccatgcccatcatcagcaggatgacgaagaggatcgggaccggcatgtcgccgaataccgagagcaggctgacgaaccacgccgtgagacccattaccagccacacctgaccgattacgcggtcgatgaaggtgtagaccctgccgtcgtccgccttgggcatcgtcagcagactcagcgcggttccgaacacgggcagcagcagccataagtagtaccagttccgacccggaaagagtgcgtaggcggcccatacggcgagtgtcgtgacgacggtcgcatagccccatatcaggaacggccgcccggcgttgcggaccatgcggctgcgggtgttgtcgatcatgcggccgacgagtgcgatgttttcggcggcgttcagcggcctgtccgccgctgcgctgtccgttgccgcgccgtcctccgcagtgccgttttcggtcgctgcgccgtcttcctccgtactgccatcttcctctgctgcgccgtctttcgtcgccttgccgggccgcggtccggccgcttgtttcacgtcgctacgggagtgtctgtaccggtaattgaggatatgccccggaataatcgtcatcaggacgaaggctgccagaaacagtccggcgtgccagtttccggtgacgacgagcgagaccgacgccagcacgattccggcaatgccgcccgccacgccgggcttgaagccgatgatcaggttgttgatggtcgtgcccagaccgatcatcagcaatacggtgaatgcgaccggaaaccggacgacgaaacagatcgccagcgtgcttatcagcagggtggcggggcctattacgctccagatgaggtcgagtacgcggtccacgtaggtgtgcaccgagccttcggccgccttggggcgcgtgaagtatatcagcgcgccgcccaagaggggcagcatgaaccaaaggtagttccagcgtacgtcgccggtgcaggacactgcggcccatacggcgatcaatgtcgcggcggtcgcatagccccacgccagaaacggccgtccggcgttgcggaccatgcggctgcgggtattttcgatcatccgcccgatgagcgccaaactctcggcggcgtccagctttctgtcttccatgtctgtcggatttcggggttaaagttacgaatttattccgggtgttcctcgcttttcaccggatgtctgtgcgtcttctgcggcgtttcagccgtacgcggggcggcggtctattccgcggcagggtagcggaggcgtatcgtcacggtgttccgctctgcgggcagggtgcactttttcgcggcatagccttcggccgggccgcgttcgtccgtcttcattttgtagtcgccgtcctcgtcgtggaggagcgatacctcggccgtttcggcgtcgatgccttcgagtgttaccacgacttcgcccctcttggcgggcgacatgccgtatacgggctgttcacgtccggcgactttcgccatcgccagaacattgcctttgtcgctgcggatgtccgttacggtgatttcaagggttttggccgcggcggcaacggatgccagcgcaaaaacgacggtcaggacgagtttccatgctttcatggttgcggaggttttagcggtaattgttttcgtcgtcgcagtcggtcagataccataccagcgacagcaccagattcagcccccatcctgctgcgacccatgccacccaccagtaatggggcgaggtctgccagttgacgaaggcgaggaatgcgcagactacgaggtaggtggtgatgcggcgggcgaaccagcggccgaagaggcggcgtttgtccggggaggtgttcgtgagttccatgctgttcggtttttaagattcttttgtcgtgtcgtaaatatattgcgaatataaagtagtttatataataaaccaaattttccggcgggattttttcaaaaaaaacagatacctatattaattgcggggaaattttccgcttcccactgtttttcatccgccgaaaaatcgtatttttgcgaaaattcgatactgatccgttatgaaaagaatcctcctgctttttatcgcccttgcggccgcatggggcgccgcggctaaaatccggctgcccgaaatcatcggcaacgacatggtgcttcaacagaatgccgaggtccggttgtggggctgggccgagccgcatgccgcggtgaaagtcgagacctcgtggggcgccggagccgccgtgaaaagcgacgccgacggtcgctgggccgtatcggtccggacgccggccggaagttacgagccgcagcggattaccttcgccagcggcgaccgcgtgacgttcgaccgcgtgctgatcggcgaagtgtggttcgccggagggcagagcaatatggagatgccgctcggcggtttctggcagtgtccggttacggatgcgaacgagatcatcgcccgcgcggacgccaaaagcgggaaactccattatgtgaagattccgcatgccgccgcctatacgccgcaggaccggacggccggaagctggaccccctgcacgaccgctactgcggcgaaattcaccgctgcgggttacttcttcgccgaaatgctcaacgacgtgctcggcgttccggtcggcatcatcgactgctcgtggggcggaagccgcgtcgaaagctggatgagccgcgaagtgctgagcggttattcggacatcgacctgaccgaagagggaatctcccgcgtcgcgcagcacctgcgtccgatggtcatgtacaatgccatgctccgtcccgtggcgggctataccgtccgcggattcctctggtatcagggcgaatcgaacgtcggccgctacatggattacgctgcgcggctggccgatatggtctcgttgtggcgcggattgtgggggcgggacgacctgccgttctattacgtcgagatcgctcccttcgagtacggcaacgggaagtcgccctacctgcgcgaagcgcagtgccgggcgcaggagctgattcccaacagcggcatgatttgcaccaacgatctggtggagcattacgagttttgcaatgtccacccgaagaacaagcgggacgtgggctaccggctggccttcatggcgctgaacaagacctacgggatgaaggagatcgcctgccaaagcccgcagtacgagtcgatggagatccgcgacggcaaagcccgcatcaggttcaaatatatggatcagggtttcaaccggatggccgacatccgcggattcgagatctgcggcgccgacaaggtattttatccggccgatgcggtcgtcgaaaaccagttcgctctggtcgtttcgtcggagaaagtgccggaacccgtggccgtgcgctactgtttccgcgatttccagccgggcaatctggccgatacccgcgaactgccggtcgttcctttccgtacggacgatttctgagtttgctgaccgtcggaattgcaggacccggcctctgaaaaatgaaattcacctctgccgcagcgaaatgcggcaggggtgaattcgtctgagaccgcttgtccggccggttcctgcgttatttggcgggtacttccttcagcaccacgtccgcccattcgggatggcggtagatgtattgtgccacaaaggggcactgggggatcatcggcagttttttggcgcggagatcctccaatacggcgcgcgtcagctccgagccgatgccctgtccttcgtatttttcgggaacctcggtgtgcgtcaggacgatgaatccctgcgccttgatgtattcgatcatggcgagatccccgccgaggtcgaattcgtatcgcttttccgcagcgttgtcgatcagttcgtgtttcttttccataatcctgagttttagatgtcggctttgtttcttcaaatatagagcctaaacgggaaaattgctacttttgcagacagaatatggacaacatttccgacatattgctggactggtacgcccggcacggccgcgatctgccttggagacgcacccgcgatccttaccgcatatggctctccgaggttatcctccagcagacccgcgtcgcgcagggcatggactattacctgcgcttcacggagcgctttcccgacgtcgggtcgctggccgccgctccggaggacgaggtgctcaagttgtggcagggactcggctattacagccgtgcgtgcaacctgcacgctgcggcgcggcaggtcgcggagcggttcggaggcgtgtttccccggtcttacgacgaggtccgctcgctgcggggcgtcggcgactataccgccgcggccgtctgctcggccgcttacgacgctccctgcgccgtgctcgacggcaatgttttccgggtgctggcgcggcttttcgatatcgaccttccgatcgactccacggccggaaagcgcacgttcgctgaattggcgcaaacgcagctcgacatgcgttgtccggggcgttacaatcaggccgtcatggatttcggggcgctgcaatgcactccggcgcagcccggatgcgccgactgtccgcttgcgtcgcgctgtctggctctggccgcaggaacggttgcggagcgtcccgtcaagcaggcgaaaaccaaggtgcgcgaccgttggttcaactacctgcacgtcacatgcggcgaccggaccttgttgcggcgacgcgggggaggcgacatctggcaggggctgtacgagtttccgatgatcgagacggaccgtgcggcggatttctcggaactaaccgattcggaagagttccgaaccgtgttgggtggcgtcgaatggcgtctgctgcggagcgtcgcaatgccgaaacaccagctttcgcaccagacgctgcatgccgtgttccaccgcatcgagatcttttccccggtggatttcccctctgtgccgaccgccacgctgggcgactatgccgtgccgcggctgatcgaccgctatctggaccggcagccgtgaaaaatccctgcttcggcagggattcgtcttgtgtgcaaacgccgccgggggcgtgttttgtgcgtgtatctgttccgtcagcgtatcagataccagatataggcgacgtatatcatcaggaagatcgcgccctcccagcggtcgatctgcttcctgcggaaggtgaacgctgtcagcaacaacagcagggagcttagcaccaccatcagaatgtcggtcgtcgtgatgccgcccatcgtcagcgggcggatcgtcgcgctcacgccgaggatcagcagtatattggcgatgttggacccgatgacgttgcccagcgccatttcggactttcctttgagcagcgatacgaccgacgaggccagttcgggcagcgacgtgccgcccgcgacgagcgtaatggcgataaccgattcgctgatgcccagcctgcgggcgatctccgtggcacttttcaggaacatgtcgccgccgaaaatcagcccggcgagtcctccggcgatcatgacgaccgccagccagagggccgccggctttttggcgccggcatcggcgggcgccgcttcgggccgtttcgtggtgcggatcgtgaaccacatcagcgcgatgtagagcgccaccatgacgatgccgtcgatgcggccgattctgtccgccgcccccgcacatatcaggcggtccgaagtgacggccagcaggatcagcgacgcggccatgccgaagggaatatcgcgccgtatgttgctttgggtgaggggcagcggccggatcagggcgcagacgccgaggatcagaaagacgttgaagaggttcgagccgacgacgtttccgatcgccacgtcgctgttgcccgccgcggccgagagtaccgagacgaccagttcgggcgtcgaggtgcctacggcgacgatcgtcaggccgatgatgaattccggaacccggaagcgttgcgcgacggcggccgagccgtccgtcaggaaatttgcgccggcgagaatcagtcccagtccgacgatcagcagcagaatgtccataatctatgcaagcagaatcaggctgacggccatgagcgccatgccggccaccacgccgtaaatcgaaatgtgagcttcgccgtattcgcgggctgcgggcagcagttcgtcgatcgagatgaagaccatgatgcccgcgactccggccagtatgcagcccatcagcgtcggcgacatgaagggcatcagcaccagataggccagcagtgcgccaaccggctcggcgagccccgacagcagcgagagtttgaacgcctttttgcggtcgcccgtggcgtagaagatcggaatcgagaccgcaatgccttcgggaatgttgtggatggcgatcgccacggcgattgccacgcccagcgccatgttgtccacggccgacgtgaaggtggcgataccttccgggaagttgtggatgccgatggccagcgccgtcatcatgcccatgcgcatcagtttggggttgcggggctgtttgtccatctcctcgaccatgtgggcctcgtgggggttctcgaacgagggaaccagccggtcgatgacgccgatgagcaggatgcccgcgaagaagctgaccacggtgacgattatccccgtatgcgcgccccactcctccgaaagagttatctgcgcctgctggaacaactcgatgaacgagacgtagatcatcacgccgcccgacagtccgagcgagaacgacagcagccgcttgttggtgcggcgggcgaaaaaggcgatcgcgctgccgatgccggtggccagacctgctccgagcgtcagcagcagcgggatgaggatattgtgctccatattgatatgcggtttgtcgttgacttcgcaaatatagtgcttttccggcgaaagagacggaaaaaccgaatccatttggattcggtttttctgatgccggcataattgcagcctgttttatttgtgcgcggctgttccggtctgtttgcccgtgcgcggctgttccggcccctttgtcggtgcaggtcgttccggcttgccggtccgtgtgcggttgttcccgtcctttggttcgtgcgcgcctgttcccgtcctttggtctggacgggttttttcgctccgttggttcgaacatggctttcccgctccgttttgcctgatatgcccccggtgcggagacgggcctgcctatttgccgtgcgcctcgcggatcagccggcccagcacttcgatgctgtctgcggtgatgtgcggctgcggatcggctttgtcggctacgtcgagcgtcgtttcgcccgaaagcaccagcacgcccatcgctttggcgttgtgggccatcgccacgtcggtgtagatgcggtcgccgaccatggcgatctggtcgggcttgaggccgtggcgcgaaagaatgcccgaaagcatgttgggatcgggcttgccgagcgtgatgtcgggatgccgtcccgtggcatgcccgatgcaggcgcagatcgagccgcagtccaccagcaccgtcggctggtcggtggggcatacgcggtcgggattggtggcgatgtagggcacgccctgcgacacccaccacgccgcgcggcagagccggtcgtactgcagcgtcatgtcgaacgccgcgacgattacgtcgggcacgtcgtcggccgaatccgccgccgattcgaacccggcggcttcgaattccgagatcatgctcggcgtgccgagcaggaagagccgtttggccgcggggtagtgctccttgatgtagtcgatggtcgccagcgccgtcgtatacatctcctcgcgtgtggcgcggatgcccagcgtttcgagtttgtgcaggtagtcggcgatggatttggaggggttgttggtcaggaacgaatagccgattcccagctctttcagcccttcgaggaagggtttggtgtaggggaagagcgacatgcccatgtagatcgtgccgtccatgtcgagcgccacgtgtctgatgccgcgcagccgctccatcagttcgtcgtgtgtgtaaaccgagcggaatttgtcgaatgttgccattattttcgtgttagattgagatgctggaacaggtagggatagtcggtttcgatcacgtcgcatcccgtggggatttcgagttcgtaacctttgattttctcggcgtcggttgcccgccggtcgtgggtcggggcgagcgaaatcatgcacatcacgcccttctcgtgcagcttgccgtaaagctcctgctggtcggggagcatcatcgtgccgacgtaggccatcatctgtgaccacggaatgcgctcttcggcgtactcgccgaactccttcatgttcttgcaccagcacgagaacatcgcctgcgggtcgcggtccaagtaggtgcgggcctgccgggcgttgcgcacggtgtacattacgttggcgggcgccagccggttgatgaagtccgacatcacctccagcggcacgtccttgatgtcgaggttgaggatggttttgccccggctccagacgatgcactcttcgagcgtcggaatccggtagggcgtgacgttgccttcgcggtccttgaggaagaactgctgcagctcctcgcaggtgtagtccgacactttgcccgtgccggtggtcgtgcggtcgatcgtggcgtcgtgcatcagcacgatcacgctgtccttggtcaggcgcgggtcgatttcgaagaacgaaggcatcatcgagagggtcttctcgaacgattcgatgcagttttcgggatagcccgtcaccatgccgccgcggtggccgctgacgacgatcggacgctccggtgcgtaccggaaccagtcgtgcagctgggcgcggctttcgatgtcgatataaaaaggtccttcggcctttttgccgctttcggcgcatccccacagcagggtgcccagcgtaagggctgtcagtagtctgaaagttttcataggtggtttttatcggttgtttctcggaatcttgtgttctttcaccacatcgcctgccgtgtcgactacccggatgtcgatgcccttcgcgccggccgtgacgaccgttttgtcgctgttggagttgataaggatcggaaagtcggcgccgcggcttaggtcgtcgatccattggtaacggtggtagtggccgcagagcatcaggtctatgccgcttccgtcgagtatcgggagaaacagccgttcgatctccagctcgccgtgccagccgcgtcccttgttgggcggcatgtggatcaggacgatgcggtagggcgccgaccggaactcttcgccggcgactacgcccctgagccactgcgcctgctgttcgcggtaagcgtcggcggtcgaaagcccgtaatagcggatgtcgctgtcgggtttgtcctcgcagccgtcgagtacgacgaagaagacgggaccgcggcggaacgtatagtaactttcgccggtcggcgtggggaagtagtcgagccagtgccgggcgaacttgccgcgtccgtcgtgattgccgcgcgtcacgacgagcggaatgcctgccggggtgagcagctccgacgccgatgcgaggaatcctgcgaaaagcgcttcctccgattcgatcgaattcagcaggtcgccgttcagacatacgaagtcgggcttctgtttcggtgcgtccccgataagcagccggaagacggaatcgcggccgtggatgtcgttcaccatccagaattccaactcgttccggtccgcgctgggcgtggtgacgggatagggtgcgtgtttgagtatgtcgctgccgtagccctcgcccaatacgacccgtttgttgccttcgtcgctgagcacggcctgctgcatgatgcggtagcggtaggttttgcccggttcgagtccgccgacgcgcacccggtgcagtttgcccagacgccgccgtccgaggtgcgagtcgtagtatttggggcgttcgacggcatagaagtgcgttccgtcatcgggggccgtttcgacccacgctgccgcgtccgtcgttgtcgtccagattacggtgaatccgtcctcggtcacgttctggaggtagggacctccggcgatgcgtgccgacggttgtgaaaatgccggacttgcgggtaatgatgctaaaaagcaaattaatagaaatggtgtatttttcatattgtttctttctgttgtgcttctgatttacaaaaataggtaaaatccctcaggttccaaaacgaaaccgaatagattttgcatttatttcgcttttattgccggaggggttgcccggcggtgggacagaaccgatatgggcggttgtcggttcgggcggtcgcttgctgcggagaagccgggcttctgttctaaagggaataatcctgaaaaagaaatcttttttgctgtttttgtgttgtggttttgttgtaaagaagtaaaaaaggaaaaaatatagtgctatttgttgtgtgaaaacaaataattatatatatttgcctttgctttggatgcccttttgtcgctcctatgtgaattaattcaatcatcaatagtaatgaataaagtagaaagcgctctgtcgcgcacgaccgataccaaagctctggtgatcggaatcgaaacccttccgcgggtcgcggatatgttcaaggaactttttcccggcaggcgtgcgcttgtcgtcgccgatgccaatacgtggcgggcggccggcggcgatgttcaccggattctggctcaggcgggtgttgcgcaggacgagccgcatgttttcaccgatccgaagctttatgccgagtggacgttcgtcgaacagctggacggggtgctgtcccgcaccgacgccattcccgtcgcagtgggatcgggcgttatcaacgacctgaccaaactctgctcgcaccacaacgggcgccgctatatggtcgtgggaaccgcggcgtcgatggacggctatacggcctacggagcctcgatcaccaaggacggcaacaaacagaccttcgactgtccggctccgctgggcatggtgctcgatccgacgatcgccgccgccgcgcctgcgaaaatgtcggcgtcgggatatgccgacctgattgcgaagattccggccggggccgattggatgctcgccgatgcggtcggctccgaactgctcgacgaattcgccttttcggtggtgcaggacggactgaaggacgccctctgcgaccccgcaggcgtgcgtgccggcaatgtggccaaggtcgaacagctggccgaaggtttgctgctgagcggtttcgcgatgcaggccacgcagtcgagccgccccgcgtcgggcgccgaacaccagttcagccacctttgggacatggagcacctcaaatacaacggcgcatccgtctcgcacggtttcaaggtcggcatcggcacgctggcttcaacggcttttatcgagatgctgctcgatacgccggtcgagacgctcgacgtcgaaaaatgcgtcgccgcatggaaatcgtgggaggagaccgaaaaggatatctaccggattttcgacaacgatcctgagttcgtggcccgcggtctggtcgagaccaaaggcaagtatgtcgataaggaggggctgcgccgccagctgcagcgtctgcagaaggcgtggcccgcgctgagcggtcatatccgccggcagatcattcccttcggcgaggtccgccgccgtctcgaactggtcggtgcgccttacgagccggagcatatcggcgtttcgcgcgccaagttccgcgccagcttcgaaaagataccctacatgcgcagccgctttacggtgatcgatatcgcgttccgctgcggatggatggaggaatggctcgacaaactcttcggaaaaggcggaatttgggaaataaagtagcatttgggaaataaagtagtatatttgctttctgaaactactaaactttcattccgaaatgactcctgaacaaaccaagcgcttcaagtactggcagacccgtacgatcgtcgccacgatgatcggttacgcgctcttttacttcgtgcgtaaaaacttttcgctggccatgcccggtcttgaggccgatctggggatctcgaaaaccagtctgggaattttcctgaccctgaacggcgtggtctacggactttcgcgtttcgtgaacggcattctggccgaccggatgaacgcccgctggtacatggctgtcggacttgcgctctgcgcattggccaacttcgccttcggattcggcgaagacgtctcctactggatcacgggccagcacgacggttcgcagttcaccaatacgatgatcctcttcatgggtatcatgtgggtgataaacggcctgctgcaggggacgggatttcctccctgcgcccgtctgctgacccactggattccgcccacgcagctggcgacgaagatgtcggtgtggaatacctcgcactcgatcggggccggtctggtcgtgatcctctgcgggtatatcatgggtacgctgggcatgaacgtctcggccgatcccgacgccgtggcggccatggccgccaatctgggcgtacagcccggtgacgccgcgggtatggagcgcgtcatggcggccgccgcgcatgccggggcgtggaaatggtgtttctggattccctccgccatttcgttcgcaggggctgtcgggcttgtagtcttcctgcgcgacacgccttcgtcggtggggcttcccgaattggagggcaccgaggtcaggaaggagaagaaagccgccaaaggtgccgagcaccgtgcgttcctgatgaagcacgtcttcaagaacccgctgatctggattctgggttttgccaatttcttcgtctatgtcgtccgcttttcggtcctcgactgggggccttcgctgctgagccagtcgaagggcgtcagcatggagcatgccggctggctggtggcgatgttcgagattgcgggcatcgtcggcatgctggtcgccggctgggcgacggacaggtggctgaaaggccgtgcccaccgcacctgcgtattctgcatggcgggagccgcgattttcgtcttcctcttctggcagctgcccggtgacgctcccgtctggctgctcttcacgaccctttgcgccgccggtttctgcatctacggtccgcaggcgctgatcggcatcgccgcggcgaatcaggctacgaagaacgccgccgcgacggccaacggccttacggggctgttcggttacgcgagcaccgtcgtttcgggtgtcggactgggctatgtggcgcagcattacggctggaactgggcctatgtcggcattctcggcatggcggtggtgggcatgctggttttcctgctgatgtggggcgcccgtgccgacggttacgatgccggaccggagcggaattaagcatgttcgtccgctgacggaaaaacgatatggactttcgggtccgaaagtgtccggagccggttgcggtttcggacactttattttgaaatctgagaaaaaaattgttacctttgttcagttaactgctaaaagacagagtaatatgctgagtattgccgaacgacacaaatacatcctcgataacctgaacaaatacgggttcgtgcgtattaccgacgtcgccaacgaactgggggttacgaaggtgacgatccgcaaggatgtcaagatactggaaagcaaagggttgctttacaaagtgcacggcagcgcccgtcccgccaacccccatgtggccgatatggacgtgcatgtcaaggacaacatcaaccgcgactccaagcggcttatcgcccagcgcgccctcgaactgctggaggataacgattcgatcatcgtcgcttccggctcgacgatctatgcctttgccgaggagatcaaggcgcgccagtggcatcacctgaacatcgttacgcccttcctgaggctgggcgtgctgctcaacgaggcggagaatgtcaatgtcgtgcagctgggcggcacggtgcacaagaagtcgctgtcggtgctgggcgaggaggccgcgcgttcgctcgacgactgcatctgttcgaaactcttcttcggcgtggacggcatcgacctcgaacacggcatcacgacctccacgatcgacgaggcgaagctcacgcgcaagatgatgaaggcgtcgtcgcagaatatcgtgctggccgactcttcgaaattcggacagcgcggcttcggacgcatctgcgcgctggaggacatagacgtcattattaccgacgaccggatttccgaacagatggtcgccatcgtcgaggaggcgggcgtggacctgattatcgtcaagtagggctgtcccaaccgggaaaatgacaggcacgccctgcgtgcgagaaacagaggcggttccgaaatttcggagccgcctctactttgtcggaaggcaggagggttatttggtccatgcggcgtagccgctgccgatcgcgtcccagtcggtcagcgccgtgcatccgcggaagcaggtgccgaaactcttcggcgcggtgaatgcgtcggggtggagcgaacgttcgtagatgtgtactttcacgccgtcgatggtcgtgtagggcgattcgacggcgagtttggccgcatcgcggaatgtgccgctgaagtcggtgaccttacggctgtcgtcgaacatgtcggcgggaacgctcacaagttcggtgcagtttgccagaagccatttgtaggatgtgacgttggtacaccctttgaatacgtttctgcccactttcgtcagggctttgttgccgaagaaacagcttcggaaaatgtcggccgacgtgcatcctgcgaaaaattcgtcgggaatctctttgagtgcggtgcagccgtagaaagtctcctcgaagttcgtggcgttggcaagccccttgaacaggcccgcaggcagcgtttcgaaggccgtatttccggagaaggtgtatttcagcgtcgtgatttgggggcttcgggcgaaaaatccggccggaacggttttgagctgagtgcagtgggcgaggaagctttgcagcgacgtgacgtttttgagcggggcgagcagattttcgggaaccgacgtgagcgaggcgcatttggtgaaacatcccaatacgtcggtgaccttgtcgcagccgctgaacaacgaagccggaatggtttgcagaccgctgcagccttcgaatgcgtatttgaacgtggttacctcggcgaacgagtcggtcgtgttttcggggagcgttttcaggttggagcagaggtagaacgcatagtacatcgaggtcaggtttacgttgccccattgtttgacggccgtcaggtagctgcgggaggtctcggagtgtccctgcaggctgtagagctgttccaccgaaccggatacggatacttcgtagacgcccgcttccgcatattcgtaatttatcaggctgcccgtcgcggggttgaggttgagggcgagtttctcgctgtatccgtcgccgtaatcgaccgtgcagtcgatggcgccggagagcggcagtatgatcttgccgcctgccggaacggtgtattcgaggatgagcgacggaggaccttgggtgacattgatggcggccgacacctcggcggggttgtctttgcagccggtggtgacggtcaccacggccggccggtttccgccgtcgggattgggcgacgccgtgaggcggagtttgtcgccctccttggagatcgttatccatcctgcgtcgcaggcggcgtcccaccgctcctgattcgtggttaccgtgatggggtcaattccccccccctcgttggtgaattccgccgtactgcttcccagactcagggtcggcgcaacgccttgttcgaccgtgattttgccgatgacgctttctccgttcatgatggagattgcggcattgcgcagctcctcggcgttctcttcgatttcgaccgtcagccgatccccggacaggacggccgtgcaccacgaccggtcggattccggcacggcttcgaagttcttttccatggtgaggacgaactggcctgcatggtgtgtcgcggttatcgcggcagaggtcccgtcttgtgaaattttgacatccgaatcgggcgaactgaatttgaccgccggattcggggtgtcgtcgtccgagcatgcgccgcccagtagcagcaggcatagcagagtgcatagctgtttcatagtgaatgggattagtttgacatgaagattcatctcaaatgtaatgaaaatttttggaacccgcccgtctttcttgttttttcttgtccgaaattgcatgccgagtctcccgaaaccgaaaggaacggagaatttttgccggtgacgccgccgcggttcgtacggttccgtccgcggatcggcccggtgtgtacggattgttgaaaattttttccggcaaagttttgcacgccccgtaaaaatgtcctacctttgtcctcaattacagcgattccgaatacctatgaattgtaaccccctcatatcgtcagcgcaggcattctggcagcaggactattggtcgggcgacgtatccccggttttcggtaattttgttttattagggtaactgtttcggttgccctatttttttacgctcgtacggatgaagacactttataccaatgccgcgatctatgccggcggccgttttgcggccggagagttcgccgttgagggaggccgcatcgtgcccgttgcgggcgccgcgcccgaccggaccgtggacctcggcggccggcatgtgattccgggactcgtggacgtgcacgtccacctgcgcgaaccgggattctcgcagaaggagaccatcgccaccggaacggctgcggccgcacggggcggatatacgacggtctgctcgatgccgaacctgaaccccgcgcccgatgcgcccgatacgctccgcgcgcagaccgacatcatccgccgcgacgccgtggtgcgggtcgtgccttacggctgtatcacgatgggacagcggggtgccggcgagctggtcgatttcgcggccctcgcgcccgatgttgtcggcttctcggacgacggccgcggcgtgcagtccgacgaactgatggaggaggcgatgcgccgggcggcaaaagccggccggccgatcgtggcccactgcgaggtggacgacctgctgcggggcggctatatccacgacggcgaatactgccgtgtgcacgggcacaagggcatctgctccgagagcgagtggaagcaggtggaacgcgacatcgcgctggccgaaaagaccggttgtcagtatcacgtctgccacgtctcgaccaaggagagcgtcgagctggtgcggcgtgcgaaggcccgcggcgtgcgcgtgagctgcgaaacggcgccgcattatctgctgctctgcgatgaggatttgcaggaggacggacgcttcaagatgaatccgccgctgcgcagccgcgaagaccgcgccgcgctgatcgcgggcgtcgcggacggtacgatcgaggtgatcgccaccgaccatgcgccccataccgccgaagagaagtcgcgcggactggccggaagcgccatgggaatcgtgggcttggagtgcgctttcccgctgatgtataaatatatggtgttgccgggaacgctcacgctcgaaaagcttgtcgcgctgatgtctgacaatccccgccggatattcggtctgggcggcggcctgaacgtcggcgatgaagccgacttcacggtgctcgacctcggcgcgcagtacgaggtagaccctgcggcgttcctctcgaagggccgcgccacgcctttcgccggctggccggtgcagggccgcgccgtgctgacggtcgtcgggggccgggaggcataccgggatgatggattgcagttgtgaagtctcccttctcaaagggagatttagcgggattatagatatgccgggtttcatatggagcggaatccggatcgacagaacgaaacaaatccataaaaaggggcgatgcgaaaagcccgtaccgaaaataaatatgaaaccatttacgaagaaaattgtcttggagaacggccgtgagttttacggctacggcttcggcgccgaccgcgaggtcattaacgagatcgtcttcaatacctcgatggtggggtatcaggagattatgtccgacccctcctacacggaccagatggtcgtgatgacctatccgctgatcggtaattacggtatggccgacgaggattacgaaacgaagactccgaccatcggcggcatgatcgtgcgcgagtacaacgactcgccgagcaacttccgctacacgaagaccctgaacgaggtcttcgaggagcatgacattcccgcgatctggggcgtggacacccgcaccctgacgcgcatcatccgtaacgaaggcacccagaaggtgattatcaccggcgcggatacgcccctcgaagaggcgctccgcaaagtgcgcgagtacgtccttccccacgacatggtttcgcgcgtgagctgcaagaaacgctggatgtcgcgcgtccccaaccacaaatacgacgtggtggcggtcgactgcggcatcaagtacaatatcatccgccagctgaaccgcgtgggctgcaacgtgacggtcgtgccgttcgactcgacgctggaggagatcatggccttccgtcccgacggcgtcgtgctgtcgaacggtcccggcaacccgcaggacgtgacgcccgtgatcgagctggtcaggcagctgcgcggcaaactgccgatcttcggcatctgcatgggccatcagctcatttcgctggcttacggcgccaagaccgtgaagatgaagttcggccaccgcggcggcaaccaccccgtgaagaatctgtccaccggcaagatcgagatcacgagccagaaccacagctacgccgtggacgtcgattcgctggccggtacggggctggagctgacccacgtaaacctgctcgacggcacggccgagggcgtggagtgtgtcggcgacgctgttttctcgatgcagtatcacccggagagcgcttcgggtccgcaggacagcggctatttgttcagaaagtttaccaaaataatggaggagcgtaaaaatgcctaagagaagagatataaagaaggtaatggttatcggttcgggtccgatcgtcatcggacaggccgccgaattcgactatgcgggcacgcaggcctgcctcgcactcaaggaagagggctacgaggtgattctcgtgaattcgaaccccgccacgatcatgaccgacacgcatattgcggacaaggtatacatggagccgctgacgctcgaatacgtcgccaagatcatccgcttcgaacgccccgacgccatcgtgccgggactgggcgggcagacgggtctgaacctcgcggtgcagctcgccaagaagggcattctgaaagagtgtcaggtcgagattctgggcacctcgttcgagtcgatcgaacgtgccgaggaccgcgaacttttcaaggagctgtgcgaatcgctgggcgagccggtgatcgagtcgaagatcgccatgtcggtcgaggaggccgtcgaggtcgccgccgagatcggctatcccgtcgtgctgcgtcccgcctatacgctgggcggcacgggcggcggcttcgccgacaacgaggagcagctgcgcgagatgatgcgccacgccctgttcctttcgcccgtacatcaggtgctcgtcgagaagagcatcaagggatacaaggagatcgagttcgaggtgatgcgcgatcacaacgacacggccatcagcatctgctgcatggagaacatcgaccctgtgggcgtccatacgggcgactcgatcgtcgtggcgccgtgccagacgctcactaacaaggagttccagatgctgcgcgacagcgccctgaagatcatccgcgagttgaagatcgaaggcggctgcaacgtgcagttcgcactcgaccccctgtcattcaaatactacctgatcgaggtgaatccccgtgtgtcgcgctcctcggccctcgcatcgaaggccagcggttatccgatcgcgcgcgttacggccaaggtggccgtggggctcaccctcgacgagatcatgctggccaatacgcccgccagcttcgagccgacgctcgactacgtcgtgactaaagtcgcccgcttcccgttcgacaagttcagcgatgcgtcgaacaagctcggtacgcagatgaaagccacgggcgaggtgatgtcgatcggccgcacgatggaggagagtttgctgaaggcgatgcgttcgctcgaaaccggcgtctgccatatctaccacaagaagttcgacgactggacgaacgaccggctgctggaatacatcgccgagcctaccgacgaccgactgtatgccatcgcgcagctgatccgcggcggcgtcgatctggtgctgatctacaaccgcacgaaaatcgacatgttcttcctcgaaaagttcaagaatatcgtcgaattcgagcgcgtcgtcgaggccgctccgatggatatcgaagtgctgcgcgaagccaagcgcatgggtttcagcgacaagttcatcggtcagctgtggggtgtctcgcagcacgacatgtacctgctgcgcgagaagaacggcatcttcccggtctacaagatgatcgacacctgcgccagcgagttcagctcctacgtgccttatttctactcgacctacgaagacgagaacgagtcgctggtgagcgacaaggagaagatcgtggtgctcggttccggtccgatccgcatcggtcagggcgtcgagttcgactattcgaccgtacacgccatctggtcgatccgcgaggcgggctatgaagccatcatcatcaacaacaaccccgaaaccgtctcgaccgactataccaccagcgacaaactctacttcgagccgctgatggtcgaggacgtgatgaacgtcatccacctcgaaaaaccgaaggcgatcgtcgtgtcgctcggcggacagaccgccatcaacctcgccgagccgctctcccggctgggcgtgcccatcatcggcaccgactgcgaagccatccgcaacgccgaggaccgcggctgtttcgagaagatcatggaggagctgcgcatcccgcagcccgaagccgaagccgtcaccgatatcgagtcgggtgtgaaggccgccgcccgcatcggctatccggtgctggtgcgtccgagctacgtgctgggcggccgcgccatgcagattgtttcgaacgaggagcgcctgcgccactacctgcagacggccgtcgaggtcaacgacgactcgccggtgctggtagaccgctacatcatgggcaaggagcttgaggtggacgccatctgcgacggcaaggacgtctttatccccggcatcatggagcatgtcgagcgcacgggtatccattcgggcgactcgatcagcgtctatccgaccttcagcgtcagccagaaggccaaggacaagatcatcgactacacggtgaagctcggtctgcggatcggcatcatcggtctctacaatatccagttcatcctcgacggcaacgacgaagtctacgtcatcgaggtcaatccccgctcgtcgcgcacggtgccgttcctctccaaatcgacgggcgttccgatggcgcatatcgccacgcaggtgattctgggcaagacgctgaaagaactgggcgtcaccgaagtatacggcaaggagaagaaacgctggtacgtcaaggcaccggccttctcgttcgccaagatccgcggcatggattcctacctctcgcctgagatgaaatccacgggcgaggccatcggctacgacgacaagctcacccgcgcgctttacaaggcgctgcaggcgacgggcatgaacgtctgcaactacggcacgatcttcgtcaccatcgccgaccacgacaaggagcaggcgctgcccctcgtgcggcgtttctacgacctcggcttcaacgtcgaggcgacgaccgggactgccgaattcctgcgcgaacacggcatccgcacccgcacgcggcgcaagctgagcgagggcagttcggagatcatcgacgcgctccgtcagggccacgtgagctacgtgatcaataccatcgacatcaaccagcacaatacccggctcgacggatacgaaatccgccgcacggccgtcgagaacaacgtgacgatcttcacggcgctcgaaacggtgcaggtgctgctggacgtgctcgaagagatcaccttcggagtctcgaccatcgacgcgaagtgatttccggcgtgaggacgccttccgtacgcacctctttcgctccgaacgggatacggtcccgtccggagcgaaacgaacgaagcgcgggggctgttctccggatcaaaaatcgaaagggaatacatgtataagaaaggcatctataagattcttgcgaacgagccgctgacggcctcggtgtggcgcatggtgctggagggcgataccgaatggatcgtccgtccgggacagttcgtcaatatcgcgctcgaaggccgctacctgcgccgtccgatttcggtgtgcgactgcgatgcacggaccctcacgctcatctataaggtcgtgggcggaggtacggagcagatgagccgcatggcggcgggagcggagctggacctgctgacgggactcggcaacggcttcgacacctccaacgatgcgcggcggcccctgctggtgggcggcggcgtaggcgtgcctccgctctacaagctggccaaagcgctgctggcggagggcaaaccggtgagcgtcgtgctgggattcaacacggcggacgaggtcttctacgccgacgaattccgggcgctggggtgcgacgtgcatgtcgccacggccgacggttcggccgggacgaaaggcttcgtcacgacggccatcgccggtcagggcatcgacttcgactacttctatgcctgcggtccgctgccgatgctgcgcgcgttgtgcgactcggtcgcacaggacggccagctgtcgttcgaggagcgtatgggatgcggtttcggcgcctgcatgggctgttcgtgcaaaacgaaatacggcaacaaacgcatctgcaaggagggacccgtattaacgaaaggggagatcatatggtaagcaagcagttcatcgcacagaaccggccggcaggaaaacctgccgcggatatgtccgtcaccctgagcggtctgaagctggacaacccggtcgttccggccagcggtacgttcggatacggcaacgaattccgggatttttacgacatcaacatcctcggttcgttctcgttcaagggcaccacgcgcgaaccgcgcttcggcaatcccacgccccgcatcgccgaatgtgaggcggggatgatcaacgccgtggggctgcagaatcccggcatcgacgccgtgatcgccgaggagctgccgcgcctgaagagcttctttcataaacccgtgatcgccaatatcagcggcttctcgatcgaggagtacgcctattgctgcgagcggatcgaccgcgaggagcaggtcggcatcatcgaggtcaatgtctcgtgccccaacgtgcggcacggcggcatgtcgttcggcacttcgcccgaatgtgcggccgaggtgacgcgcgcggtgaaggccgtgaccaccaaaccggtctatatcaaactgtcgcccaacgtgacggacatcgtctcgatcgcccgcgcctgcgaagaggccggtgccgacggcatctgcctgatcaacaccctgctgggaatgcggatcgacgtgaggtgccgcaaggcggtgatcgccaatacgatgggcggtttttcgggtgccgcggtctttcccgtggccgtgcggatggtttatcaggtcgccaaagcctgctccgtacccgtcatgggatgcggcggcgtgacgacggcccgcgacgtgatcgaaatgatgatggccggagccacggccgtgcaggtcggtgccgcgaatctggtgaatccctatgcctcgaaggagattgtcgaagccctgcccgccgagatggagcggctggggatcgagcggctgagcgacattataggaatcgtagaataaagttaaaatcggatatgatgcaacacgacgtaattatcgcctgcgacttcaagtcggcggaagacactttcaagttcctcgacctgttccgggacgaggagcgcaaaccgttcctcaagatcggcatggagcttttctatgccgaaggtcctgccatcgtgcgcgaaatcaagcgccggggccaccggattttcctcgacctcaaactgcacgacattcccaacaccgtgaagaaggcgatggccgtgctgtcgcgtctggacgtcgatatgtgcaacgtccatgcggccggaacggtcgagatgatgaaatacgccctcgaagggcttacccgcgaagacggcacgcggcccctgctgatcgccgtgacgcagctcacctcgaccagcgaggagcgcatgcggcaggagctgcttatcaacgcttcgatcaacgacacgatcgtcaaatatgcgcagaacacccgtgccgcggggctggacggcgtggtttgctcgccgctcgaagcgggcatggtacacgaagcctgcggaaaagagttcctgaccgtcacgcccggcgtgcgttttgcagacggagacgttgcggaccaagtgcgcgtcaccacgcccgcccgtgcgcgggagatcggctccgactttatcgtcgtgggccgtccgatcaccgccgcagcggaccccgtggccgcgtaccgcaggtgcgtaagcgaattttgcgattaaacacgattaaaaaacagtcgattatgaaaccggtaaaacttttctacctgaaaaactgtcccttctgccgcaaggcgctgcgttacatcgagcaggccaaggccgcacaccccgaactgcagccggtggcgatcgaaatgatcgaggagtcggagcagtccgacttggccgacacgttcgattactactatgtgccgacgttttatgtcgacggcgtgaaggtccacgagggcggcatctatgccgaggaggtggagaagattttacgttcggcgctggaataaacaactacagaatatcatggagaaatcaattgctaaagacctgctttcgatcggcgcggtgttcctgcgccccgaacagccgtttacatgggccagcggcatcaaaagcccgatttactgcgacaaccgcctgacgctgacggcgcctgtcgtgcgcggacacgtcgaagaggggctggcgcagatcgtccgcacccgctttcccgaagccgaggtgctgatgggaacttcgaccgcgggcattgcccacgccgccatcaccgcgacgatcctcgacctgccgatgggctatgtgcgcagcggttcgaaggatcacggccgcggcaaccagatcgagggcaagctcgaaaaggggcagaaggtggtcgtgatcgaggacctgatctcgaccggcggttcgtgcatcgaggtggtgaccgccctgcgcgaagccggcgccgaggtgctgggcgtggcgtcgatcttcacctacggcatgaagaagggactggaccgcatgaaagaggcgaacgtcgtcaattacagtctctcgaatctcgacgcgctggtggaagtggccgccgaggagggatacatcaagcccgaagacaaggcccgtctgctgaaattccgcgacaatccgtcggacgaaagctggatggaaaaatagtttgcagggatcgcacgacgcttttccgcacctcgcttgggggcatggaaatgcggcttgcgctcccgtccgcactccggtcggcgccgcgtgcaatccgcagcatgctgccggccggctgcaaaccccgattttgataaatgaaacaacctatgagacacctgattgacccgaccgacctgacggtggccgaaaccgaacaaatcgtggcgttggccgaagatatcatcgccaaccgcgccaaatacagcgaagcgtgcaaggggcgcaagctggcgacgctcttttacgagccttcgacccgcacccgcctgagtttcacctccgccatgatggagctggggggtagcgtcatcggcttttcggacgccaattcgtcgtccgtgtcgaaaggcgaaaccgtggcggacaccgtacgcgtgatccgctgtttcgcggacattatcgccatgcgccacttcaaggagggcgcgccgctcgtagcttcgcagtacgccggaattccggtcatcaatgcgggcgacggcagccacagccacccgacgcagacccttacggatcttctgacgatcaagcgcgagaaggggcgtttcgacaacatgacgatcggcttctgcggcgacctgaaattcggccgtacggtccattcgctcatcaaggcgctgtcgcgctattcggggatcaaggtgatcctgatcgctccgcaggagctgcgtcttccggactacatgctggccgagatgagcgagaattcgaaactcgaattccgcgaagtcgagaccatggaggaggtgatgcccgaactggacatcctctacatgacgcgcgtgcagaaagaacgtttcctcgacgaggaggagttcgaccgcgtgaagaacagcttcgtgctcgatcccggaaagctcgaaaccgccaaggaggatatgattatcctgcacccgctgccgcgcgtgaacgaaatcacgcgcgccgtggacaacgatccccgcgcagcctatttccggcaggtcgagaacggcaagttcgtacgcatggcgctgatccttacactgctgcgctgggccgacgaaaacaagcccttcgagaagactcccgttttcagcgaagactacgtcgtcaatgagatggagtgttccaaccggcgctgcatctcggcgaccgaagatgtcgaccggcttttccaccgcctgcccgacggctcgtgccgctgcgcctactgcgaggccaaggcgaagtgatctccggtatggcctttcatataaagctcccgcaagggagctttttttcttccgcctgcctgagtctgtcttccgtttttcctgagtccgccgctcttccggatcttagggcgtgttccggtccgggcggtgcttttcggcgggtcggacggagtgcatgcgccctgttcggccgatttcccggtttcgaatgtaaaatttgttatttcgattagtaacctgtcttgtgaaattgtattatttatagaaacaaaggcgcagaacagggtgcaataccgtctgtggttgcaaaaagttttactatctttgcatcaattctaaccttaacctgaaaagaaccgatgtctgcaaattcccgaaaagtatcgccgctggcatgggtccccacggtctattttgccatggggctcccgttcatcatcgtaaacatggtagcgacgctgatgttccgagggctgggtatcgacgatgcccgcatcacgctctggacctcgctgattatcctgccgtggtcgctcaaacccttctggagtcccttgatggagatgttcaggaccaagaaattctgggtcgtcgccacgcagctggtttcgggtctgggacttgcgctggtcgccctgtcgcttccgcttcccaacttcttcccctatgccatcgccctgatggctgtcgtggccttcagcggcgcgacgcacgacatcgccaccgacggcgtctatatcaccgaactttccaaagacctgcaggccaagttcatcggctggcagggcgccttttacaacatcgctaaggtcttcgccatgggcggactggtctatctggccggcgcgctcaaggaccatgtcggaatcgtgcaggcgtggatgaccgtgatgggcctttgcggcggcattctcttcctgctggggctgtaccacatccgcatgctgccttcgggcggcgccgcgacggcccatgctgacagtttcggcggcgccatgcgcgaaacgaagcgcatctttctggagttcttcaagaagaaatacatctggatctatttcgccttcatcctcttctaccgcttcgccgaaggtctggtcatcaagatcgtgccgctgttcctcaacgctccgctcgatcagcagggcatgggccttaccgaacagcagatcggactctattacggtacgttcggcgtgatcgccttcgtcgtggggtccattctgggcggctatttcatttcatggctcaaactgcggcgcgccttgttcccgctggtctgcatcttcaacgttccgttcgtggtctacgcgctgctggcgtggttccagccttcgagtcccgtgctgatctgcgcggccatcgtgttcgaatatttcagttacggcttcggcttcgtgggactcacgctcttcatcatgcagcaggtggcgcccggcccgcaccagatggcgcactacgccttcgggtcgtcgcttgccaacctcggcgtgatgcttccgggtatgatcagcggctggctttgtgacagcttgggcggctatcactatttcttcatgtgggcgctgctggcgacggttcccgccttcctgctcgccgcgcgcattcccttcacccatcccgataccgaagaggtgacggccgaggagatcgacaaagaattgatcaacgaataaacagataacgtaaaactatggacaacaacctgaaaatcgtaggcccggccatgccggatatgccgtgggaggatcgtcccgccggctccaaggaagtgatgtggcgctattcggccaatccgatcatcccgcgcgacgcgctttcgacgtcgaacagcattttcaactcggcggtcattcccttcaagaaaggcaagtataactatgcgggcgttttccgctgcgacgacaccaaccgccgcatgcgcatccacgccgctttctcggtggacggcatcaagtgggatatctgcgaggaggatttcaaactcgtgggcgccgatcccgaaatcgccgagtgggtttacggttacgatccccgcgtagccaagatcgaggataagtattatgtgacgtggtgcaacggctaccacggcccgacgatcggcatcgcgtggaccgacgacttcgagacgttccaccagctggagaacgcctttatccccttcaaccgcaacggcgtgctgttcccccgcaagatcaacggccgtttcgccatgctgtcgcgtccgagcgacaacggccatacggctttcggcgacattttctactcggagtcgcccgacatggagttctggggccgccaccgtcatgtgatgtcgcccgcggccttcgaggtgtcggcatggcagtgcatgaagatcggtgcgggtcccgtgcccatcgagacgagcgagggctggctgctgctctaccacggcgtgctgcgctcgtgcaacggttatgtctatgcgttcggttcggcgctgctcgacctcgaccagccgtggaagacgatcgcccgcagcggcccgtacctgatttcgccgcgcgagatttacgagctgacgggcgacgttccgaacgtcacgttcccctgcgcgtcgctccatgaccccgaaacgggccggatcgccgtctattacggatgcgccgacaccgtcacgggccttgccttcggttatatccccgaaatcgtcaagtttaccaaggaaaacaatattctctgacgatgctgcgacgaacgctcttaactgctgcgctcgccgcagccgttttctgcgcaccgctgcgtgcgcaggaacctgccgactgggtcgatccattcgtcggcacgaccaacttcggcacgaccaaccccggcgcggtgtgtcccaacggcatgatgtccgtggttcccttcaacgtgatgggttccgacgagaacgtctacgataaggacgcccgctggtggtccgcgccctatgagttccacaacaagttcttcacgggcttcgcccatgtcacgctgagcggcgtggggtgccccgaactgggatcgctgctggtgatgccgaccacgggcgcgctcgacgtcgattaccgcaattacggcagcaagtacaccggtgaaaccgcttctccgggctactattcgaaccggctttcgaagtacggcgtccttgccgaagtgacggccacgccgcgcagctcggccgaacgctacaccttcccggcgggcgagagccatattctgctcaatctgggcgagggccttaccaacgaatcgggagcttgggtgcgccgcgtgagcgataccgaggtcgagggcatgaaactgctcggcacgttctgctacaacccgcaggcggtgttcccgatctatttcgtgatgcgcgtctcgaaacgcccctccgccacgggattctggaagaaacagccccccaaatacggtgtcgaagccgagtgggacaaggatgccggcaattacaagctctatacgcactacgaccgtgaacttgcgggcgacgacgttggcgtgtggttcagctacgaaacgacggagggcgagcagctcgaagtccgcatgggcgtttcgttcgtgtcggtcgagaatgcgcgcctgaacctcgaagccgagcagcaggagcgttcgttcgacgacatccgtgccgcggcgcgccgctcgtggaacgacgatctgggccgcatccgcgtcgagggcggcaccgacgcgcagaagaaggttttctatacgggactctatcatgcgctgatccatcccaacgtgctgagcgacgtcaacggtgaataccccgcgatggagagcgccgaaatccgcaccgccgagggcaaccgctatacggttttctcgctttgggacacctaccgcaacctgcatcagctgatgacgctggtctatcccgaacgccagttggaaatggtgcgttcgatgatcggcatgtacaaggagtggggctggctgccgaagtgggagctttacggtcgcgaaaccttcaccatggagggcgacccggccatcccggtgatcgtcgatacgtggatgaagggcctgcgcgatttcgacatggacgccgcttacgaggcgatgcgcaagtcggccacgacgcccggctcgcagaacaggatgcgccccgacatcgatccctatgtcgaaaagggctacgtgccgctgggcttctacgcccgcgacctttcgggcgacaactccgtgtcgcacgcgctggaatactatatcgccgaccatgccttgtcgctgctggccgattcgctcggccgcagggaggacgcggcgctgttccggaaccgttcgctcggctataagaactactacagccccgaatcgggcactttccgtccgatcaccggggagggcggtttcctgacgccgttcgatccgcggcagggcgagaatttcgagccggttcccggtttccacgaaggttcggcatggaactatacgttctatgtcccgcacgacgtctacggactgtcgaagctgatgggcggccggcgcaaattcatcgacaagctgcaaatggtcttcgacgaggggctttacgatcccgcgaacgaacccgacatcgcctatccctaccttttcagctatttccggggcgaggagtggcgtacgcagcgcgaggtgaaccgcctgctggccaaatacttcaccactgcgcccgacggcattcccggcaacgacgataccggaaccatgtcggcgtgggccgtcttctcgatgatgggcttctatcccgactgtccgggcgagccgtattacacgcttacctcgcccgttttcgatcgggtgaccgttacgctagacaggaaatactatccggccggggaacttgtcatcgagacgaagcgtcccgattccggcgcggtctatatccgctcgatgacgctcggcggcaaaccgctgaagcgataccgcatcggccacgacgagctgctgcggggcggacggctgactttcgaacttcaaaaccgcaaatagatgagactcttccgctggatattcgttgtctcgctgctgctcgtctcgtccggagtccgggcgcagacccggctgacccgcaacggcaaacctgcggcccggatcgtcgtggcgcagcaaactgccgccgatctcacggccgcgcagctgctgcagcgattcgtccgcgaatcgaccggtgcgacactgcccctgctgcatgacgtgacgccccgcaagggcgacatcctgatcggagcttcggacaccgcgggacttgccgaggacggcttccgccttcgcacgcaggaaggcgtgctgcgtatcagcagcggcggcgacaagggggcggtttacggcgtcatgacgctgctggaacgttacttggggctggattatttcgccgccggggtctatgacctcgaccggaatccgaccgtcacgcttccggcgatggacttcgccgaaaacccggcgttccgctatcgccagagtcagggctacggcatggcgcaggactccgtgtaccggctggccctgcgtctggaggagccgcgcgacatctttgccggaggcctgtgggtgcacaccttcaacagcctgcttcctgcgtcggtctacggcgcggagcatcccgaatactactcgttcatcaacggcgaacgccgtccggggcgcgccagccaatggtgtctgacgaacgacgagcttttcgaactggcggcggcgaaggtcgattcgatcttccgggccaaccccggcatgaacatcatttccataagccagaatgacagcaatttcacctactgccgctgcgaggagtgcgagaaggtcaaccagtacgagggcgcgccttcgggcaactatatccgcttcctgaacaagctggcggagcgtttccccgacaaggagttttcgacgctggcctacctctttacgatgcagcccccgaagcacgtgaagccgctgcccaacgtcaatatcatgctgtgcgacatcgactgcgaccgcgaagtgccccttacggacaatgcgtcgggccgcgagttcatcgaagcgatggaggggtgggcggccctgtcggacaatatcttcgtgtgggactacggcatcaatttcgacaacatggtcgctccgttccccaactttccgatcctgaaacccaatatcgggcttttccggcgcaaccacgccacgatgcacttctcgcagatcggcggctcgtacggcggcgatttctcggagatgcgcacctatgtggtcgccaagctgatgtggaatcccgatcaggataccgattcgctcatgctgcgtttcatgcgcggttattacggacctgctgcaccttatatttatcagtacgaaaaactgctcgaaggcgcattgctggcgggcggccagcggttgtggatatacgattctcccgtctcgcacaaggacggcatgctcaacgccgcctgccgcaagcgttacggagagctgttcgactgcgccgagcgggccgtggcgggggattccgtcctgctgcgccgcgtgcgcctgacgcgtctgccgctgatgtactccaaccttgaaatcgcccgcacgacggccgacaaggacctcggcgccgtggtgagcgagctggacgcgttcgagaaatacgtgacccaattcggcgtgaaaacgctcaacgagcgcaacaacagtccgcaggaatattgccggctctaccgcaaacgttatcttcctgcggagaactccaatctggcgctgggcgcgcggatcgtctggatcgacgctcctgcggagaaataccgggcgtcgggcgagaagaccctgaccgacggtcttttcggcggcgcatcgttcgtcgagagctggacgggctgggagggcaaggacggcgccttcgtcgtcgatctgggccgcgacacgaccttctcgacggtcgagaccgatttcctgcaccagctgggccagtggattctgctgccccgttcggtgcgctactccgtctcgttcgacaacgcggactggaccccgttcgggcaggtggagtttcctgaggaccagtcggtgcccgtaaagttcgttccggctgccgtcacggccgcacaaccggtgctggcccgctatgtcaaagtcgaaatcgaaggcgtcaaaacctgtccgccgtggcattacggcgtaggctgcccctgctggttcttcctcgacgaagtgaccgtgaaataaaacgttgcgaaaaattttaaacgattgcataatgaaacccaagcatcttctttccttatccgttctgctgatctcggccgcctgttcgcagcctgagcagaagccgctgacgcagtatgtcgacatgtatatcggcacgggcggccacggccatgtcttcatgggggccaacgttccgttcggcgccgtgcagctcggccccaccagcatcccgcagtcgtgggactgggtgtcgggataccacatttccgatacgaccgtcatcggtttcagccatactcacctcaacggtacgggtatcggcgatctgttcgacgtcacggtgatgcccgtcgtgggcggggtgacctacgcccgcggcacggaggacgacccgcagtcggggctttggtcctatttcagccgtaagaacgaaaaagcccgtccgggctattacgccacgcggctcgaccgctacggcgtcgatgtggagctgaccgccaccaagcgcgtcgggctgcacaaatacaccttccccgcgtcgcaggaggctgccgtggtcttcgacctcgaaaacggcggctgctgggacaaggccaccgagaccgcattcgtttccgacggactccggctcagcggttaccgctattcgacgggctgggccaaggatcagcgcgtttacttcacggccgaattctcgaagccggtgaagaatatctcctatcccgatgcgtcggagacggttccggaggagggcgacgttacggtcaagggccgttacgcccgcgtggagttcgatacgaccgacggcgagccgctctatatgaaagtggcgatttcgcccgtgagcatcgagaacgccaagctcaacatgcaggcggaacttcccggctgggacttcgaagccacggcggcggcggccgacaaggcgtggaacgccgagctgcagaaggtgcgtgtcgagacttcggacgaagccgcccgccgcatcttctatacggcgctctaccacacgatggtcgctccgtcggagttctgcgacgtgaacggcgactaccggggcgctgacggcgagatctaccgcgccgcgccgttcgtgaactatacgaccttctcgttgtgggacacctaccgcgccgcccagccgctgatgacgattctccatcctgagaagatgtccgacatcgccaatacgatgctccatatctacacgcagcagggcaagcttcccgtctggcacctcgcgggcaacgagaccgactgcatggtcggcaatcccggcattccggccatggccgacatcgtgctgaaaggttacggcggtttcgacaaggagctggcctacgaggcgctgaagaaatccgccatgctcggcgagcggggtatggacctgcgcatgaaatacggctatatcccctgcgacctcttcaacgaagcggtggcctacgacatggagtacgcgctggccgactgggccgtggctcaggtcgcggcgcagcgcggcgatacggccgattacgactatttcctcgatcgcagcaaatcctaccgccacttcttcgatcccgaaacccgtttcatgcgcgggctggattcgaaaggcggcttccgcacgcccttcaacccgttcgcttcgacccaccgcgaggacgactactgcgagggtaacgcatggcagtatacgtggctcgcgccgcacgatgtcgaggggctgatcggctgcttcggcggcaaggaggctttcgtcgaaaaactcgactcgctcttcacggtcagctccgtgctggagggcgccgcttcgcccgacatttcgggcctgatcggtcagtacgcccacggcaacgaacccagccaccacgtcgtctacctctatacgatgatcggccagcccgcgaagaccgccgacaaggtgcgcgaaatcctgacgacgctctaccacgaccagcccgacggattgtcgggcaacgaggacgtcggccagatgtcggcgtggtacgtgctttcgtcgctgggattctatcaggtcgagccggccggaggacgctacttcttcggttcgccgctcttcgacaaggccgagctgcgcgtgcgcgacggcgtgttcaccgtgatcgcgcacaacaattcggcggctgacaaatacattcagcgcgtgaagctcaacggcgagccgtacgccaagccctatatcggtttcgaagagatcgccgcgggcggcacgctcgaattcgaaatgggaccggagcctgccctatggtacgaactttaaacggaaatgacagcaatgaaaagtagaaatatctttttcgcggccctttgcgccgccgttttggccggctgttcgtgcccttcggccgggcagcgatccccgcagcgtccgtcggactatgtttcgacattggtaggctcgcagtcggatttcacgctttcgacgggcaatacctatcctgccgtcgctctgccttggggtatgaacttctggacgccccagaccggcaagatgggcgacggctgggcctatacctacggggcgcaccgaatccggggcttcaagcagacccaccagccctcgccgtggatcaacgactacggccagttcgcgctgatgcccgtgcgcgggaatgataagctggacgaagagtcccgcgcgagctggtattcgcaccaagccgaggtggcgaagccctactattacagggtctatctggccgaccacgacatccgcgccgagatcgccccgaccgaacgtgccgcgatgatgcgcttcacctttcccgaaagcgacgagtcgggcgttgtgatcgacgccttcgaccgcggttcgcagatcggcatgctcgacgcccgcacgatcgtgggttacaccacgcgcaacagtggcggcgttcctgataatttccgcaattacttcgtcgtgcgcttcgatacgccgttctctgccgtcgagctgaccgacgctcccggcgagtacgaacccggcagcaacctgctctatcccgacggcagcaagtcggtgacgggcggacacgccgtggcgaaggtgcacttcccgacccgccgcggccagcaggtctgcgccagcgtggcttcgtcgttcatctcgcccgaacaggccgttcagaatctcagggagctgggggccgacgacttcgagaccgtcaagtccaaggcgcaggagcgctgggacgaagtgctgggccgcatcgaggtcgagggcggcaccgaagagcagatgcgcaccttctattcgtgcctgtaccgttcggtgcttttcccgcgtaaattctatgaagtgaccgcttcgggcgagatcatgcactacagcccctacaacggcgaagtgctccccggctacatgtataccgacaccgggttctgggacacgttccgcagtctgtttccgctgctcaatctggtctatccttcggtgaacgccgaaatccagcagggactggccaacacggcccgcgaaagcggcttcctgcccgaatgggcctcgccgggccaccgcggctgcatggtgggcaacaactccgcatcggtggtggccgacgcgctcctcaagggcgtcacgcccgaaaaggagtggcagacgctctacgacgccatgatgcacgcgcgcacgaacgtccaccccggcgtctcctcgaccggacgtctggggcacgagtattacaaccggctgggatacattccctacgacgtgaagatcaacgagaacgtcgcccgcacgctcgaatacgcctacgacgactggtgtatcgcacaggtggcccgcaagctgggtaagacggaggatgccgcggcgcttgaggaggcttcgcgcaactaccgcaacgtattcgacaagacgaccaagctgatgcgcggccgcaacgagaacggagagttccagtcgccgttcagcccctacaagtggggcgacgccttcaccgagggcaacgcatggcactacacatggtcggtgttccacgacgtgcagggacttgccgagctgatgggcggccgggaaggattcgccgaaatgctcgactcggtgttcgtcgtgccgccgatctacgacgacagctattacgggacccgcattcacgagatcaccgagatgcaggtggccgacatgggcaactacgcccacggcaaccagcctgcgcagcatatgatctacctgtacgactatgcgggccagccgtggaaggcgcagtactggacgcgcgaggtgatggaccgtctctattcgtccaagcccgacggctactgcggcgacgaggacaacggccagacctccgcgtggtatgtcttctcggcgatgggattctatcccgtatgtccggcttcggaccagtacgtcatagggtcgcccctgttccgcaaggcgaccgtgaaactggagaacggaaagaagatcgtgatcgaggctccggacaacgctcccgaaaaccgctatatcggcaccatgaagctcgacggaaagcgatacgaccgcaacttcatccgctggtcggacctcgtaaaaggcgcgaaaatagactttgcgatgcagcccgatccggcgtacaaacggggtgtcgacccgcaggacgcgccctattcgctcagccgcggagaatgtcgataatttgtcaatagaatctgactttcggttttgaaaattggccggaaaatactacttttgtagcgttgtttttacaattgttaggttaatccggacatatctcatgacctccacaggcaaaatcgatcaacgcgaacgaaagaaacagcagggccaagccgctgcattctattcgtcgtgccgacagcagggtcagagcgcgcagtcgcaggggcagcagatgtcctgcagcgggatgcgcggatagataccagaccgccatgacatgcgatgtcgtggcggtctgcttttttgaaaaacttaaaaccaaaggatatgaaggtcggtgtgattatgggctcggtgagcgattacgaggtgatggccgacgccgtcgccacgctcgaacaattcggtgtcgatttcgaaaagcgcgtcgtaagcgcccatcgtacgcccgatctgttgtgcgagtatgccaagacggccaaggcgcgcggtatcggcgtgatcatcgccggtgcgggcggcgcggcgcacctgcccggcatggtggcttcgatgacgacgctgccggtggtgggcgttccggtcaagtcgcgcgccctgaacgggctggactcgctgttgtcgatcgtgcagatgcccgcgggcgttcccgtggccaccacggcgatcaacggttcgaagaatgcggcgctgatcgccgtctcgattctcgctttgcaggacgcggaactcgcggctcggctcgaagcgttccgcgccaagcagaccgccgacgtacttaaagcggaactttagatgaagacgatcggcatcataggcggcggccagctggggctgatgattatcgaacaggcgcacctgctcggtgcgcgcacggtgtgtctcgatccggcggcggacgctccggcctttgcgctcagcgacgagcggatcgtggcggcgtacgacgaccctgcggcgctggaggagctttgccgccgcagcgacgcggtgacctacgagttcgagaacgtgccgggcagcgtgctgatcccgcttgagaagaaatacaacatcccgcagggcttccgtccgctcttcgattcgcaggaccgcctgcgcgagaaggacaacgcccgtgccggcgggctggcgacgcccgaatacgccgccgcggacgacgaagcgtcgctgcgcgccgctgtggcgaagatcggcctgcccgccgtgctgaagacccggacgctggggtacgacggtcacggacagctggtgctgaagaccgaggccgacatcgagaaggctttgccgatgctcgccgtgccctgtattctggagcagttcgtgcccttcgatttcgaagccagcgtcgtgctggtctccgacgggagccgtgtcgtcacctttccgatcggccgcaacgtccaccgcgacggcatcctcgatctgtgcttcgtgcccgccggggagatggacgacgagctgcgcggacggatggccgccgccggcgagcggtttatgctgacgtgcggttaccggggaattctggcgatcgagtttttcgtgaagggccgcgaattcttcttcaacgaaatggcgccgcgcccccacaattcgggacactatacgatcgaaggctgtacgaccaaccagttccgcgagctggtgcgcttccttttgggagagccgctgcaggagccgcggctggtggcgccgaccgtgatgaagaatatcttgggacaggacctcgaagcggccgaagcgatcgccgccgaaaaccgtccgggcgtgcatgtccgtctctacggcaagaccgagagccggccgaagcgcaagatgggacacattaccttcgtgggcatgactccggcggaatacggggctgtctgggccgaccggtttgtgaaatagcggggccggtcccgcatgcgtcgccgcaggcggacgggaggagcttccggaagcggctgcggggacgaagaccggcggaacggtcggtaaggaccgcagaaacgaatgaagaatattaaacgatataggatgaaaaactaccggatttttgttgaaaaacatccccgtttccgggtcgaggccgaaagcctgcgccgggaactgaacgccaacctgaacctcgatatccgcgaactgcggctgctgaacgtttacgatctgttcggcttttcggaggacctgctcgaaaagacccgctacagcgtcttcggcgaagtggtgaccgacagcgtgaccgatgcgtgcgacctcgcgggacagaagtatatcgccgtggagtatcttcccggccagttcgaccagcgcgccgcgtcggccgtggattgcgtgcggctgatcgacccgtcggccgaggtgcgcatccgttcgtcgaagctgctgctgttcgacggcgcggtgaccgacgaggagatcgcgcggatcaaacgctactatatcaatgccgtcgagtcgcgcgaaaaggacctgaacgtgctcagcgacatggagcaggccgaggtgaagcccgtcgccgtgctcgaaggcttcacgaagatgaccgacgccgagctggcgccctactgcgcgcagtacggactggcgatgaacgccgacgatctgcgcgaggtagtgaaatatttccgcgccgagggccgcgatccctatgaaaccgaactgcgcatcctcgatacctattggagcgaccattgccgccatacgaccttcacgaccgagctggagggaattacggtcgaggagtcgttcgtcaaggacgaaatcgaagattcgctggccctctacctgcgcatccggcgtgagctgggccgcgagcacaagagcatctgcctgatggacatggccacgatcggcgcccgctacctgcgcaagaaggggctgctggacgatatggaggtgagcgacgagaacaacgcctgctcggtctatgtcgatgtcgacgtggacggccggaccgagaagtggctgctgcagttcaagaacgaaacccacaaccatccgaccgagatcgagccgttcggcggcgcttcgacctgtctgggcggcgctatccgcgacccgctgtcaggccgcagctacgtctatcaggcgatgcgcgtgacgggtgcgggcgacatctaccagaaggtgggcgacacgctcgaaggcaaactcccgcagagcgtgatttcgaaaaaggccgcggccggttattcgagctacggcaaccagatcggtctggccacgacccacgtacgcgaggtgtaccacgacggctatgtggccaagcgtctcgaagtgggcgccgtggtgggcgccgtgaaggcggagaacgtccgccgcgagaaacccgctccgggcgacaagatcatcatgctgggcggccgtacgggccgcgacggcatcggcggagctaccggatcgtcgaaagaacacaacaccaagtcgctggagacctgcggcagcgaggtgcagaagggcaacgctccggaggagcgcaagctcgaacgtctgttccgccgtccggaggtaacgcgccttatcaagaaatcgaacgacttcggcgcgggcggcgtcagcgtcgccatcggcgagctggccgacgggctggacatttacctcgaccgcgtgaagaccaagtacagcggcctgaactccacggagctggccatcagcgagtcgcaggagcgcatggcggtagtcgtcgaagcgaaagacgtcgagacgttcatgcgctactgtctcgaagagaatatcgaagccgtcgaggtggccgatgtgaccgacacggcccgtatgcggatgttcaacaaggaccgcaaggtcgtggacctctcgcgcgaattcatcgacagcgcaggcgcccggcattatgccgaagcgaaggtcggcgaggtggaaaaccgcaatccgttcgtacgtgaaatcgccggcgatacgcttgccgcgcgtttcgagaataacctcagggacaacaacgtcgtttcgcagcggggactcgtcgagatgttcgactcgacgatcggcgcctcgaccgtactgatgcctttcggcggccgtacgcagggcagcgagacgcaggtctcggtgcagaagcttccgaccgacggctacaccgacacggccagcatcatggccttcggttacaatcccttcattgcttcgtggagtccctaccacggcgcggcctatgccgtggtggaagccgcggcgaaggtcgtggcggcgggtgcgcgctacgacaggatgcgttactcgtatcaggagtatttcgagcgcatgaccaagaatcccgaatcgtggggcaagcctctcggcgcactgctcggcgcgctgaagatgcaggtcgagctgggactcccgtcgatcggcggcaaggactcgatgagcggcacgttccagcatatcaacgtcccgccgatgctgatggctttcggcatcacgacggtcgacgccggaacggtcatctcgaccgacttcaagaaggccggcagccgcatctacctcgtgcgccataccccgaaggagaattacatgcctgacacggcgcagctgaaggccaacttcggtttcgtgagcgggaagatcgagagcgggaagatactttcggcatggtccgtcggattcggcggcgtggccgagggccttgcgaagatggctttcggcaaccggatcggcgccgaggtgacgacggacgaaagcaggctttacgaatacgcctacggttcgattctcgtggagagcgacggtgaactggatttcccggcggccgaactgctgggtgcgaccgttgccgacgaagccctgaccgtgaacggcgtacggatgccgctcgacgggttgtacgaagccaataccgtgaaattcacgacggtttaccccgacaagggcgagaaccgtgccgacgtgatgagcgccgaacccgaacgccgcacctttgcctatgagggcgaagccgtcgagcgtccggtggcctacctgcccgtattccccggcacgaactgcgattacgatacggccaaggcgttccgcaatgcgggagccgatgtgacgaccagcgtattgtgcaatctgggcggcgacgacatcctgcgctcgatcgcccagatgaaggagcatatccgccgcgcccatattttcgtgctttgcggcggcttctcgtcgggcgacgagccggacggcagcgcgaagtttatcgtgaacgtacttaacaacaaggatatacgcgaggaaattcacgcgttgcttgaccgcggcggccttatcctcggcatctgcaacggttttcaggcgctggtcaagtcgggactgctgccgtacggccgtctgggcatggtgacgaaggattccccgacgctgttccgcaacgacgtcaaccggcatatctcgcagatcgtctcgacgcgcgtctcgacgctcaactccccgtggctcgcgggcttcgaactgggcgaggtgcactcgatcgccgtcagccacggcgagggcaagttcgtcgtcagcgaggagctggccaaggagcttttcgccaacgggcaggtggccttccagtacgtcgatgccgaaggccgcgtgacggccgaggcgccctacaaccccaacggctcgtcgtacgccatcgagggcatcgtatcgcgcgacggccggattctgggcaagatgggccatacggagcgttacgggaagaaccttttcaagaatatcgccggcaacaaggagcaggcgctgttccgcaatgccgtcgagtatttccgcaaatcgaaatagtgtaaaccgaaaccatatgcctatgaagacctctttttatcgttttgcggcgctcctgctttttgcggcggcgctgaccgcaggatgcggcgagcggacggacgacatgcgtctgctctattggaatattcagaacggcatgtggtcggaccagagcaacggctacgacaatttcgtggcgtgggtcaaaggctacgatcccgacgtatgcgtgtggtgcgaggcccagtcgatctataagtcgggtacggcggagaggatggattccgtcgatcgctacctgacggctaactggggcgaactggcggcccgttacggtcataaatactggtatgtgggcggccaccgcgacaatttcccgcaggtcgttacgtcgaagtatccgatcgagaacgtgcagcggatcgtcggccaagctcccgacagcatcgtttcgcacggcgcgggctgggcccggatcgtgaagaacggcaggccggtcaatatcgtgacgctccatacgtggccgcaggcgtatgcctttcaggccgtggaccgcgacgccagcagggccgaacacggcggtgaccgttaccggcgcatggagatcgagtatatctgctcgcatacgatcgctacgcagtccgacgccggacagcagttgtggatgatgatgggcgacttcaattcgcgctcgcgcctcgacaaccgggtttacaactatcccgacgacgacacgcgcctgctggtgcatgattatatcgcggagcatacgccctatgtcgacgtgatcgcggagaagcaccccggcgaattccacaccacgacccacgggcagagccgcatcgacttcgtctactgcacgccgccgctctgcgagcggatcacccgtgccgaggtgattgcggacgacttcaccgagccggtgcgcgatccgggcaagttgtcgaacttctaccacccctcggaccaccgtccgattctggtggactttgatatgaaatagaacgaatcaacaaataaacttaaaaaacacaaacatcatgaaacagctcgaaatgctctacgagggcaaggcaaaacaggttttccgcaccgacgatcccgaaaagatcatcattcactacaaggatgcggcgacggctttcaacaacatcaagaaggctacgatcgagaacaagggcgtgctgaacaacgccatctcgaccctgattttcaaagagcttcagaaggcgggcatcaagacgcactacatcgagacgatcaacgaccgcgaccagatctgccgcaaggtgacgatcattccgctggaggtgatcgtgcgcaacatcatcgcaggctcgatggcccagcgtctgggcatcgaggagggcacgcagccgtcgaacaccatttacgacatctgctacaagaaggacgaactgggcgacccgctgatcaacgaccaccacgccgtagcgctgggcgccgtgacctacgacgagctggatctgatttacgccatgacttcgcgcatcaacgaagtgctgcggaacatgttcgccaagatgaacatcaacctcgtggacttcaagatcgagttcggccgcacgtcggacggcgagatcgtcctcgccgacgaggtgtcgcccgacacctgccgtctgtgggacatgtccaccaacgagaaactcgataaggaccgtttccgccgcgatctgggcaaggtgcgcgaggcttacgaggagattcttgcccgtctgcagaaaatcgtggagtaatggcgatgcggcagattagcgaccgggagttgcatgaggagtgcggtgtgttcggcgtcttcggggtgcccgacgctgcatcgctgagctattacggcctgcatgcgctgcagcaccgcggacaggagggcgcgggtatcgtggccgtcgacgaagggggaactttccgccgcatcaagggcagcggactggtgaccgaggtgttcgacgaggcgaaactggcgacgctcaagggaaatacggccatcggccatgtgcgctatacgaccgccggaggcggcggcatcgagaacgtgcagccgtttctgttccgtcacaacacgggcgatttcgcgctggcccacaacggcaacatcgtcaattcggccctgttgcgcgagtatctggagaacaagggcagtctgttccagtccacgtcggacagcgagattctggcccacctgatcaagaaggagacccgctaccacgaccggccgcgcatcttttcgatcatcgatgcgctgaacatgctggagggggcgttcgcgttcctgatcatgaccgccaaccgcatttacgcctgccgggacaaatacggcctgcgtccgctggccatcggccggctgggcgacggctatgtcgtgtcgagcgaaacctgcgcgttcgacgtgctgggtgccgagttcgtgcgcgacgtcgagccgggcgagatcgtgacgatcgacaagcagggtatccgcagtcgcgactactcgatgtacaagcgtcacgaaatgtgctcgatggagtatatctatttcgcacgcccggacagcgacatcgacggccgcaacgtccatgcctaccgcaaggagtcgggccgtctgctcttcaaggagtcgccggccgatgcggacatcgtggtcggcgtgcccgattcgagtctcagcgccgcgatgggttatgccgaggcgagcggactgccctatgaaatggggctgattaagaacaagtatatcggtcgcacgttcattcagccgacccaagagttgcgggagaagggtgtgcggatgaagctttcggccgtgcggagtatcgtcaagggcaaacgcgtcgtgctggtggacgactcgatcgtgcgcggcaccacttcgcgccgcatcgtcacgatgctcaaggaggccggagcgacggaggtgcatgtgcgcatcgccagccccccgatgatcagtccttgtttttacggtgtggacacctcgacctatgacgaactgatctcggctcgcaagaatcccgaggccgtgtgtgaggagatcggcgctgattcgctggtattcctctcgcccgcgtcgttgctggaggccggcggctgcagtgagctttgcatggcctgcttcacgggacgctatcccacggcgctgtaccagtcggtcgatgaggcgaacaaagatgtaaaatgttaagtaaaccattcaagtagactataatggcacagagttatgagaaggccggcgtaaacctcgaagccggatacgaagtggtgcggcgcatcaagaagcacgtcgcgtcgacctcgcgtttgggcgtgatgggcaatatcggcgccttcggcggcatgttcgacctttcggcgctgaacgtgaaggagccggtgctggtgagcggcaccgacggcgtgggcaccaagctcaagctggcgttcgagatggacaagcacgacacgatcggcgtcgatgccgtggccatgtgcgtgaacgacgtgctggcgcagggcgcggaaccgctggtgttcctcgattacgtggccgtaggccacaacgagccgaagaagatcgaagccatcgtcagcggtgtggccgagggctgccgtcaggccggctgcgcgctggtgggcggcgagacggccgagatgccgggcatgtatgcgcagggtgagtacgacatcgcgggctttacggtcggcgtggtcgagaagtcgaaactgatcgacggctcgaaggtcaaggcgggcgacgtgctggtcggcatcgcgtcgagcggcgtgcactccaacggtttcagccttgtgcgcaagatcgtcgccgacaactgcttcgacctgcacgaggtatatcccgaactgtcgaacaaactgctgggcgaggtgctgctgactccgaccaaaatctatgtcaggcaggtgttggaggtgatccgcaactgcgacgtacacggcatcagccacatcacgggcggcggattcgacgagaatattccccgcatcctgcacgacgggcagggactcgaaatcgaagagggcgcatgggagattctgcccgtgttccgcttcctcgaaaagtacggcaaggtggcgcaccgcgagatgttcaacatcttcaacatgggtatcggcatggtcatcgccctcgatgcgtcggaggcggacaaggccatcggcatcctgaccgcgcagggcgaaaaggcctcggtgataggacgtgtaaccgacgccgaaggtgtcgtaatccgctaaggtcgtgcgacgcctcgcagtcttcgccagcggcagcggcaccaatttcgaagccatcgtctcggcctgcgagcagggcgtgaccgggggcgaggtggtgctcatggtttgcgacaaacccggagcgcgggttgtcgaacgcgccgccgcgcacggtgtcgaaacgtttgtcttcgcgccgaaggagtacgcttcgaaggccgattacgaacgtgaaatcgtgcggctgctcgatgccgcgggcgtggaactggtttgtctggcggggtatatgcgcatcgtcggcgacgtgttgctggaggcttacggaggacggatcgtcaatatccatccctcgctgctgccggcgttccgcggagcgcatgccatcgaacaggcgatggaatacggcgtcaaggtgttcggggtgacgatccactatgtcgatgcgtcgctcgacggcggacggatcatcgcccagcgggccttcgagtacgacggtgacgacatcgaagagctggaagcccggattcatgcggtggaatatccgctttacgtagaaacgataaaaaaactgctcgatccatgagtgtcgcattcaatacgctcgaatcgctcgtcgaccggcaggccgtcgcctttatcggctcggtcgatgccgagggtttccccaatatgaaggccatgctcgcaccgcgcgtacgggaggggctgaaggtcttctactttacgaccaacacctcgtcgatgcgggcggcgcaataccgccgcaatcccaaggcggccgtctatttctgcgacggggcttctttcgaggggctgatgctccgcgggacgatggaggtactggaggacgccgcgagccggcggctgatctggcgcgagggcgatacggagtattatccgcagggcgtggacgatccggactacagcgtactgcggtttacggccgtggaaggcaggtattacagtaattttcattcggaaaatatcgaaataaaatagtaacagatgagagcattgataagtgtcagcgacaaaacgggtgtcgttgatttcgccaagggcctgcgtgccttgggctgggaggtgatcgccacgggcggcacgatgaaactgctggccgacagcggtgtcgaggttatcaacatcagcgacgtgacgggatttcccgaaatctgcgacggccgcgtcaagaccctgcaccccaacgtgcacggcggcctgctggcccgccgcgacgatcccgaacacctgaaggcgctgaaggagaacaagatcgagtttatcgacatggtctgcgtgaacctctatccgttccgggagacgatctcgaagcccggcgtgaagatggaggacgccatcgagaatatcgacatcggcggtccctcgatgctgcgttctgcggccaagaactgggccgacgtgacggtggtctgcgatcctgcggactatgcgcagattctcgacgaaatccgcgccggcggcaacaccgggaaggccacgcgcctgaagctctcggccaaggcctatacccatactgccgagtacgattcgatgatcgcgacctacatgcgtgcgcaggccgggctgaacgagaagctgttcctcgaattcgacctcgtgcagtcgctgcgttacggcgagaacccgcaccagtcggcccgattctaccgcgaggggaaaaaggtgccctattcgctggcttttgccagacagctcaacggcaaggagctgtcctacaacaatattcaggacgccaacgccgcgctgtgcatcgtgcgcgagttcgacaagcccttctgcgtgggtctgaagcatatgaatccctgcggcgcggcggtaggaaaggatgtcgtggaagcgtggaccaaggcctatgaagccgacaaggtgtcgattttcggcggtatcgtggcgacgaaccgcaccgttacgaaggaggcggccgagctgatgaagccgattttcctcgaaatcatcatggctcccaaattcgacgagggcgcgctcgaagtgctttgcacgaagaaaaacctgcgattgcttgaggtcgatatggagcagggcgccgtcggacagaagcagtacgtgagcgtgaacggcggtctgttggtgcaggatctcgacgtggagacgaagagcgtgacggccgatatgtgcgtgacggcggcgaagcccgcagcggagcagatggacgacatgaacttcggctggcatatcgtcaagcatgtgaagtcgaacgccatcgtggtcgtgaaggacggccggacgctgggcgtcggcgcaggccagatgaaccgtatcggttcggccgagatcgccctcaagcaggcgcatgccgcgggcgttaccgaagggctggtgctggcttcggacggcttcttccccttcgacgactgcgtgacgctggccgccgaatacggcgtgacggcgatcgtgcagccgggcggctcggtgcgcgacgaagattcggtcaagaaggccgacgagaagggcattgccatggtatttacgggcgaaaggcatttcaagcactaaagcgagctttagtgcttgaccatgcggctaaactaaattgataatcctcctaatccccctttgataagggggactttggataaagattgtcagatttgtcgcttgattcatctgtgaaaaactggatgtttttgaaatttctttgaaagaacggataaaataaacgaatatgaaagttctggtaataggcggcggcggccgtgaacatgcgatcgtagacgccctcgcacgctcggcgcaggtggagaaaatctggtgcgcccccggcaatgcgggcattgcggcgcaggccgagtgcgtggcgatcaaggagaccgaggtggagagactgcgcgacttcgcagcggccaacgaaatcggccttacggtcgtggggccggaggtggcgctggcggcgggagtcgtcgatgcgttcaaggccgccgggctgcggatcttcggcccgacgaaagccgccgcacggatcgaatcgagcaaggagttcgccaaggacctgatggccaaatacgctattccgacggcggggtaccgcgctttcacggagtatgccgaagcgttggattacgtggcttcgcgtccgcttccggcagtgttgaagtacgacgggctggcggccggcaagggcgtagtgatcgccgagacgcaggaggaggccgacgccgcactgaaagacatgctgctcgacgacaagttcggcgaaggcaaggtcgtggtcgaggacttcctcacgggacccgaattttcgttcatgtgtttcgtgtcgggccgcaaggtgtggccgatggcgctggcgcaggaccacaagcgggccttcgacggcgacaaggggcccaacacgggcggtatgggggcctattccccgctgccgttcgttacggcggaggatgagcggtatgcgctcgaaaagatcctgcagccgacggccgacgcgatggtcgccgaagggtgtccgttcgaaggggtgctgtacggcggtctgatgaagactccgcaggggatcaaggtgatcgagttcaacgcccgtttcggcgatcccgaaaccgaggtcgtgctgccgcgcctgaagagcgatatcgtcgatatcttctgcgccgtggccgacggagcggatacgcggctcgaatggcatgatttcgcgacgctgggcatcgtactggcctcgaagggctatcccggctcctatgagaagggacacgagatcaagggactcgaccgggtcggaagcgctgtgtaccatatgggcacaaagtccgacggcggccgtattctgacggcgggcggccgtgtgctcttcgtcgttggcaagggggcgacgctggccgaagcccgtgcgaatgcgttgaaggacgtggcgcagatcgaatgcgacaatcttttttacaggaccgatatcggacattgggcatttgaaaaatagttgggaaatatgataatcagcggaaaagaactttcagcgaaacttaaggccgaaatggccgccgaggtggcggcgttcggcgaaaaatacggccgggtgccccatctggtcgtgattctggtgggcgaagatcccggcagcgtgtcgtatgtgacgggcaaggccaaggcgtcggccgaggtggggattcgcaacacgacgatccgcaagccggagacgatttcggaagcggagctgctcggcattatcgccgaattgaatgccgacgcggaggtggacggtattctggtgcagctgcccctgccgaaacatatcgacgaggacaaggtgatcgaggcgatcgacaaggccaaggacgtggacggctttcatcccctgaacgtggcggctttgtggcagaaacagccctgcacgctcccctgtacgccgaagggcatcatcaagatgctgaaggccgcaggcgtcgggattgcgggcaaggaggccgtggtgatcggccgcagcaatatcgtggggcttcccgtgtcgaaactgctgctggatgagaatgctacggtgacgatgacgcacagccgcacgcgcaatctgccggaggtgacacgccgggccgatattctggtcgtggcgatcggccggccgaaattcgtaacggccgacatggtgcgtgaaggcgccgtggtgatcgacgtgggtgtaaaccgcgatcctgagaccgggaagttgtgcggcgacgtcgatttcgccgcagtcgagccgaaggcttcggtcatcacccccgtgccgggcggtgtggggccgatgacgatttgctgcctgatggagaatacgatcgagtgttttctgcggcggatgggccggaaatagatgatgaatgcctgaatcgggttttcccggtttgggacaagcattccgataagatagggtccgtggcccggaccgaaatgccccgaagcgaaagcttcggggcatttgttttcctgcgggacaaactgcgtcttgcctttgccgttatctccgtgccgctgcgcagggattggtgtcgtgtgccgtgtgcggcggcggacggctttcgctgggttttgcgtgctgtctttatcctttttgttggtgttggtatacatttgcgtccacgggctgtctgttgtagtgcgacttggtatacaaaaaagtccttttgatgggctttagcagttcttggagtacatctacaggggattgtgcttaccttcgaatgtcacaatgaacgaaattgtgtgtgcgaaattaaacaattcggatcggtgtgaatatttgcgaccttttttgatggaacaataaggattgcccgcttaattcgtcctgcgagttgcagaccgtccggaaaatacgtacactaatttaaaaaaatctcaacaatgaaacgtttttatttggttgctgcccttgcagcgacagcgatggctgcggccttttttacttcgtgcgacaagcaggaggaagttacccccccccagcctgaaagcgcagcattaggatttcagtcggttgttactgcaggtctggagacccgtgcggcaggtgatccgactccgctcaatgcttcgttcaaaatcaatctcgacaccaatgatgcttattccacggctgtaaataatcaggaagttaaatatacggatggcagcggctattcgatttctcccgcgatttatttgttgaaatcttctcggaatatggtcgcttgggctccggtcggcgtcgaacccgatgccgaggctgctcccaatgtctttacgctgaatccggggaatacaactgcggccgtcgattttgtatatcaggagaatacggaagtgaattccggtaagtgcacggatctggcattgaccctgaaacacgcttttgcaaaactgacgtttacgttgaacgccacgaactatccgttcagtgcgccgagtctttcgtcgctcgtggtcaagggaacacccggagtttcgacaatagatatttcaaacggttcttattcgactgttacggatgccgacctgacggtggtcagtacggctactgactttacgagtccgaatgccgtaacggcattggtgcttcccaaaactgcagcttcgttgacactcgattgtacgctcgacgggacttcctatcagaatatcgcagtcaaggatattgccaaattggatgccggcgcgaattataacattacgataaacataacgggaacggagatatcggtctccggcgtgcaggtcccggattggactgccggcggtaacggttcggcagatctgaaataaggggattgcccgtttgccccgacctaaacatgaagggaactgtctgcaaggacagttccctttttattgtaagagctgttgtcgggatttgctccggatgcactattttttcttatagtaactgcattgcagcgtttcgggtatcggggcggaggcatcgcggcgccagaccatcgcaaggtccttcgacggatcgcccgtgccgaagtcgaagccgtccggcgaagcgaaggttacgggaattgcgccggagaatccgtatggggcgtagaatccgcgcagccactcctcgctggggatcagcagcgccgcgtcgtcgccgcgatcggcgatcagccgcatcgcttcgcccatcagcttgccggccagcccccggcggcggaattcgggagccgtcgccacgccgtagatataggtcgtgcggcccagctggctttcgaacggcagcaggtggagcatcgccgccgtgcggccttcgtattcggccgtgagcatgcggctgcggctgtagtagcgtatcaggaacgagtcgatgaactgttcgtcgtcgccgaaggccgcggtccacaactctttgcaggcgatttcgtcggggtgcaggtgtatggccgtgaatttgtgctggatgacggcggggtggtaggagagtttcgactggcgcagaccgtcgatgccgaggtcctcctcgcggttgatcagcgtgaagcgttcgggcagatgctcggcgaagagtttgttgatgatcgtgaaggctccgtcgtaatccgtgtcggccttttcgacgtgggtgtcgaacgtgtggtcgttgaccgccgagccgaacgtaaaggcgaccagcttgtcgccgacgtagatgcagccgcccagcatttccagctcctcgaagtggtcgaaggcccgctgcatggcccgctgttcggcgcagagttccgaggtgtgtccctcgtgcgcccggcgccattcgcgttcgagctgcatgcactccgcgaaacggtcgcgcgtcagattctcgtaccggaagtcggggtattcggacgtgaagcggttgatgtggttgcgcttgggctggtagcggcgtcccgtcaggttgcgcaggtcttcggcgttgtagacgtagtcttccagtgcgcggtccgattcgaatgcgaaaagtcccgcgtgcatgttgcggatcatctcgcggccctcgtccgtcaggccgatgatgcgcagacgctgcccgtgggcatgggcgtctgcgcgcagggcagggatgatgcccgcgaaatcgccctcgccgacgggctgcatgtagccgatcttctcgccgccgccgatgtggaagcggatgaccagaaagccgtcgatcacggcccatgcgctatggtacattgcctgccagcagtacatgttggcgaatgcgaggtcgcagttgaggatgcccgaaggcatggtatggcgctcgatgatctgtttgtcttcgaggcgtacgggtttgaattcaatcatcgggggtgtaactcttgcgttcgatatggctgtaatactgctggatcagcgcccggaacgactgcatcaggctgtcggcggcgggggtgaccgggcactcctgcacctgcggtcccgaatcgtcgagcacgacggcgccttcgccggtcagcgcgcggaatttcccgtcgtacgacaccgaccagcggggccgttcaggctcgttcagcacgtcgcgtccgaaggcgaaatagggttcctcgctgcccacgagacccagcaccgtgggcatgatgtcgagctgctgcactacgtcgccgacctcgccccgcagcgcgccgtcgggcgtgtacatgaagcctatgatgtggtagttgccggggtaggtgcgggtcacgggtgcgaatttttcggacgatacatgatcggccacgaatacaaaaaccgtgcgccggaaccactcttcgcggccgaaacgttcgaaaaagaggcggaatgcgttgtcgtcgtaagccacgcccttgtggattttggtgtagccgtcgggcagcgtgttttcgtatcgggcgggtacgacgaacggatggtgcgacgagagggtgaagagcgtggcgaagaagggttccggggtttcggaaagctcttcgcccatgaattgcaggaacggttcgtcccagatgccccagtagccgtcgaaatcctctttgccgtgccgggcttcgtaatcctcgcggctgacgagccgctccacgccggccgaacgggcataggcgccgaagcccatcgagccgcgttccgaaccgcagaaaaacaccgtggcgtaacctttgtcgcgcaggatggccggcagctgccggctttcgcccaacgactgcggcatcagcacgaacggcgtcttgaacgacgggatgctgcccagtaccgacggcatggcctgaatcgagcgggtgccgttggcatacatccgtttgaagcacaatccgctgcgcatcagcgaatcgaggaacggcgtgaaacctttggtctttcggtcggcatagatttcgggcatcaggtgcgccgaatgttcggccgacatgctctccataatgaaaatcacgacgttgcggcccgcgaggtttacggccgtgctgtctgccggccggtggaccggtgtgaagcggcgcggcagctcttcgggcgggaagaattttttgtagctgacgctgcccgcactgccgatggtgcgcaggatgcagaacggattgctcagaatcaggttggccttgccgctgtccgcggtgtagagcgtggcgttggagagggtgatcggccgcgtcatgcgggtcatgccgccgcgcatgccggcgatgcagagtccggctgcgacggcgaaaatcgccgtgccgcccgcatagtagccccagccccggctcaggagactctcctcgcgtatcttgcggccgtagccccacacgagcagggcggtcagggccgccgccacgatgaccagataccagttttcggccatgaatttgccgaccagctgcaacgagttgccgttgtcggcgaagaagatttcatcggcggtgaaccgcttctgcgtgtagcggaaatagacgcagtcggccatattgaccgccacgaccagcacggcgtttatgacggcgtagtaccagaacagcagacggcggtaccacttgcgttcgcgcacgtgcagaggcagcagcgagagcaatacgaacaccccgtcggcgtagacgaccgacgcggtgtcgaatttgagcgagcctgccagcagctgccccagctctccccagctcaacggtcccagcagccgcgcgttgtagagatagaaaatcacgcggcagagcatcagcaccgcgtaaagcagtgcgatgcgccgaagcagcagggccgtgggggtgtggagcaggcgtttcatgttccggggtgttttcgtgtgcggttcgtgcgcgggctattcgcaggctttgagcgacatgtcgagcgacttgatctggtgtgtcagcgcgccgaccgagatgaaatcgacgccgcactcggcgtagtcgcgcatcgtgtcgagcgtgatgccgccgctggattcggtctcgcagcgtccggcgaccttcttcaccgcttcgcgcgtcatggcgggcgtgaagttgtcgaacatgatgcggtccgcgccgcctgcggcgaagacttcgtcgatgtcctccagcgaacgcacttcgcattcgatcggaatatccttgcccttggccttgaggtattcgcgggcgccgcagatcgccttgcggatgccgccggcgaagtcgatgtggttgtctttcagcaggatcatgtcgaaaagacccatgcggtggttttcgccgccgccgatcttcacggccatcttgtccagtacgcgcatgccgggcgtggtcttgcgggtgtcgaggactttggtgtgcagtccttcgagccgcgcgacgtaaacggcggtctgcgtcgccacgccgctcatgcgctgcatgatgttgaggatgatgcgctcggcctgcagcagcgaacgcaggcggcccgatacgtaaaacgccacgtcgccgggttttacgcggtcgccgtcgtgaagcacctgctcgaagtgcatgtcggggtcgagacggtcgaatacgatccgggcgatttcaatgccggcgatgatgccctcctgcttgcaaagcaggcgcatgcggccgtgttcgccggccgggatacacgaaagcgacgtgtggtcgccgtcgccgatgtcttctttgatgcaaagctcgataagctcgtctacgaaaggtctgtattcgggtttcatggtatttattttacgagtgttccagtatatttcgtatcatggtcgagtatgagttttccgccgtttggcagcgtgatgtctgccgaacagttgaaccttatgctgagggtttccggagtcatttcaccgtagaagtcggtgatccagtattcgggatagggcgtgctgccgatgtagggaacgatcggcgtcaccgtgcttttgagctccgagacgactccgccggtttcgttgacgaactccagtttggggatgacgatcgtcagggcgggcatgttgcttacgaatttgattcccggcatggtgagcgtgatcgtgccgtcgttgctttcggcaagttcgtaacgtacgtttttcgatgtcgcagtttcgggcggcgttttcgtattgtccgtgacgatcagcgtgccgtcgtaaacggccgactgtttgccgtttcgttcttcgtcgttgtcgcaggcggtgacggctgcggcagccagcaggaggaatagtaattttttcatgttgcgttatccgttttataagttaatgttcagtgtgatgccgaatgtgcgggggcgtccgcgctggacgaactcgttgccgatcgatttgaaatagaatacgtcgtaaccggcgtcggcgaggttgcggccccagacgctgagcgagtagcgggcgtgttcgaagcgtaccgaagcgtccgtaagcgcgtagaaaggttgtgaaagcgtattttcttcgttccaccagatgcggcccgcgcagcggacgccggcctgaaacaccagatcgccgagccatttcacgccggtcgggacggtccatgcggctccggccgaaagggtgtgctgcggggcgtaggggatgcggttgtccttgtagctgatgcgcacgggatcgccgtcgtcgttctttacggtcgtttcgtaccggacgaaccgggcgtcggtgtagccgtacgcgaggttgatgtcgaaggtgcgccacggcgaaatctgaacggccgcttcggctccgagactgcgcgtgcgcccggcgttggtcatcatgcggccggtggtctgtcccggcggaaagacggtgagctgctggtcgcggcagtcgatgtagaacagtgcgaaatcgccccggaccgcgccctccatgcacgagaaatggccgcctatctcgtagttccagctgtattcgggtttgtaggcgacgccccgctgcacgtcgtacacttcgccgatacccatttggttcatcatcttctgctggaggacgtcggagaatatctgggtgttgaagccgcccgacttgtagcccttggcgatggtcaggtagaggttgcgcgtctcgtcgaaggagtacatgaccgagaatttgggcagcagctcggtgaaggtctgtttcaatgtgctgcgatcgtcgatttcgagctggagttcatatacggcgtcgtccttgatgcgggttttggtgtaccgcgtatcggtgtggttgcggtagcgcagccgggcgtgctcgaaatcgaagcgcaatcctgcggtgaagcgccagcgccccagcgtatagttggattcgtggtagagggcgccgccggccgaaggcatgcggaaatcgcttcccagaaaaagctcgtcgccgcccgttccgtctttcagcccccagctgtagcggtagctctggtcgttttcgttggcgtatttgaggatcagctcctcgatgcccgtctgtttgaagtgcaccggggcgttcatcgtgccgtgacggtagaatccgaatgcccccagcagccagcggtaggctttatccccgcgcgaacggaagacgaggtcctcggtcacgctatgctcggtacgggcctgcctgagcgtgaagtacgagaggggcaggaaatcctgatcgaggatcatctcgtcgtcggaatactggtagctcgtgatggaggcgacggtgaaactgccggcgtcgtagcggatcgtgagtccgtcgctcagggcggtgcggcggtaggagcaggggtcgttgtagcggatttccccgcggcggacgacggggcctccgtcgtcgccgatgatgtcgtcgccgacataggcatagggatagccgccctgttcgagcaccgagaacgaaagcgtattgtcgatgcggagtcccgtgcggctgcgccactgggttttccagcgtccgccgcccagccgttcccagtcgcatttgtcgcccgtggcgagattctcgaagaatccgcccgtgtgggtataataacccgttacggccatgcccagatcgggcgtgagtttgtagtaggacgaggcgcggaacttgtagctgtcgccgctgccgtattcggcgctcaggcgcacgccctcgtacgagagcggcgagagggtgtagacgttgattacgccgcccatcgtattgcggccgtagagcgtgctctgcggtccgcggagtacttcgatgcgttcggcgtcggccagttccgtgtcgtaattgtccttgttgagaaccggtacgttgtcgatgttgagtcccatgaccggctggtcgatacgcgcaccgagtccccggacgtagatcgacgaggtcatgcgcgagccgtagtcgggggcgtagaagttggggacctgctgggagaggtgtttcaatgcgccgatgcgctcccgttcgatggcgcggctgccgacgatcgtcgccgcgacgggctgcgaccgcaggaccatgccctgcttgatggccgtcacctgcaccttgtccaccacgatcacggtatccgccgcggccgattcctccccggccgtgccggcgactgccgccgttgccgcggcatgccgttccggtgtctgtttgcctccggccgccgcgaggagcggaaggagtgtcagaagcggtatggtcagttgtctgaggtgcacggtaaagcgtttgattcggatgcaaagtaacggatttatttcggaagctgcaatcctaatttatgaggagggggcttcacagttcgccggcatcgacgtaaccggccgtcagggcgtagatggccagacccgccaccgagcggatacccagcttctccatgatgttgcggcggtgcgaaatgacggtcgtaagcccgatttgcaggctgtcggcgatctgtttgttcatatagccgcgggcgatcagcgccagcacttcggcttcgcgtcccgaaaggggcgtggtttcgggacgcaccgcgccgggaacgatgtgttcggaccggtgcgcgccgtggtgcatgcgcaggatgtcgcggacgatcgcctcctcgttggtgcagacgtcgatgcagtgcatgtctgcataagcaggctggggctgcccgctgcaaagcaggatcgttttgctgcgccgggcgcggaagaaactgccgtgcgtgacgaagagctgcgccgccacgaagaagtggaagaagcgttccgggtccgcttccgtgaaggattcgaagtcgccgaagagttcgacgtcggcggcgggaatgatcttttcgaggatggatttcatcccgacgcccatcaggacgttgggcgctgcgacggctatggcgggacggcgctccatcggcttactcgtggtgatagggttcgttgttgagaatggtgaaggcgcggtagatctgctcggcgaagatcgcccgcacgatctggtgcgaaaaggtcatgcgcgaaagggacagacgggcgtcggagcgtttgtagacctcctccgagaatccgtaaggtccgccgatgaccagcaccagacgtttcacgccgctgttcatgcgtttctggagccagcaggcgaattcgaccgaccgcatttcgtcgccccgctcgtcgagcagtacgacgtagtcgccgtccgacaactggcgcaggatcgcttcgccttcggccgtgcgctgctgtttgacactgaggttcttggtgttgcggatgtcgggcagggcggtgaccgcgaatttgcagtagaagtttacgcgccgggcgtagatttcgaccagcgacgcgacctccttcgagtcggttttgcctatgactatcagttcgatgaccatttcttctcgtaaatcgtttccgcagtctgccgccgtacgccggaccgggtcttggttgccggtcgaagcgtttgccggagctgcgcgaaaggggaatgcggggtgtcgtagcccggccggggaccggagccgtgaaaagcggactacaggtccgaattccattcgccgtcggcgtcggtgtagatcaccggccgcgatttctcgaccgacttgagccactcgtaagccttgtacatgttgtaaccgttgcccgattcgccgcccagcgcgaaggcgacgacgcaggtgtggttgcgcgagcggtagtacatcgccttgacccgttcgaggtattcgtcggccagcgcgggatcgttcgacggcgtgccgcccacacggcggtcgtcgcgcctgtcgggagcgttgatgttggcccggtcgatgacgtaaagaccgagttcgtcgcaaagttcgtagaaccacgccggctgcgaatagtcggggcagacggtgttgctgcccttggatttgagggttttcagctccgcgagggtggttttacggtctgcggcggcgttgtagcgggctttgacgagtttgatctccttgtcgaagcgggtgatgcggccgtcggtgaattcggtcttgccgaagccgatcttcagcggcatgtattcgcggtaagctccgtcgcggcgcgtgaagagcatgactttgtagagcggcggattcttggcgcccggttcccatttattggcgttggtgccgtatatgaaggggttgaagcgcactgtgtcggtcgtgcggcccggaatcacgacttcgcggatgttgaagtcgagcagcttgccctgcggcgagtagatgtcgtaacccacggtgacgggttcgtcgtagttgaatgcgttctgggcgacgaccgccagttcgagcacgccgaatttgcgggtggagtcggggacgagcgcgatttcgaagtcgcggatcgagcgtttgttctgggtgtagaggtagctgttttcgaatgccttgcgcgacgccggggcggcgttgagcgcatcggccgcgctgcggcgcagggtcagcacgacggcgttcttgccttcgcggatgtagggcgtcagcgcgaattcggcgggcgtcgaggagtcttcgacctcggcgacctcggtgtcgttgaccgtgagcgtgtaggccgtgccgacgttttcaaggtggaggtacaccacgccgtcggtccagacatagggtatgtcgatcacctgtccgacggccaccgcatcgtccgtggccgcgaacgcttcgggggtgtaggcgatataggcttcgacgccagcgcggttgcgggcgtcggcgtcgtggcgcttgtcgtagggaacgacctcggtgcggtggatgcgtcccgcttcgaccggacgcgagagaatctcggtcgcgggcggctccttgatattgtagaggtcctgtgcccggatgcctgcggcgcagaggatcgccgccgtcagcagtatggtacgtttcatcgtgcgtgttcttatataggttaggcaaaggtactttttttttgccaaatcgcaaataataggtatctttgtaaattcgaaaagaacgaataagagcattgataaaatgaaagatatgaaatcgcagagaatcgcagaaattctgaagtcgggtgccgaggacaccgacatcgtcgtcaaaggttgggtgcgcaccaagcgcggaaacaagaatgtggcgttcatcgccctcaatgacggatcgtgcgttgcgaatatccagatagtggtcgatcttgccaagttcggcgaagagcagctcaaacccatcactacgggcgcctgcatccgtgtggacggacggctcgtggcgtcgctcggatcgggccagcgcgtcgaggtgcaggccgagaagatcgagatctacggcacggccgatccggagacctatcccctgcagaaaaaggggcattcgctggagttcctgcgcgacatcgcctatctgcgtccgcgcaccaataccttcggcgcggtgctgcgcatccggcatgccatggcctacgccattcacgaatatttcaacagggaggggttctattacttccacaccccgcttatcacggcttcggactgcgagggtgcaggcgccatgtttcaggtgacgacgctcgacctgaacgacgtgcccaagaatgagcagggacaggtcgatttctcgcaggacttcttcggcaaggcctgcaacctgaccgtgtcgggccagctcgaaggcgagctgggcgcgctgtcgctgggccgcatctacaccttcggtcccacgttccgcgccgagaattccaacactccgcgccatgcgtcggagttctggatgatcgagccggaggccgccttctatgagctggaggacaacatggagctggccgaggatttcctcaagtacctgatccggtatgcgctggacaactgcgccgaggacctcgaattcatgaacaagatgtgggacaacggactgctggaccgcctgcacttcgtgctggagaacgacttcaagcgtctcgactacaccgagggcatcgaaatactgaaggcttcgggccgcaagttcgaattcccctgcgactggggctgcgacctgcagtcggagcatgagcgttatctggtcgaggagcatttcaagcgtcccgtcatcctgatcaactatcccaaggacatcaaggccttttacatgaagcagaacgacgacggcaagaccgtacgcgctatggacgtattgttccccggaatcggcgagatcatcggcggatcggagcgtgaggccgattatggcaagcttcatgcaagggtcgccgaattgggcatgaacgagaaggagctttggtggtatctcgacacccgccgctggggttcggctccgcattcgggcttcggtctgggcttcgaccggctgctgctcttcgtgacgggcatgaccaacatccgcgacgtgcagccgttcccgcgcacgccgaagaacgccgatttttaaaaccgcccggaaaggccgtttcacgcctcttgctgccggacccgaacgaatttcttgttcgggctgtgcggtgcaggcctagaaataagcgcctttccatacgatttccccggttgcggccgtttgtttactaaccgaaagaagaaaccaaattcagaacgaactattcttaatttggaaaaagtatggctattaatcagaaacaggtattatcgcttcagcagaagctctctccgcagcagattcagatgatcaagctcttggagctgcccaccgtgcagctcgaacaacgtatcaaacaggagattgaggacaacatcgtgctggaggaagaggaacatgcgtccgaagaggaggagcagccgcagcagatctccgtggacgagtatctgcgcgaagacgatacgccttcctataaaagccgcataaacaactattcgaaagacgacaaacagcgtccggttttcctgaccgaaggccgttcgctgcccgaatatctgctcgaacagctcggtttccgcaacctttcggagcgcgacatgcgtctggccgcctatctggtcgggagcatcgacgaggacggttacctgcgccgcgatctggaatccgtcgccgacgacattgcctttacgctcggaatcgagacttcggccgaggagctggagcgcctgctcggagtcctgcacgaactggaaccggccggcatcggcgcccgcaacctgcgggagtgcctgctgctgcagatggcgcagatcccgatcaacagccgtccccgacggctggcccgcaagattctgaccaactatttcgaagagttcgtcaagaagcattacgagaaactgatgtcgcgcctgcaggtgtcggaggaggatttccgcgaagcgattgccgagatcaggcggctctcgcccaagcccggcaacctctatgccgagggcggcaccgacacgacgccctacatcattcccgattttatcctcgattatcaggacgggcggttccagctctcgcttaattcgtacaacgttcccgaagtccgcgtgaaccgccgctatatggacatgatccgcgagatggtcggctccgacggcacggtccgcgagaaggacaaggaggcgattcagttcgtgaagaacaagatcgactcggccaaatggttcatctcggccatcaagcagcgtcacgacacgctgatgcgcacgatgcagaccattctcgactaccagcaggagtacttcaaggacggcgacaaatcgaaactgcggccgatgatcctcaaggatatcgccgaccgcacgggactcgacgtttcgacgatctcgcgcgtggtgaacagcaagtacgtgcagacccagttcggcatcatcctgctcaagtcgctcttctcggaggcgatgcagaccgagagcggcgaggaggtgtcgagctatgaaatcaaaaacatattgcaggagtgtatcgacgaggaggacaagcgccatccgctgacggatgagacgctgatggacattctcaactcgaaaggctaccggattgcccgccgcacggtggccaagtaccgcgaaatgctcggaatccccgtcgcccggctccgcaaacagatatagatgaagaacagaaaaccggccgccggccgtttgcgcccagtgcggggcgttgcggccggatacggaaccgatttgcgctgatccgccgggccgccccggaaggcagcggcaggtctgaggcagttgcggccggtgtgataatttgaagaatgtacagaaaactctcgaacggcatatcgtgggctttgcacccgtttctgctgcctctctacatgatcggcgtactgctgacgcttaccgtcttcgcgcattatccgtcgggcgtgaagatctacctgctgtgggtggtggcgctttatgccattatcatccccctgctggcgctgggggtgctgcggtcgctgggccggatttcggattacaggatcgacgaccgccgcgagcggcttttgccgctgctggtgggcgccgtgtgctatgtgctgtgcgccattacgatcgccaaaattccctccgccatcttcctgcgtaagttcatgatcgccgccgcctgctgcgaggtgatgtgtctggtggtgtcgctctattggaagatcagcctgcacctgacggcgatgggggccgtggtcgcattgctggtggtgatgaatatcgcgggcgtgggcgacatgatggttccgctgatgatcgccatactctgcgccggggcgctggcttcggcccgtctctatctgggatgtcacaacgggcagcaggtgctggctggattctgcggcgggttcgccgtcgcggcgctggccgtgctgtttttgtagtcggtgcggatctgaaataggaaagcccggagcattgctccgggctttttcgtatgcggactgcggatcagacgcatccctgcgccagcatggcgttggcgaccttcatgaagccgccgatgttggcgccgttgacgtagttgatgtagccgtcggcctgagttccgtactgcacgcagacggagtggatgttctgcatgatcgagcggagcttggcgtccacctcttcgggcgaccacgtgatgcgcatcgagttctgcgtcatttcgagacccgacgtcgccacgccgcctgcattggcggctttgcccggcgcgtagagcagcttgtgctgctggaagatgcggatggcgtcgggcgtcgagggcatgttggcgccttcggcgacgcagatgcagccgttgtcgacgagcgcctgcgcttcgtcgccgttcagctcgttctgcgtggcgcacggcatggcgatgtcgcacttgacgccccacggacgctggccggggtagtaggtcgccgaaggatagcggtcggcgtactccttgatacggccgcggaagatatttttcaattccattacgtactccagtttcgcggcgtcgatgccttcgggatcgtggatgtaacccgacgagtcggagagcgtcacgactttggcgccgagctgcgtggctttctggcaggcgtactgcgccacgttgcccgaacccgaaatgcagacggtcttgccttcgaagctctctttgcgcgtggcgagcatctcctgcgcgaagtagcaggtgccgtagcccgtggcttcggggcgcagcgggctgccgccccagtcgcggcccttgccggtgagcgtgcccgtgaattcgtcgcgcagacgtttgtactggccgaacatgaagccgatttcacggccgccgacgccgatgtcgcccgccggaacgtcggtgtcctgtccgatgtgacgctgaagctcggtcatgaacgactggcagaacttcatcacttcgttgtccgaacggcccttggggttgaagtccgaaccgcctttgccgccgcccatgggcagggtcgtcaggctgttcttgaaggtctgttcgaaggcgaggaacttgaggatcgagagattgaccgaaggatggaagcggatgccgcccttgtaggggccgatggcgctgttcatctgtacgcgatagccgcggttgatttcgatttcgcctttgtcgttgagccacggcacgcggaaaatgatgacgcgttcgggttcggcgatgcgctccagaactttcattttctgcaatacggggcttgccacgatgtggggtgccagcgattcggccacctcgcggacagcctgatggaattccggctcgttggggttgcggagggtgagttgcgccatgaaatcttcgacgtactgatgggcttgatcgttcatagtcaatctgtgttttgagggttattattcgagtaccgctgtaaaaataatgtatcttcgggagttttgcaagttctttaagaatttgctaaaatattttacttatgcgattttcagtttcagaccctcttgtgcttactgtctgcgggaagggacggaccgggggtgaaaatccgtaataaaaaatgacagatccgttgtgaatctgtcatttgaaaaaaaatgtaatttttttcgtctacttcgcattttctcccgcttggcggctgaattcgaagccgatgtagacgtttttgtagttttcgagcagcgcgacgatggtctccatcgacgatattttgctgcccatcgccttgaccatgtcgatgagtttggtgacggggaagaccagcagcagattagagccgtcgatgtaggcgtgccccggaaccgaacccagatcgagtttgtccttggcaaagctgagcgtggcgacgtgcgtcgaagcgtcgaattcgtaggttcccgaaagttcgtatttgcccatcaaggtggtgaatttgccgtctttggcgaatgtgaccgtaccggtgccgggtttgatgccggccatctgatagcccttgtcgagctgctgtttgatgttgtcctgaagtaccgtgccgccgagctggctcagcaggtcgttgccctcgaatttcacgcccggagcggtgtagttccatgtgccggcgagcgcatattgcgtcagcttgccgtcggtggccttgtctgcggcggtcgtggcggcttttttcaacgcttccttccagtcctgcgccgtggcggagcttccggcgagcaggagcgtcgcaatcgccagtaagagatttcttttcatgatcatttcaggtatttcagtgtttcgagttctttgagccacacggccgccgaggcgtccgaaggcatgcgccagtcgccgcgcggcgagagcgccgcggaaccgaccttcgggccgtcgggcatggccgaacgcttgaactgctgcgagaagaagcggcggaagaagaccgtcagccatttgaggatcgtcgcgcggtcgtagctgccgtggaaggcctgctcggcgaggaacaggattttagccgggccgtagcctgcgcggatgaagttgtagaggaagaagtcgtggagttcgtagggacccacgaggtcctcggttttctgggcgatttttccctccttgtcggccgggagcagttcggggctgaccggggtgtcgatgacgtcgagcagcgtcgcgcgcgcggccatgtcggattccgtgtctgcgacccatttcacgaggtggcgcaccagcgttttgggcaccgaggcgttcacgccgtacatcgacatctggtcgccgttgtaggtggcccagcccagcgccagctcgctcaggtcgcccgtgccgaccaccagaccgccctccatgttggcgacgtccatcagtatctgcgtgcgctcgcgggcctgactgttttcataggccgccgagcggtcttcggggtcgagtccgatgtcgctgaagtgctgcgtgcaggcgtcgcggatcggaatttcgcggatcgtgacgcccagcccgcgcatcagttccagcgcgttgttgtaggtgcggtccgtggtgccgaagccgggcatggtgatgccgatgattccggcgcggtcgagtcccagcttgtcgaacgtgcggaccgtgacgagcagggccagcgtcgaatccagtccgcccgaaatgccgattacggccttttcgcagcgggtgtgcaccagccttttggccagcccgtgcgactgtatctggaaaatctcctcgcagcgttcgctgcggtgcgcttcgtcctgcggcacgaacggcatcgggtcgatgtcgcggtcgagcgccgcggcccggagtccttcggggacctccatttcgattacggtgttctccgctgccccttcgtgcatgcggaacgaggtgttgcggcggcgttcgaattccagccgctgaatgtcgatatcggccacgacgagctgctcttcgagccggaaacgttccgattcgcggagtatccggccgttttcggcgacgatgccgttgccggcgaacaccagatcggtggacgattcgccgaagcctgccgagcagtagacgtatcccgcgagggtgcgggccgactgctgggccacgagctgacgcaggtaggcgtgcttgcccaccgattcgggcgacgccgagaggttgaagatcaccttggcgccgttgagcgcgaggtgcgacgaaggcggaatggcggtccagaggtcctcgcagatttcgacgccgaattccgtgccgttgatcccgaacgtgaggtccgcgccgaagtcggcgctctgttccgcgacggagatcgtctcttccgagatgccggcgccggatgcgaaccagcggttttcgtagaactccgtgtagtcggggatgtaggtcttgggaactacgcccagtacgcggccctgcgtgaaaacgacggcgcagttgtagagcgtcgagccgtggcgcaggggggcgccggcgatgatgaccagcggcagtttgcgcgtggcttttaccagccgcgcaagggcttcgtcggccgcgtcgagcagcgccggctgcagcagcaggtcggcgcaggtgtaggccgtgacggccagttcgggaaacgcgacgatctcgaggccccgctgcgcagcctcttcggccatcgcggcgatccgctcggtgttgaagtcgcagtcgccgacccgtacgtgcggcaccgctgccgccactttcagaaaaccgaaattatccataggtctgtatgttgttttgccgctctcttcgctccggatccccgctttgcggcggggacggagatgcggcggattcgtcgcggcggcggtccggactgccgccgtcgcggtcatatgtttattcggcccacaactgcgcgaggttcaggatcacctgctgggccttgcgcatcgtggtgagcgagcagtattcgaatttgccgtggaagttcatgccgcccgtgaagagattggggcaggggagtcccatgaacgagagccgtgcgccgtccgtgccgccgcgaatcgggcggacgagcggtttcacgccggcgcgctccatcgcttcgagcgccttgtcgatcacctgcggatgcggttcgaccatcttgcgcatgttgaagtactggtccttgacggtgagggtcagcaccccgtcgccgtatttctttttcagcagatcgacgcaggcccacatgaagaccttcttctgttcgaatttgtcggcgtcgtggtcgcggatgatgtagctgacggaagccttctcgaccgtgccgttcagtcccacgcagtggtagaatccctcgtaaccttcggtatgttcgggacgctggcaggccggaagaagccgctgcaggtcgcaggctacctcgatggcgttgatcatcttgtccttggcgtatccggggtggacgttgcggccttggatgtcgattttggcgctcgcggcgttgaagttctcgtattccagttcgccctccatgccgccgtcgacggtgtaggcgaagtcggcgccgaaagccttgacgtcgaagaaatccacgccgcggcccacctcctcgtcgggcgtgaagccgatgcggattttgccgtgtttgatttcgggatgcgcgagcaggtactccgcggcggtcatgatctcggccacgcccgccttgtcgtcggcgccgagcagcgtcgtgccgtcggtgtggatcagcgtgtgtcccttgaagaactccagttcggggaagtccgcgacccgcatcgtgagctggccgttcagcgcgatgtcgccgccgtcgtactcctcgatgacgcggggtttgacatccttgccgctcatgtcgggcgacgtgtccacatgggcgatgaagccgatcacgggagcgttctcgcagcccggcgtcgcggggacggtgcccatcacgtagccgtatcggtccatcgtgacttcggtcatgccgagcgcctgcatttcgtcgcgcagggcggccagcaggactttctgtttctcggtcgaagggaacgtgccgctctcctcggacgactgcgtgtcgtaggagacgtatttcaggaatctttctttgaggtccatggtgttgtgttgtttatggcgttactattgtggctgtcgagccgttgacgattgctatggagtgcgagccgtcggggtttaccaccaccgacgtgttgccgcacggaggcatgacgaccgcatggcctccttcgggcgtgacgacgacggagggataggaggggccggtaagggatatgtgcgttccagccctgttcttccgctgcggagcgtcggccgtcgccggggtttccgtgctgctttgctgcgcgacggtcagcggggcgcagccttgcagcagcgtcgcggcgacgaggagtatgacggcggttttcatgcgcttcggtgtttcctattcttcttttttagcccggagcgtgtgccagccgaagtagccgatcagtgcgaggtacatgaccagtccggtccactctgcggcgttcgaagaggcccatccgctcaggaaccagtccacctcggcgaatttcaggagggcgctcaccacgcccatcagcgcgccgccggcgatgaagcccgatgcgatcagcgtgccgcggtcgaagcgcgccttgttgagagcttcgtccttcgagcggttcgagacgaaccacgctaccagtccgccgactaccagcggagcgttcagctccatcgggatgaacatgcccagtgcgaaagcgagtgccggaacgccgattgaggtcagcaccagcgccagcgccgcgccgcagaagtagagcatccacggggtctggccgccggtcatcaggggctggatcacggccgccatggcgttggcctgcggagccacgagggcgccctcgcccacgaatccgtacgatttgttgaggatgatcatcaccccggccacggttgccgcagcaacgaacgtgccgaggaatttccatgcctcctgcttgcggggcgtggtgccgagccagtagccgatcttgaggtcggtgatgaagccgccggccatcgagagcgccgtgcagaccacgccgccgatgatcagcgccgccgtcatgcccgtcgtgccgctcagtccgacgcttacgagcaccagcgacgagaggatgagcgtcatcagcgtcatgcccgacacggggttcgtgccgacgatggcgatggcgttggccgccacggtcgtgaagaggaacgagatgacgaagacgatcagaatggccgtcacggactgtacccagccgtcgagcagtccgaagtggaagaagacgaagatcgagacgagcgtggcgatcaggatcgtgaggatgcgcttcatcgtcaggtcgcgctgcgtgcgttcggtcgcggcggcttgggttttgttgcccccccccaactccgaaacggccagccctacggcctgacggatgatcttcgactgtttgacgatgccgatgatgcccgccatggcgataccgccgatgcccagcggcttgccgatgaaggcgaagaggttctcggccgtgaaaagacgctgcggatcggccatgatgtcggcgcgcgttacgcccagcagcgaagccatggccgccgggtcgatgctgtcggccagcgaacccaccagcggcacgacgaggaaccagaccagacacgaacctgcggtgatgatcatggcgtatttcagaccgatgatgtagcccagacccagcacggcggccgaggtgttgagcgagaagacgaccttgaacttgtcggcggcgacctgtccccatgcgcagatgcgcgtcgagaccgcttcggtccacatgccgaacgtgccgacggcgaaatcgtaaagaccgcctatgagtcccgccacggccagcagcttggcctgattgccgcccttctcgccggagatgagcacttcggtcgtagccgtcgcttcggggaaggggtatttgccgtgcatctccttgacgaagtatttgcggaacgggatcagcaggacgatgcccagcaggccgccgaagagcgacgagaggaatacctgatagaacgccgcgtcgagtccgaggatgtagagcgccgggagggtgaagatggcgcccgcgacgataacgcccgaacaggcgccgatcgactggatgatgacgttctgtcccagcatgttctttttacccagtacgttgcccatgccgacggcgatgatggcgatcgggatcgccgcttcgaatacctgtccgaccttcaggccgagaaatgccgccgcggccgagaagacgacggccatgacgatgcccatcgtgaccgaatagggcgtcacctcgcggggcgacgacgaggcgggcatgatgggcgtgtactcttcgcccggtttgagttcccggtaagcgttttcgggcagcgatgtaagttgtttttcctgttccatttattgaggttctttgatgtatttgtccagatccttgaggatgtagtagcgattgagcgatgcgggcgccttcttctcgtcgaggtagctgtagagggtgccgattgcggctgccagacgcagccgttcgccgcgctcttcggatgccgcggtgaagtcgaacagcagttcggcgaatttttcgaggtccgcgtcgctgaatccgtattcgtcgacgagggtggcgatgaaatccgctccggccagcagcgtgtcgatgtccagattcaactgctcggccagctccgttttggcggtttcccggatgagttcgggggcgcccgactttttgaggagaccgattttgtccagaagggctgcgatcagctctccgatgcggttgatttcacgtaagatatagtcttccatagttagcggttgtcgccgctgcccgaaatgatgtgacgctgcatgcgcgaacggagcttgtcgacgttcatttgcgccacgtcgtccagttcgtagcccagatcgcgcgagagcgtggcgcagtaccacaatacgtcgccgatctccttgacgatttcgagccgtttctcgtcggagaactcctcgtgtccgtcgcggatgactttcttgactttgtcggccacctcgcccgcttcgcccgtcagtccgagcgtggggtagatgatgcggcggttttcggggtagatcgccgtttcgagcgcgtgctgctgatattcgttgagtgtcatgaatgctgagaatttgaacgtttgggaataactgtcggacaaaaataacaaaataatttagaaatacgcaccaaaaagcccttgttcctcacgaacaagggccgaagaatcgcgccgcttccccggcggcggggtgttttgccgcctacggcccgattcgcacgaatccggattccggacggcgggacgaatcggggagtgctgcggttatgcgcggggcggttccgaacgcggtctttccgctgttggaaatcaacgggaaaagtccggccggattaacggcggccgccggcaattatcatttcgcggagcgtggcgttgaacggctcctgccggagcagctcctccagcgtgaggtgcatgcggtagcgccagtaatagcggggtgcggccgggatgttgatgcgctccctgtccgcatgcggactgcgcagggccgcgtcggtcgcgagccagtcctgcagcggaagtatggcgagcatcgccggggagcggaggtgcatgtcgacgatgcggcggcagatccacggttcgcaggtgcggggagcgtcgccctccatgcccagcacttcgcggtagaaacgttccgagagttcatggttctcctcccaccatgcccgcaggggattcatgtcgtgggtcgaggtggtgcagaccgagaaataggggtagcgcgccgggtcggcgaacacctcgcccagcgatttgggcatccgctggatttcgagcgaaaggatttgcagtgcgcgcatggtttcgggaacgctgtcgggaatcatgccgaggtcctcgccgcaggccagcatccgcgtcgccgagaggagcacggggagtttgtgcagggccgactcctgccagaaccggttgtggcggcggtaaaagaagtcgtcgtgaagccggtcgaaagtgtcgcgccgctgcgggtcgagggtgcggtacatataggtcgattgggccgcgatgcgggggtggaaaaaacctttgcggcgcgggtcctcgatgaacagcacgtcgtcgagcagcgccatcagcccttcgcgcaggcggcttcggcgcggatcgtcgccgggaaagcgctcggcgaccttgcgttgcgtcgcataggcgggcagcagccggccctccttcatgcaggtcgtgcgcacttcgtcggccagctcgccgaacagctcgccgagcatccggtcgtcgggcgcgggaacggtgaagcgtcccccggccgtatcgaagcccatgccgcgcagttcgtcggcggagtagggcagggcgggattgaaatagcccagcaggccgtgaacggcatgtacgggaatctcccagatgcggaagaagccgaggatatggtcgatgcggaaagcgtcgaaatattcggccatcttcgccatgcgggcctgccaccacgcatagccgtcctgcgccatgtgctcccagtcataggtcgggaagccccagttctggcccgatgcggaaaaggcgtcgggcggcgctccggcctgcgaatccatgtggaaaagccgcggatgaatccatgcgtcggcgctcgtccggctgacgccgatcggcaggtcgcccttgaggacgacgccccggctgcgggcgtaggcgcagacctcggacagctgcgtgtgcaggtggtactgcacgaagcagtgaaacgcgatttcgcggctgttgcggcggcagtaggcttcgacggcctttttgtcgtagcgggcgtaatcgccccagcgggagaaatcggcggtgccgaactcgtcgcgcagggtgcggtaggcggcgtagggcatgagccagtggctgttgttccgcatgaattcccggtaatcgcggcgggcggcggtgcgacgcccctctcgctcgaacgcgctgcgcagcagacgcagtttatgcgtattgacctgttggtaatcgacttcgggcagggcgttcagccggtcgcgcaggctgcggtattcgtcgtcctcttcgacgccggcggcggtcagccggatgaactgcgggtgcagggcgaagatcgaattggcgttgtaggggtaggagtcttcccatgtgccgctcatcgtggtgtcgttgatcggcagcagctggagtacccgctggcccgttgcggcggcccagtcgatcagcagtttcagatcgtagaattcgccgacgccgaatccggcttccgagcggagcgaaaagaccggaatcgccgttccggctccgcgccacctgcgttcggggaagcggaggtacgccgcggctacgacgatgtgttcgccttcgccgggcaggtcgttccatgcgcggttgggaccttcctcccacatgatcggggtcagggtcctgcggtcggcgatcaggaacttgtattcgaatctctgccgcgcgtcgagccggagttcccactccggaaaccggctgtcgtccagcgggacgatccgctgccacccctccagctccctgccgctgcctgcgacggccagcacttcgtcggggcgcagggtgggcaggatgacgcgcagggtgatgttgccgccgtttttctgctgcggcccgctttcgccgcggccgaagatgccacgcgtgaaggccgaggagtagaagggcgtatcggcgggcatgtcgatccagcggtcgcggatgcggagtacgcggggcgcgggtgcggcggggatgcgcaggatgtgcggacgccattcgcggcggatgcacacgccctcgcgctcgacttcgtaacggtattctgccggctgcgccgcaggggcgtactgctctacggcgcaggtccagacgccgccgtcggcgtattgcagggcgatgcgccgcctgccgaggcggagtacgagctgttcgccccagcgggtgcggtattcgatgctgaacaggagtgtcatggcattggattgtgggaggttctgatcgctactttctttttgcggaatcaaaaataaccaaaataatcgaatgacggaaatcccccggcggagaagcgatgaaaagcgaacctcagagtccttcaatgaatccggtgacggcggcgaccagctccggagcgatcggaagcgtatcgtccgtataggcggcgatctgctccgtgcgcgtggggccggaggcttttttgagcgtgtgggtcatgccttcgatgatcgttttccgggaccggggctgggctttcgccagtgcgtcggcgttgtcgggcgtcacttggaagtcgatgtcgccgttgacgatcagtacgggaaccctcactttgcgaatctcctcgcgcgggtcgtagctcagcgacgagatccagaatgtctgtatcgagggggcgaagaggggcgccagttcgggcgggcacgactcgacccgttcgccgcgtttcagggcggcggtgatggcacgggcctgcatcagcagctccatgtgcgtcggggcgagttgtgcggccagctgaagctggagtatttcgtcgagcggatagccggcgcccgccaccgaaatcacggcgtcgacttcggggcattgttgcgccgcgcagaaggcgatcagcgccccttcactatgcccgatcagcacgatgcggcggaaatcctgccgggagaggtactcggcccatgccgcggcgtcgccgatgaagtcgtcgagcgtggcgtcggccattttgtccgggtcgtcgaatttgctcgatccgatgccccgtttgtcgtagcggagcgtggcgatacccgctttttcaagctcctgcgccagatagaggtagttgttcgtattgccgttgcggggtgtgggacctgatcccgcgatgaggaccgccacggtttcggcgccttcgccgggcgtgagcagcgtaccgtagagagttccgaaatcgcgttcgagcgaaacgcttttctcgccggcggcggcattggccgcggccagcagcagaagtgcggtcagcaatcgtttcatggtattattatttaggcggttctcgttcgtcggtgcggttctgtccggggtaaaggtgctttttgtcggcgcggcgcccctcttcgctccggagtcttccttgcttcgggtcctccttctgcttcgggtcctccttctgctccgggcctctcttcgttccggccccttcttcgtttcgggtccttcgttgccccccccctcttcgcttcggcgttgcgcggcggaaaggccctgcgcggcggaaagtctctgtaagacggaacgattctgtgcggcggcaggggggccgggcgatgctacagctcttcgagcgccttttccagcccgatgccgcgcgaaccctttaccagcacgaaggcgttctcgacagggcggcggcgcagttcggcgatcagctcctcgcgcgaggggaagagggcggtgttggcgggctgcggctccatgccggcgcaggcgcgggcgaattctccgcccacgagcatcagttcggtgtccggattccggcctgcgagggcgacgatgtcgcggtgctcctgctccgaccatgcgcccagttcgagcatgtcgcccagaatcagcacgcggcggcttctgccgccggccggctcggcgaggaagttgaggaccgaagcgcgcatgctcgacgggttggcgttgtagcaatccacgatcagcgtgttgcgctccgtttcggtccgctgcgaacggttgttgtcgggcatgtagctgccgacggcgtggcggatgcgctcgccgtcgatgtcgaaatagcgtcctacggccacggccgccgcgatgttgaagcggttgtagtcaccctccagatggtgcgcgatgccgtcggccagtgctacggagtagtattccgcagccagcccgtcgcgctccgcggccatgttggtcagcacttcgtcttcgcgcgggacgaaggcgcggccgccgttcgcggccagatagtccagcagttcgcccttgccgcggcggatgccttccgggccgccgaatccttcgaggtgcgcgcggccgatgttggtcaggatgccgtagttgggttcggcgaccgatgccagcagggcgatttcgccgcaggcgctggcgcccatttcgactacgccgaattcggtgtcgcgggtcatggcgagcagcgtcagcggcacgccgatgtggttgttgaggttgccgtgcgtggcgtagacttcgaagcgttcggccagcacgcggctcaccagctccttggtcgtggtcttgccgttgctgcctgaaatggccagaatcggaatcgccagttcgcggcggtgttcgcgcgccagctcctgaagggcttcgagcgtatcgccgacaagtaccgtgcggtcgccgatgacggccgcaggatcgtccacgacggcgtatgcggcgcctttggagagtgcgtcggcggcgaagcggttgccgtcgaaggtcgccccgtgcagggcgaagaagacggaccccggctcgatgcggcgcgtgtcggtcgagatgcgggggtgccgccggaaaatatcgtacagttcggacatatggatgccgtatatgcgggctgccggcccggatgcgtcagatgtgtttgtctccgttgtggaatttgacttcgtcgatgaatttcttgatgttctgctcctcggagcgggggcagatcatcagcacgtcgtcggtatccacgacgatatactctttcaggccgctgatgacggccaccttgtccttgggcagcgaaacgatgctgctgcgcgtgtcgtaaaggtagcacccctgctcaggcacggcgttggcgtagcggtccttgcgcgaatgctggtagaccgagccccacgtgcccacgtcgctccagccgaaatcgccgcagcggacgtatacgttgtcggccttctccatgatgccgtagtcgatcgaaatggcgcggcactccgaaaagacgatttcgacggtggttttctcggcgtcggtgcccagcgccttcatcacgccgctgaacatggcgtggtgttcgggcaggtatttccggaaggcttcgacgatggtctgaaccttccagatgaagatgcccgaattccagaagaattcgcccgtctgcaggaaggtctgcgccagttcgaggttcggtttctcggtgaagcacttgaccttgctgatgacgttggtgtccgagacctgaatgtagccgtaacccgtatcgggacgtgtcggtttgatgccgacggtcagcagggcgtcgtgtcggtcggcgaattcgagacactcgccgatgatctggcggaagtcctcttcgttgaggatcaggtggtcggccggggtgacgatcatctccgcgtcgggattctgcttcagcagcgtgtaggccgcataggcgatgcagggggccgtattgcggccgatcggttcgcagagcacctgccgttcgccgatttcggggatgtgttcgagtacgaggtccttgtatttatggttggtcaccacgagaaagttctcggcggggacgatttttgcaaaacgttcgtaagtgtggcggataaacgatttgcctgttcccagtatgtcgagaaactgcttgggcatcgactgccggcttttgggccagaagcgcgaaccgatgccgccggccatgatgacacaatatttgttgcttgccataagttataatatggaattaagtgagacaaagataaaaatattttgtaactttgccgcctattgctggaataaatatttttaggttcccgatgaaaataaaactgttcaccatacccaatctgctgaccctctcaagcctgctctgcggctcgtttgcggcggtttcggcgttggtttaccacgatctggagctggctttctggctcaccgtcgccgcgggcgtcttcgactattgcgacggcttcgccgcccggctgctgaagtgtccctcggccatcggcgtccagctggattcgctctccgacatggtttcgttcggattcgttccggcttcggtgcttttcgtgctgtggaacgacgcgcttgcggccgatgccgaaccgtggatgcgctacggcggcagcgtgctctgcttcgtggtggcggccttttcggcgctgcggctggccaagttcaatatcgacgaaacgcagcacaccgaattctgcggcctgcccactccggccaatgcgctgttcttcgctgcactgggctggatgaacgccgagacgggcttcagtctgggcgtctgggtgctcctgctgatgccggtcatgtcgtggctgctcatatcgccggtgagaatgttcgctttcaagttccggagtttttcttttaaaggcaacgagatccgctatctctttattgcgctgtccgttgtcctgttggtcgctttgggtgttcgggccgtccctgtcattattctgctctacatcgtcgtttcggcggtaaagtggatcgtgacgctaaagagccgtgattcagcggcttgcccggaggaataattgcatatttaaattttttaaattacctttgccgcggattcccgttctatgtcgagattgacgaaaagaatattgctgacagctttgctcggtctgtttctgacagtacccggcatcgtccgttcgcagggtttcgacgccaagacgctgatgcgtgcgcagcagcgcggacagaccggcagcctgtacggcaacaatcccttcgaacagcctgcggaagagggcgaggagggcgaacagcagccgcaggatacgaccaagaaggagcgcaagatccgcaagccgctcgaatcctattttttcagcgattcggtccgctcgctgaacaacttccgctggaacgtcaggcgcgactacaaccgcgttgagatcggaccgctggacacgacgctgaccgactggcgtatcgactatccgttctaccgcgaagaggtgggcgacatcgcgcagggcgctctcggacaggcttcgctgccgatgaactatttccggcggccccagaacttcgacttcggtttcgctagtccctactatgcgtacacgtacgacatggagaacgtgcctttctacaacacgaagaagccgatcatccgcatgacctatctcgaatcgggacagaagcgtttccgcgaggagaacttcaacatcatgcacgcgcagaacgtctcgccgacgacggggttcaacgtcgattacaaggcgcggggaacgcgcggacagtatatctggtcccgcaccaagaaccacaacctcgcggtggcgttcaaccatacgggcaaacgctattcggtgcatgcggcctattacaacaaccacatcgagcagcaggaaaacggcggcgtggtcggcacgtgggccattgccgatacgacgttccagatgccgtcgggcgtgccgatgaagctggccgacgccgaggcgcagaatacctaccgcaacaatgccttcttcgtcacccagtcgtatgcgcttccgctgcagcgggtgacggacagcgatttttcgctggccgacctttcggcggtattcataggccattcgttcgagtacagctcgtggagcaaggtctatacggatataaaggccggctatacgaacgagcggggcgagcgggacccggagacgggcgaattcaagcctacggaggggatttactacaaggactggttcatcaatccccgcgatacgcgcgactcgatttacgagcgcgttatctcgaaccgcttcttcgttcaggcgcagccttgggaccgcaacggcgtggtaggcacgattgatgccggcataggcatcgacatgcatacctactcgcagttcgagatgcgtgatttcctgacgggcaagtatacgaaggtcaacaagaccagctatttcgcatacggctccgtcggaggcaagataaaaaaatatgtcgactgggatgcgaacctcaagttctacccgtcgggatacagaggcggagacctcaccttgggcgctcatctggcgctgacggggtatctccgcggacaccccctgattctcgaaggccggttcacgatggaccgccgctcgccgaactactggcaggagaatctcttctcgaaccattatatatggtccactcctttaggcaaggagaatgaaactcggttcgaggtgaagttttcgattcccgatttcgcgtttgaagcgggagcatggcagggcgtcgtcagcgacaagatctattacgacgcagacagccagattacccagcagggtggaaacgtaagcctcacgagtgtgtacgctcgcaaagatttccgcttaggcggacttcatttggacaacagggtattgttgcagtggagtacgaatcaagaagttgcacccgttccgcttttgagcgccttcctttcgtattattacgaattctgggtcgtgcgcaacgtactgcgcctgcagatcggtttggacggacgctataatacgcgttattatgcgcccggttacaatcccgcactgtcggcgttttacaaccagcgcgaggtcgaggtggggaattatccctacatggacgctttcgtcatgggtaagtggaagagaatgcggatattcctgaaatatcagcatgtgaacaagggactgttcggtaacggagaatatttctcggcggctaactatccgctgaatccgggcatgttcaaaatcggtatctcatggggtttctatgattagcgtattgttctgcgcggtgtgaactgcccgcaaaacaaccttttatgttaaaaaagacagttttaacgtttgcgttcttaacaattcttacgacattttacggctttaacgccaagttcagcacacccgtgacggacgacatgctgaacgaagaggccgatttcggcaattcgctgctcagcgacggcgattacgtgatttcggcctacgacaacatcattcgcaacatcagcgaaaaagagggccacgactggcgcctgatgagcgccatcgcgtatcacgagtcgcgtttcacgcccgatatcacctcgcgcagcggagccaagggactgatgcagatcatgccttcggtagcgcgtcagttcgacgttccggcaggcgatatggccaatcctgagaccaacatatggctggccaacaagctgatgtcgaaaataaagagtacgctccgttttcctgcgggaacttcggacaaggaccggatgagcattatactggcctgctacaacagcggtataggccatgtgaacgatgcacggcgtctggcgcgtgtcaacggggaggatcccaattcgtgggaggtggtagcccggtacctgcagctcaaggcgcagcccgaatactacgagaacgaagtggtcaagtgcggccgtttcaccggcagccggcagacgctggcttacgtgaacgacgtgataggccgttatgacaaatattgccgggtcgccgtgaggtgatttccgcccggcggaacgtaagcctgagtgcgataacgaagcggcagaaccgatggttctgccgcttctgttttttgttctgagaggggcggcggcgaaggaatgggaacagcagcgagcgattgggactgcggtgagcgattgggactgcggtgagggattggagactgcggtgggggtagcggcgcggaactgggacctgagtgcccgtaatgaaaaaggatgggatgccgacgcgtcccatcctttttcgttgtgttttccggttttaacgctcccggcttaataaacccattcgaagtcgtcgacgtacatcgtgttcgtcgtgcagccgaccatgaagtcgccgtaggcgctggtcgagcaggagatgacgatgctgtatttgcccgtgggacgggcctgcgtgtcgtagaaatcgagcggcagcgtgatttcggtcatccggtcgccggcggtcgaacggtcgatgaacagcgaaccgcaggcgatgatcttgccctcgtccgttgccgtggtttccgtcgggtcccaagtgccggtcggggcgcccgttcccgaagctacccggtgacgggcattccagtctacgattgccacgaagatccgggccttgtcctgatcgcccttgccgatcggcgctccgctgtgttttgcctgattgacgatgccgaccgtcgcatggtattttactttcatgccggaggggcgtgccgtccatgtgtagggctgcccgaattccacgacgccggtcgtcagaccgtctttgtagaagatgccggacatcaggttgcccgcggccagtcccacgatcgggggagccgaggctttcagcagggcgcaacggctgccgcccattccgtcgaaagcggccgatgtgcagagttccttagcgaagccgttgttgccgctggcccagaattccgcattctgattctctagtgtgaagcacgaaagccccggattttccatgttgccgtcgggtatgacgtcgcccgcggggacggtgtgttcggacgtttcggtcgcttctccgttgacgagcagccgtaactcgtaggtctgccccgcatagacgcccttggtccgcaccagacgtttgacgggtagcccggcggcgttggtcgagttcgtccattcgggggcgacggcggccgtgaagagtccggtttcgtcccgctcgcccttttgcgtcgcctgccactcgtcggtgcctttcacacggtattggatcacggcgtcgggatactcctcttccgttgccatggcggttatgacgcccgtgttgttccagaggtccgtctcccggaaggcgattttcaggtcggtgtgctcgacatggagcgtccagcgttcggtcgctccgtgataggtcgcatcgacgaaacgcatcgtttcgaagcccgaagccgagagttcttccgccgtgggagagtaggtcgtgatgtcggcaggacccagtttgagccgggtgaccgtaatgtcgccgaggttcgttcccttgggcacataggctgtcgccgtacgtttctgggcgtctattaccgtcgcgccgatctgtcctgcgaccgtaaaggcgcgttcgatcggctgttctgccacgatcgtccattcgtaatcctgatagagcgagagggtgacgtacagcggcgaacgcaggtcgaattccccgctgaggggccgcgacgttttgatctggccgatgaaagactccgtgtcggtcatcatcggattggaggtcgcggcgtcgaacgtaaccttgtcaatgccgactttgcgtatgtcggttttctcatccagcgtaagcgtcacggtgcggttggcgatgctgatgcccgacacggtgaagccgctgccttcgacgcccgcgatcctgagttcgacgacgggataaggcacgtcgttgtcgatgcacgaagcggctaaaagaagcgctgctgccgagaagagtatgcggaaatatttcatgtcttactgctttttcttgtcccacaaatggatcgtcatgccgaaattgatggctgcgatgttgagccggaagcgcatgttcgaagccttgcgcgaaccgaccttgttgccgtcggcatccttttgggtgacggaattgtactgtatgccacccagcccgaacgaaagcgtcgcacagacgttggggaagatgtagacggccgctcccggattaaacgaaagttttacctgcgtattgtcactgtaggtgcgattggggctgccgccctccttgcggtcggggtcgtacaggaaattcgaggtacccgtagagagggccagttcgaattcggcgaagagtccgaaacgccccttgggatcgagtccggcgtacgaacggtggaagatgccgaacgagtagttgtcgctcgaaaggtcgatataggggagctgccccgaaaggtcgttgccctctccggcgtcgaaataggtgttgtcgagcgtgccgcccatgtggcggtagccgaaacgcacgccgatgcagttgttgtcgcggtagaaatagccgatgaaaggcttcaccgtagctaccgtgccgtccgcgttgatgttgtcgaggatgagcatgatgtccgtatcgtcgcttgacagggtgccgtacgatgccgtcagccccatcatcacttcgcctttgtaggcgaatttgagtttgttgatttcgcggtcgatgcgtttgcgcgtcggcagaaagcgctgttccttgggccgtttctgcctgtcggcggcgatgggcgacggtgcgggcgtcgcaaatgcgtctgcggtcagctgatttccggatgtctgttccgcggcgggcgctgctgtccgttccgcaggggctgccacggattcggccgtgaccgaaggcgtttcagcggcggcagcggtttcggcctgctgcactgcggggcgggcttgttctgtctccgcagcggcgtcgagcgtaatgaataccgagaagatggaaagtatgattcgtttcatgtgcttgccgattttagagatagaatgccataccgagtccgatcgagaagatgttgaccttgaagttcatcatgctggcgtcgcgcttgccgaccgtaacctgattgtgtacctgcttggtgtgcgtataggtgatacccattacgccgacgtttacttcgacggccatgttgttcgtcgcgaaggccacgatgccgggcgaaacgccgagcgagaaggtgtagcctgtttcgtaggtgcccttcaccggggaatccttggcgaagcgcgcctgcgtgccgcctccggacagctgcatttcgttgaagagcgcgaagcgtttgttgcgtcccagcggaatgtactgccgccagattaccgccaccgagtagctgtggcgcagcgaatagtagtcgttcacctcgaagttgaggtccgaatcctcgccgccgaggttgaggtcggccttgtcgagcttgagcagcgagcgcgagtagatgaagcgtcctccgatggccatgttgtcgcgcaatgcgtaggcgatcatcgggctgaccttgaaggtgtaacccttcgattcgatgccttcgacgaccagaaaccggtaggtctcgttcgaatgggtcgagtaggaagccgtacctccgaatatccactgtccgcgcgggacgaagaggttgtgcgtgtcggtcagaccgcgctgctggcgcatttcattgattgtgagcgcgcgttcctgtccgacgctgtcggccgggagggacgcgtcctccgttgtctgctgcgcacgcagcgcctgagccgtacctgcgagatacagcagggtcaggagcgtgctgatggttattttgcgcattgtcgtgcgtttagtcgttaatatacccattcaaaatcgtcgatatacatcacattcgtcgtgcaggcgtccataaagtcgccgtacgcactcgttgcgcaggatatggcgatattgaatttgccctgcggagcgacggccgtgttctggtaataatttatcggcatcgtgatttctaccatttcatcgccgggagtcgtctcttcgatgaatttcgatgcatagccgataatgggaccgttggtcgtttcggtctgtgtttccggatcccatgtgcctgtcggggcttttgtgccggcaaatactttttgctgggccgaccagtccacgatgcatacgaatacccgcgctttgtccatttcgccgacgggaatcttcccttcgtggaggttgtagtccacaagtccgattgttgcgtggtatttgaatttgatcgctttcggccttgcgttgtaggtgaaatctttgccgaaagagacattgccgcccattgggacaagcgaaatgccgaagtctcccgtaaatagattacccggagcaggaaccttggccagcgtgttataggttgcggtcagtttggcgcaatagcttccgactctgccgggcatggtatcgtcgcgggtgcacaagtctttggcgaacgagttataaccgcttccccagaacgtgtatttggtaccgcttcccggaaactgcttgtcgcttctccacgtttcgagactgccgtcggtcatggcattgcctgcttgggtcgtgaattgtccggtatgctctgcgccgttaatggtggctttatactcataagtgtttcctgcggaaatgccggtcccatctttgatgcgcgaatagggcagcaccgtattgggggtactccagtctgcttcggttttgtcctcccattcgggcgcataggtcgccgagatgaaatcgtcgccctgcgacgtgccggtctggtatttccattggccgtcgctgccgcacaaaccgaacgttacgtttgccgaccgggtgaaatccacgacctgcagcgttacggtattggcccagaggtcgtagcttttttccgtaaccggaaccaatccctgcagacggtaggtcgtcgaaatctcgttgctgccgccgttggcgtcttccacatggatcgtcacggcgtggtcgccgcccggtagtcctccgaagaaagcgtcggacaacgtcagttcggtgttgtatttatcggtaggcgagaatgaaatgccttcgtgcgtgccggtgagcaggtcgtagctgtcgccgccgaccgagaccgtgaattttttcagttccgcgaaagccatgatccggtattttttctcgccggacgtatatttctgcagttcgtcgttgtcgaatccctcggtgagaagggccggatcgggactgaaaataatctcgtcgtccttgtcttccgtctcggtatcgacgcggatcagcagggcgtcgatataacccggcaggtcgggggagtagcggaaggtgaagacgtatttgccgccggccttgacctcggtcagcatgttttccatctcgacctccttgcccgacgtatgcgtgccgcggaacatccacgccagcgaagtcgtacctgcgggcagggtgtaatagcccgtgccttcgtccgtgaatttgagcgcaggaaccgcacccgactcggcttccgcctcgtcgaatttgtccgtgccggctatccatacgaagtagcccggatcgagattctcgacgatcgaagcgtcgaatttgacttcgacgacggtgttcgcgatcttgcaaactaccttcgcattggtcgtttcgccgggtttgacggtgaatgtctcctcgcctttgtagaagcgtttcgagaaatccgcggggacctcttcgcccgcctcgaccgctacgcggtaagtgccggagagcagctccagccgttcgggaatgtcgtctttcgcggcgtatttgcggagcagcccgccctcgctgttatagatatacactttctggtattgcagcggatcgtattcgccgttggtttccgtccgcgaggtcgaaatcgtcatcgccatcacgcccgtgcgcccgtcgccggcaggagtttcgtcctgcgagcatgacgcgccggtgagtgccgtgagcagcatggcgatatatgtgatgtgtcttttcattattcggcggctttaacgatgagtttgacggtcttgtgcgtcaatacgttgttgttgtccgtcacgtcgaggacgaagttatgctcgcccggaatctccagcagtatctcgacgaatttggtgatcgagaacattacggcggtctggttcttcacctgttcgttgatcgggaatccgaattcgtcgtggagaatcgcggccagatcggccggaatgtcgcagatgtcgaatttctccggaatgctgagaatcggaagcagatctttcagtgcctcggagtcgatcgtaacccagaacgacttgatgcctgcggccgcagtcacgtcgatgtcgatgaccatgtctttctgcacttcgtactgctggtcgatatcgtagcctctccagacgattgcaggacccttctgacctgcgcttttgtccacgacgagcgtcagcgcggctgcggtcgagacgcctttggcgtcggtcatgtcgaacgagaaggtgtgcgtgccgtcgaattcgtagagcgccttgatctgccctgcgatgttgaagctcttggcctgctggcccttgagttcgccgcctacagggtagccgaatcctttgagtatgatgcctgccggcgacgacgcgtcgagcgtgcagaggtcgaacgtttcgggaagctggatcgccgccatcgaagccatgaaccgactgctggtcgaagcgatattgacgcgcagcgattcgatgccgttgggcgatgcgaggtcgaagacgaacggttcgatgcagttgccgttgtcgtcgaacatggcgtccgtcagcgtgaaaggcttggacatgtcatgtccgggccatgcgagagccggtgcgttggggtcttcgagaagctcttccagcaggttgtcggtgccgtctacgacgaaagagttgtcctgaatgatgttgttgtccaccgttacctgaaacagaagcgttcctttgtcggcatagttgattacgaccgaaatcttacgccactggccggcctttactcccgtgatctgcttgctgaactgcgcggggatgtcggtgtcggcgaaaacgccgtcgaagttgaaatccagcgtattctcgatgtccagcgatttgaagtaggccgcgcgcgtttcggttttgagaaactcctgactggtctggcccagcgatatggtcgccttgctggtgtcggccagcatgccggccagttcggacgaataatccaccgtgaccttgatattctgcaatgtgcagaccacctcttcgagctgggtcgtctgcgcctttgaaatcgtgaagctgctcgtcgcgccgtagaccgggtgctcccacgctacgtccggagtgctctcctccgagcgcacctccatgcggtaggcgcccaccggaagttccatcggctcggcgagctgctgtttgagttcggcataggtttttttgaatacctgcacgttgtcggcgtcgagaatctctacgataaaaccgtccacgtcgggttgttcggcgcgggtgccggatacggcctgcgggctttgcgtttggtccgaagtgtcgtcgggacgaacgtccgtctcgtcatagaccacccgcatcgaaaggccgcttaccgacaggaagcccgtcgcgtcgcccggtgtcggcttgggttcctccttgtagggaggttcttcgttcacacagcctgccgcaacgaacgctgcaaccgccaacatcgtaaaaagtctggtaaatgtcttcatatcttttgctgtttttattccttatttggtatcgtctatggccccctcgttgacttcgcagtcaatctgctggggttcggagtcgtcgtcgctgagcgtgacggtcagcgtgacgctgcccgcatccttggcgtcgaaagtgaaaatatggcaggtgcgcggcgaggtggcttcgagcgtttgctcggagaaggtgaccttaggcccctcgtcggttccggtctggctctggcggcgtgccgtgccggttaccttgagcgtcgtggcgcttttgacgaataccggctcgtcggcgggcgtgctgccgggcgtgaagtcgaactggttgcccgatgccgtcgttacggtaaactgcgcgtcgtggaaatagttgaggaactgttccgtggcgcggaccaccgtctgcgagttggcgatcgtagcggtcatctccaccgttgcagcgcggcggggcagcacctcgacgctcttctccgcggcataatagggcttgtcgattccctccgcatcggggtcgccgtgggcgacggagacggtgtaggcgcccatccggaagacggtttcgctttgctcgaattccgcgagcgtatcccatttttgcgtccccgattctccggtgaccgtaagcgtgaaatcgccggcttgggggacggagggcgcggccggcatccgggaagtgtcgtccgatgcggcgtcgatcgaaccgtcggcggtgcagctgaccttcagcgtgccgtattccgtgccttcagccttgttttccgtggagcatccggccgccagcagggctgccgatgccattaagtatatgagttgtcttttcatggtattccggtcgttcaatggtgagtgttgtcggtcgtgccgtttgcggacggcgctgccggttcggcagccgcatctgccgctttgactgtacctgccggggcgcctttatacgaaacgtcccgaagcgtctgtttgggtcgggatgtttggttttttgttcgcatggatgcatgccttttattgacaatgtgcaaaaataggtatgcgccgcggatttgtaaaataaattcaacgaacggcgcatttttcatcacgaacacccgacacgctgcatgccgtcgggccggattctcctctcttcaggtgtctttccgctgccgggaaatggcttgcgcgcccttctttcgcggtgcgggcggtacctgaataaaagaacctccctgcaatcgcagggaggtcgggggtgaaggccgcggggccttcgggtttgttatcggaggattagtatacccattcgaaatcgtctacgtagagcgtgttaccagaacaaccgttgaaatagtctccataggcattgcaagcgcatgaaataacaagcgaatagttgccgtcggttgggactgcggtcttgtcgtagaaattggtttcgataatggctgttgccatttcgtcactgactgtattagtatctatccacattgaaccatagccgataattttaccttcgtctgtgctattcgatatttcgggatcccatgagcctattgtttctgctctggatagataagtagagccaaataatttaacattaggagttgaagatactgtatgtggtgcagtccagtcaacaatgcaaaaaaagattctggctttatcttgttgtccggaggctatttttatatcggccccatctgtatgatttatagtgccgattgtagcatgatattttaacttaagagcagaaggacgtgcggaccacttgtatggttgtccaaaagtcacaactcctttataggtaccatccattttgaatgttcctgtaaagagattacctgctgccaatactttgattgagcctaatcccggttctgcagattggcattttgccctattcccattttgatatgtattggggctgcagagactgctgctttgactattgttaccacttccccaaaatgttgaagatgcgctaccgttttgtgtgaagcatggtaaattggaattttccatatccccgtcaggaattaaattgccagcatctgtcttgaaagtgctttggtagggcgttccgtctatggttagtatgtaatcataggtgtttcctgcaaagatacccgtgcctgttttaatccgtgagtatggcaatacggtgttgggggtagaccagtctgcattagtcatgtcttcccattcgggggctattgtagctgttttattgttgactgttgctgtctgccatgccgtatctgttgatttcttgtaggttaaagtaacggatgctgcactttccgggatgtacatcaagtcgaatgatgctgtatttgtccaaagatctgcggaggttaatttgagtgttggagagaaaaccgtttttacatattgcaacgtaatctcttcagtttgatcggcattatcggttacggtgaatttgaaattggagttcgtcgtttcggttacttcggcgcagacgttggccaacaagtcgatcaagtcgccgatctggaagaatacgtgctgctggtttagcaggtgttgcgcaggcgggaatccgagttgccccaacatttccgccattgtatcggttgccggatttgtcagctccattacaggggcaagtcctacgatttccagcatgccgctttcggtcaggattggagcgatgatctccacctgcatcgacttgatgccgcccggtgcgctgacccggatatcggcgctgttgccgctttcggccagttcgacgggtgtcgtaaggtcttcgtggccgagccactcgacggtcggagctgcggctttggtgaatgatgcggtctgatccaccgtgtagacccagttggcgacgacgggcgtcgatcgggtgatcgtgaagcttgctgcgttgcctttgtcggtgcaggccgagaaggtcagagcgccgtagctgtcatcagggagcacgttgaaaaaggtctcgctgtaatcggccgaaggagccgtgccgtcggcgtaggtgacggtgatgtgctccgagtcgatcgagatgggagagcctgttgcggaggtgccttcggcgaccagcgtcgggttgatagccgacggatcgtatgtggcgttcgggtctgagggaacggtgaaggtcagctgctcggaggcgatcggtttttccgacgtcagcatgacggaggctattttctccgacgcagcgtcgccttgcagtttgagcgcgaggatcgaggtgatgcggtgaagattgaactttacggcactcccttccggcgttttgcccggctcggcgtcgttgtgggtgatggcgtcggcggccatgatgtcgaattcgctgttgtatttgtttccgttctgggtgcgcagggcgctgaaaggaaccgttacggtcgtgccggaaacggcggcgtttccgttgtgggggtagaaggcgcggtacgcccaagtgcctgcggtgccggtgagcgagcctgtaaaagccttgctgtctgtggcgtacgtaaattgcaggagctgcgtgaagtcgttggcgaggacgccgaggttgtcttcgccgttccatgtgccggtaagaccggtttcgaaatcgacgttgatgtcggcgcggctttgttcgcggggagcgatatcggcgagaaaaccgacggcagttgctccgtcgccggatgttgcgggaacttcctcgtaggtgctgcacgcgccgaggagaagcgctgcggtcagcgttaaaagagagacttgttttttcatggctgccggttttttattcgttttcgcccaaataaaaatcgtcgtagcagctcagggggctgattccgtcggaggaagggacgtctccggacgtggcaaatcctttttccgcggcgacctcaatcgtctcgatcatcggggcggagtatttccccccccctttcgtggttgatacaattcccatggtatgcaatagtttaaagtgacctaacaaaaataggcgggaagcggatcatctgaaaataaattcaatgaacgggcagtgtttcatcacgaaaaggcatatttgccttgtggaaccggaatcgattgcggcaatattgcaaggcggtggaaatcaataaaaacctccctgcgggcgcagggaggtcgggggtgaaggccgcggggccttcgggtttgttatcgggagatcagtacacccactcgaaatcgtctacccagagtttgttcgcgtcgcatccggtcaggtagtcgcccagatagctggtcgcagtcgaaatgaccagcgtgtagttgcccgtcggaggcgtgtccgtcttttcgtaatagacgatcggaagctccagatccttcatgctgccggtgtgagactccgtgatgtaggcggaaccgtagccgatgattttgccttcgttcaggctcgatacggtttccgggtcccaaaacgtcgttttgtctaccgaagtgcccgattgcaccgcatggcggtcgctccattctacgatacagacgaagatgcgtcctttgtcgagaccggtgcttacgggcggatcgttcttgacccggttgatttcgcctatctcggcggcatatttcagtttgagggcggcgggacgtgcggaataggtatacggctgtccgaattgtgcgtaaccgaccgtgccgtccatcacgaaatctccggtgtagaggttgcccgcagcgaatgcgatgactgcatacttcgcggcgagttgcgcgcaataatcaccgaccatgccgggatatgttgcctgagtgcataatttgtcggttcccgaactggtcatatagccgttgttgccgctgtcccagaatttgtcggtccctgttgcgtcttcgtatttgacggcattcggatagggtacgttggtcgaacctatgatctttttcatcgatttcgtactccagctctccatgcctgcattgggaatgatgtcgccgaggttgttttttggcgtgaattcgcccgaagcgaccgttgcgccgtcggcgagcagttggtattcgtagctcttgcgggcgaagatgccggtcttgggatcgacgctatggatcgtcagccccgcttcgttggtgccggtggtccagtcggggctgatcagggccgtgcggctgccgtcgtcgttcggcccggagacgctggcggcgttccatgcgctttcgcccttgatgcggtactccagtgcgacgctgccggcgtcggcgaactgattgctgatcgtcagcgaggcggtgtttttccaaaggtccgtttgatctacccgcacgagcgccggggccgtgaaggtcagcgattgctcggtcacctgccccgcgagatcggttaccttgacgtcgaagacgtgttcgctgccggggtcgggacccagcaggaggatcatcggcacgagtgccgtgatgtcgaaaacgcactcttttttatattgtatttcgctctggcagctgagtccgagatcggcgaaggagattccctcgatgacttcggaatcgttgaacagattgagtttcgaaatgcccagcatgctcagtacgggcgacgaaacatcgacttccagaccggcaatgcctcccggtacatggatgttgatggcggcggagtaggtgagctggttgttgtcgtccacggtgatttcgtgcgcttggtcgatatcctgtccgggccagtcgaacgacggagcttcgagcggagcgaagacgggcgtttcggcgcgcttgtagagcttgcctgcggcgaacggtttgtctgccccgcgttcgatggcgaccgtaccgatccgggttgccgtaatcacgtctacagtcagtttgtcgtagcttcccggcatgatgttgaagaaggcgttgatgtcgttggcgtcgggagccgtgccctgctcgaagcccagcgcgatgacgttcgacggagcggtttggctgaatgcaagcccggatcccgtgtccgaaatgtcgaagtcgatgctctcggccgagagcgtctgggcttcgttctccgaagtcagcagcaggtagcggactttgtcggcattggcgccgcctttcacctccagattgagaatcgaggtcaggcggctgagagtgaatcggatcggatcgccttcgtcggttttgcccggttcggcattggcgaaactcaggatgggggccgccagtgcgtcggaggcgcagttgaaagtgttgccgatctgggtgcgcaggttgccgaacgggatgctggctttggtgccgtttacggtcgcatggggatagaaagccatgtattgccacgctccggtctgcgccggcagttccccttcgaatgcgaagtcgctgtcgttgtaagtgaacggccggagttccggggaggagccgggagcggtgaaaagaactcccatggcgtcgttgtcttcccagtatccggtgaatgtgctttctccgacggagatgccggcgcgggtttcggcgtcgtcggcgacatcggcgcggagttttacgaacgtgttgccggcgtgtgccggatcgttcgtctcgtcgtaactgctgcagcccgcggacaatgcggccgcagcgaggattgccaaagctttataggagtttttcatagctgcgccgttttttattcgttgtccaaatagaaatcgtcgtagcttacgccggtcggctctacgccgccgccggggaaggagttggcaaatcccttttcgggctgcacgtcgatctgttcgagcaggggtgtgacatagcacagcttccccgcccggagggtggttacattcttcatagtcaaaatctgttaattgcgtcggaagcaaatgtaggaaggtcctgactgagatgaaaataaattcaacgaacaggcgtgttttttcaacgaatcggttgatttgacagatggcggtcgggctgaaatgctttgataaagagcgaaaaggtgtgtcgggcgacgagaaaggccgtccggatcaccggacggccttcgtatcgagcctttcaggcggttattttacgtatttgttcagccagccgaagaactcgcggttccagacgagcgagttctggggtttgaacacctgatgggcttcgttttcgaactccaccagacgggccgggattccgcggacgcgggcggcggtgaacgcttcgagcgactgcgtgtaggggatgcggaagtcgtattcgcccgtgaaaatcagtatcggcgtgtcccatttctcgacgaatttgtgcggcgaattggtgtaggaacgctgtgcgacttcgttcgaccgatcccagtagggacctccgtaatcgttgttgatgaagaacagttcctcggtttggccgtacatcgactcgaagttgaagatgccgcagtgcgagatgaaggctttgaaccgtttctcgtggcatccggcgagaaaatagaccgaatatccgccgtacgatgcgccgacgcatcccatgcggttctcgtcggcccaaggctccttcgccacgtcgtcgatggccgagaggtagtcgcggatgttctggcccgaatagtcgcccgaaatctggtcgagccactcctgtccgaacgagggcaggccgcggcggttgggcgccacgacgacgtaaccctgcgccgccatcagctggaaattccagcggtagctccagaactgcgaaacgacgctctgcggaccgccctgacagtagagcagcgtggggtatttcttggcgggatcgaagtcgggaggcaggatcacccacgtcagcatctgcttgccgtcggtggtcctgacccagcgtttctgcacctcgcccattctaatattgtcgtagacgggtttgttgatggccgaaatctgcgtcagcgtgccgtcggcgggattcacgtcgaagaactccgtggccatcgagatcgtacacatttcggcggcgatcctgtcgcccgccatcgagaaggcgttgatgtcgtggtcgccgcgggtcaccacttcgacttcgccgaccgaaggcgcgatgcggcatatctggtgcgtggcttcgatcggggcgatgaagtagagcatgtcgctgccgctccagacgacgttcatggcgttgtagtcgaaatcctcggtcaggtcctgcatttgggccgtctggcagtcgtagaggaacaggcgcgccttgtccgactcgttgccggcacggcgctgcgagaggaacgcgatctgccggtcgtcgggcgaccagacggggtatttgtcgtaacccgccatcgtggccatgtccgcgatcggctcgccggtattgacgtttacgggtttgcagatgttctgcgtcacgccgttttcgaggacgtagacgaagatgtccgaatcggtcgaaacggcgtactcggtgccggtcagcggcttgcaggtgtacgccagcatcgttccggcgttgttccacgcgatttcggccatgtcgaagtagggcgccaacggagcgtcccacgcggcgtccttgccgatgatgtccacgccgggtttcagcccctcggctccgaagtcgccgacgaagatatgcaggtaggaaccctcgtcccagtaattccagtggcgggccatcaggtcgtcgtagatgcgggccttcgatttgtccatgtccttgtagacgtccgacgacttgcggtcgcagacctcgacgcgctgtacgtaccatgccttgtcgccgcgggggctgatgccgaagccttcgacgtccttgtcgaacgccgagagctgtctggcgttgccgcctgcgggcgtcatttcccatacctgcatcgagccgctgcggtccgagaggaagtagatcttctccccgtcggcgctccacttgggatcggcgttgttcgacgcggtgtcggtcaggcgcgtcacggccttggtcgcaaggtcttcgacccagatggtcgtcacgccgcggttttcggccatgttgtagtcggtctgcgcatagaggagcgtacgcccgtcgggcgagagcgacgaggagcctgcacggctcattttccacatcacctcaggggtgagaatgcctgcggcgatctcatcggccgtcagggcattgtcgatggtaaggggctgcggccgcctgtcgtcgcatgcgctcagtcccgtagctgcaatagccataaaaaggagtaattttttcattttcggtcgggtttcttctatttattcgtatttttgcattcaaatccgatcggcatgaaccataccgtatattttgcagataaatccgtgattttcacttcggacgcgcccggcggcgaatgctatgccgtcgtgcccgcggatccggcggacctatcacgagcgaaggtaacgaaaattctcgaatcgcacaactgcgtcgcagtcgtttttgccgatcccgacgcggcgttccgctcttttgcggctgattttacgcagatcgaagcggcgggcggcgtggtggtgaacgaccgcggcgagtggctgatgatgcgccgcaacggccgctgggacctgcccaagggacatctcgaatgcggcgagcgcatcgaagcgtgcgccgcgcgcgaaatcgccgaggagacgggcgtgtgcgccgaaccggtgcggtcgctgtgccggacgtggcacgcctattatttcccgaagaccgaacgctgggagctgaaacgcacccattggtacgaactgcgcgcggcggcctgcggcgacctcgtaccgcagaccgaagaggggatcgagacggtcgtctggtgcgctccggccgaagcgatggcccatgccgccgggagttttcctacggtgcgcaccgtgctcgaacggctcgaaacctgtctgtccgccgataaaaaaccataacccatatgctttcaatctccgcttccgcctatcccgactcgaagccccattatgcgatcctcgacggtctgcgcggcgtcgcgtcgctggtcgtcgtggcctttcatcttttcgaggcgcatgccgcgagccatgccgaccagatcatcaaccacggctatctggccgtcgatttcttcttcgtcctttcgggcttcgtcatcggctatgcctacgacgaccgctggggacgcatgacctaccgcgatttcttcaagcgccgtctgatccgcctgcatcccatggtggtgatgggcatgctgatcggcgccgcggcgttctacttcggcgcaggaggaccttacgaaatgatcgccggcgttccggtcggacgcatgcttctgatcctgctgctggggtgcctgatgattcccgtgccgccgtcgatggacattcgcggctggaatgagacctatccgctggacggccccgcatggtcgcttttcttcgagtatatcgccaatatctgctatgcccttgtcctgcggcggctttcgaaactgttgctgggggcgctcgccgttgtcgcggcatgctttacggtgcgtctcgccgtgacgcagggcgatatgatcggcggctgggcgctcgacggcgaacagctcggcgtaggtttcacgcggctggcttatccgtttatcgccggactgctgctgtcgcgcgtcggaaagctgatccgtctgcgcggcgctttctggctttgcagtctctgcgtcgtcgccgtgctggccatgccgcatctggggacggaccgcttgtggctgaacggtctctacgacgccgtgtgcatcatcgtcctcttcccgctggtcgtagcggccggcgcgggcggcaaagtcacggaccgggtgtcgaaaaaggtctgcggtttcttgggcgacatctcctatccgctgtatatcacgcactatccgttcatctatatttacactgcgtgggtggtcgatgcccgtcccgcatggcccgaagcgctggggtacggcgcgctggtttacggaggcagcatcctgctggcgtggttgtgcctgcgtctgtacgacgaaccggtgcgcgggtggctcaaacgccgcttcatgcagcgcaaaccggtgcaggggtaattttgtcgtacggacggcctctgccgggtgaagattcccggttacagcaaagacctgccgatttcggcaggtctttgctgttaaggatggttgtgggacagttacgaaccgattgcagattggttgcggataattgcggatcgggggcctgttgcagagcggtttcgggcctgttgcagaggggctgacggggccgtcggattgttgtgaattcgttactgtgctgttgcaggacagtcgcgggcgttcggaccgggcgaacggggcgttgagcgattcgctcatgcccggccgccgctttttcgtggcgtcagttcgatctctccgtcagtttctcctgcacctcgtacgcttccgcgatcaggtcgcgcgggtagtcgtacatttccagaatccggatggcgttgcgggtggtgagcggtcccgtgtgcagccggtagtcgaagaccagcttcccgccgatcacctcctcgcggaaatggtgcagctcgtagccgtctttgcggagcagctccgccagctcgacgtcgtgcgtcgataccagcacgagatgcggtccccggttgagatgcgccagtacggcttttccggcggcgatgcgttcggtcgtgttcgtgcccttgaaaagttcgtcgagggcgaacagacacggcgccggctcctgcgatgcgtcgatgaaccgtttgacggtcagtacttcctgcaggtaatagctcgtcccttcggcgatgtcgtccgagatgcggatcgagctgtaaatcttcatgtacggagccgtgtaggcctcggcgaagcagatgtcgagcgtctcggccagcagggcgttgagcaccagcgtgcggatgaacgtggtcttgcccgacatgttggagccggtgagcagcagccccgtgccgtccagctccagcgtgttgggaacgcagtttccgatgagcggatgtacgacctcctcggcccgcaggtatttcccgtcggtgaattccgggcggcaggtcggcgtttcgccgcgcaggcgtgccgccgaaatcgcggcgtcggtctctccgatgaaccggaacagtccgtggatggcgtcgcggtgcgctatgatgctgccgatgaagcggtggaagagaatcacctcgacgttgaaagccgccttcagcagttcgagcaccagccatacggccgcggccagctcgttggcgctgtcgccctgcgtgccgaccacgcggctgcgccgttcgacctcggagacctgacggatgaccttcagggcctcctccgtgccgggaacctcctcggccgcgagatgccgggcggtccgcagcgccagcgtcaactgtttcacggccgaagcatagatcgaaatgttgagcttgttgctgtaatggatatacatgttcgcggcgaagacggcaagaaacagcaacagcagcagcggatagagaaagctcagcagcagcgacaccacggctgcggccgagagcaggtagacgagagcgatgcggcgcacctgctccggtttgtcgaaaatcaggttttgcaggtcgtaggcgtcgtcgtccgagagccgcgaaaggtgtttcgcgcattgttcggcatgtccggcgttcccggcgaaatgatccgtcctgcggccgaactcccgcacctcttccgtgccgtgcagggtcctcagccgggcgtacaggtattgctgtcccggcttggaggcggtgcggtcgatgcgctcgaatacggcgttgaggtcgaggtcggccgtggtctcggcgtcgatggtctgaaaaaagctctcttccgaagagacgttgtagaaataacggcttgtcaggtcgaaattacacgcggcccgtttttcgccggacgctccgggaagccccaaaaaggttgtcaggtatgcagtaggtttcatggtcgcgtgtcggttgttcaggcgtccgaccggaacggccggtcggacgcggggcggtcggcgggggagccgtatcgcatgcggtcccgcattccgtgccgcctctccgttaatattgcggtgcggcgttcatcgccttggcgatgccttcggcgatctgatccagtccgccttggagtttgccgccgatcatcattttcatcatcatattcagctcgatgtgcagcaccagccgcatgcgggtgtcggtgtccgagaccttgtggagctgaatccagaatgcgaagtccatcggcactccgccgccgtcggcgacgatcttgacgtgccggggcgcttcgcgctcctccatgcggagctttacggtgaagcctttggctttgaacgagcaggtgtcttcggtcgcctgccactcctcgaccttgtcggccacggcgggcgtcaggttgtcgaaacggctgatgacggcgtaaatctgttcggcgggacgcaaaatctgttgctgtttggagatatattcctgcatggttgtattgaatgggtgaatcggatttcagcgcagggccggccggagtttatcccttccggagcctgccgcctgcaaaagtagtgatttttcgcgggacgggcaaattgtccgccgccgggggcggaacgtgaaccgcccggcaacctgcccggtgtagcggggcgtgttgccgggcgtatgtgcaggctcggagtgtcagtcgatctcgaacgtgcgggccgtgtcgctgtccacggtgatgcgtaccgtcatcgcgttgtcgggcagcagctgctcgatcttttcgggccattcgaccagacagaggtcgcccgaatagaaatactcttcgtagccgaagtcgtaagcttcgcggacgtcgttgatgcggtagaagtcgaaatggtggatgcggcggccgcccttgcccttgtactggttgacgatggcgaacgtggggctggttacggtgtccgtcgcgcccagctgcgcggcgatttcgcggatcagcgtcgtttttccggcgcccatttctccgcggaaggcgactaccgtgcggcggccgagggcttcgatgaccgcttcggcgacgtccggcaggtcgtcctgcgaggtgatatggatggtcttcatctattgtttgggttttaagacgatgtagggcacgatcatctcttccatcgagatgccgccgtgctggaatgtattgcggtagtagcggatatggcggttcgcgtcgttgttgtaaaccagaaaatccgaattgtaggcgaagatgtagctcgacgtgaggttgctcgacggaagctgcacgtcttcgggcttgagcacttcgtagacgtcgcgggagttgtaggccaagttgcggcccgttttgtagcgcaggttggccgaagtctcgcggtcgccggtcaccttcaccggattgtccacgcggatggtgccgtggtcggaggtgatgaccaccgtgtgtccccgttccgagaggagtttgaggatggtgtagaggtccgaatgttcgaaccacgaacgcgtcagcgagcggaacgccgcgtcgtcctcggtgagttcgcggatgatgtcggtttcggtgcgcgcgtgcgagagaatgtcgaggaaattgtagacgatgaccgagaagtcggcgtcgtacaccttttgtatattgtccaccagtttgcggccctgttccgggcgcacgagcttgtcgaacgagaatttccagttcttgccgttctgggccatcagccgtttgaggaactcctcctcgtactggttctttccgccttcctcgttgtcgttgagccatttgttgggcatcagcttgtcgatggccagcggcatcagtcccgcgaatacggcgttgcgggcgtattgggtggccgtgggcaggatggcgcagtagaaatcgtcctgcgccacgtcgtaatagcctctcagcagcgaggagatcgaccgccactggtcgtagcggaagttgtcgatcagcagcagcgtggtcttcggattctcgtccgccaccgggaagatgttggtgcgcatcagcgtgtgcgacatcacgggtgtgtcttccgaacgcctgttgatccagttgtagtagttgcggcgcacgaacttgcagaactcctgattggcttcggttttctggtaggtcagcacctccttgatgctctggtcggtggattccgaaagatcgacctcccagttggccagcttgcggtacagcgaacaccagtcgccgaaggtctcggccatctgcagcgacgaggagatgcgtccgaattccgaacggtagtcggccgtggtctgctcggtgacgagctgctgctggtggacgttcttcttgatcgagagcagcacctgattggggttcacgggcttgatgaggtagtcggcgatcttcgagccgacggccttgtccatgatgttctcctcctcgctcttggtcaccatgatgacgggcgtggtggggcgcacctccttgatcttggggagcgtttcgagtcccgtcatgccgggcatcatttcgtcgaggattatcaggtcgtaggccccttcggaagccatgtcgatcgcgtcgtagccgttgttgcaggtgtctacttcgtagcccttctgtttgaggaacaggacgtggggcttcagcagttcgacctcgtcgtccacccagagtattttgaccataccgttagcggaatttagtttgcaaaattagttattttattatcaaacgcaaaaaccgggcgtttattgagtctcgtgttttccggcgcggaataaaaccgcttcggcgccggcgtgcaggggcggaaatcccgcccctgcacgccggaattccggatggcgttttgggtatatttttgttcccaaaaggtcggggcgtttttggatgcttagaggctatgtggctgatctgtaatcgattgccgtgttgtccgtccggcggagtccggcggggaataattgcctgacacataatattttaattttcgggcgagttttgcccgatatttgttatcgtactgttccagtggcaggtagaggactgcgggaaaaataatgaaaaaaatctgcggtttgttggctaaaatgtaaataaagcgtatatttgcagtccgaatgtcttcacacgaacttaataatttaatactatatagaaatgacaaaggcagatatcgtaagcgaaatcgctaagagcaccggagttgagaaggtgcaggtacaggcaatcgttgaggctttcatggatagcatcaagacgtcgctgaccaacaagaacaacgtgtatctccgtggtttcggcagtttcatcgtaaagaagcgcgccaagaaggttgcccgcaacatctcgaagaatacgaccatcaccattcccgaacacaacattcccgctttcaagcccgccaagagcttcgcggcgaaggtgaaataatttaaataaataagaacctcaaaaaatcaaggactatgccaaacggaaagaagcataagcgacacaagatggctacccacaaacgcaaaaaacgtttgcgtaagaaccgtcacaagaaaaagtagggtagcactttagtgctaaacgatagataaagctaaaggaacccaagttcttttagctttacctattttctatggtttttcgtggcggcattctgcttccggcgcatcgggcgccgtgcagagatgccgtttccgggaatccgaacctctcccgatactcttccgagggcgttcggggcggtcccggcgataaccgcaaaaataatccgggtgccttccgcgcccggaccgcgtgccggacgacgggtccgcacggttttttatcctttggagttcgccgccacttcagaccaaaaagcggcctaaccggtttcagtattccgcgtcttcgtctccggagcgcgacacacgatatagatgaacagagaattaattgtaaacgtcaacccgaccgaaatttccatcgcgctttgcgaggacaaggtccttgtcgaactcaacaaggagcagtgtcagaccgggttcgccgtcggggatatctacctcggaaaagtacgtaagatcatgccgggtctcaatgcggcattcgtcaatataggacacgaaaaggacgcctttatccattatctcgatctgggcggtcagtttccctcgctccagaagctcgtcgcttcgcagcagcccggcaaacggggcctgcgcgtcgagagcatgaagcttgaaccgcccgtggagaagtcgggcaagatcggcgactacctgcaggtcggccagaacatcatggtgcagatcgccaaggaggccatctcgaccaagggtccccgtctgacggccgatatttcgctggccggacgcaatgtcgtgctggtgcccttctcgtcgaaggtcttcctgtcgcagaagatccgttcggtggacgagaagaaacgcctgaagcggatcgccgccgccgtgctgcccaagaatttcggcgtcatcatccgtaccgcggccatggaggccaaggacgaggatatcgagcacgacatccagacccagatcgaccgctggcgcaagacctgtgcggcgatcaagaagagcacggctcccgcccagctgatgagcgagatgaaccgcgccaatacgatcatccgcgactcgctgaacggttcgttctcgcagatcgccgtggacgacgaggcgatgtacaacgacatccgcggttatatcaggcagatcgaacccgaaaaggagaagatcgtcaaactctaccgcggcaacgtgcccattttcgacaacttcgacatctcgaagcagatcaagtcgctcttcgccaaatatgtctcgctgcgccgcggcgcctacctcattatcgagcatacggaggccatgaacgtcatcgacgtcaattcgggcaaccgcaccaaggccgaggacaatcaggagcagacggcgatggacgtcaatctggccgctgcggccgaaatcgcccgccagctgcgtctgcgcgacttgggcggcatcgtcatcatcgatttcatcgacctgcacaaggcgcagaaccggcaggcgctctacgacgaaatggtgaagctgatggctaccgacaaggccaagcacacggtcctgcccctcaccaagttcggcctgatgcagatcacccgccagcgggtgcgtcccgtggccgtggaggaggtttcggacgtctgcccgacctgcaacggatcgggcaagatcgaaccgacggtgctgctggacaagaagatcgagaaccagatttcgttccttacgcaggaccgcggtcacaaatatatcaagctggtcgtaagcccctatgtggcctccttcctcaagcagggcctttggtcgctgcgctgccgctggcagtggaaatacaaggtgcggctgcatgtcgtcgccgaccagagtctcggcatcgtcgaggtccattatcacgaccgcaaggacaacgacctgataaacaagtaaccgtatgactgcccgcgagcagctggcgcagttcgccgccgggtcgaaagccctgccccgcctgtgccgcgaatataagaaagagcgcgcaaccgtccatctgaaagagctggtcggcggcgctctttcgttctatgccgctgccgctgcggcgaaaaccgggggcgtacacgtcttcgtcgccgaggaccgcgacgctgcggcctatctgatgaacgacttctataacctgctggacgagaagcaggtctatttcttcccctcgtcctataagcgttcggtggcctacggcgccgaggatgcgcagggcgtggtgcagcgcacggcggcgatgaacgccgtgaagggcttcacgaaagggtatctgatcgtctgcacctatcccgaagcgctggccgagcgggtcgccgacgccgaaaccctccggcgggatacgatcgccgtgaaagtcggtgacagtatctcgatcgccgtgctggaggacgcgctcgtcgatgcgaacttcacccgcgtcgatttcgtctatgagccgggccagtattcggtgcgcggcggtatcgtggacgtcttctccttctcggaaagcaaaccctaccgtatcgactttttcggcgacgaggtggactcgatccgccgtttcaacatttcgagccagctctcggccgacaaactcgaccgggtggagatcattcccaacctcaatgccggcgatggggcggcgaaggtgtcgttcgtgcagtttgcgggcgatgctgcggcctattggttctacgacgccgattacgtgctgcgtcgggtgaacgatatccgccgcaggacgcttgccgatatggagcgccccgacgaaatcgaccgcctgatgaccagccgcaacgcgctgctcggcgatttggcgaactgccggatgctcgccctgcgcgacaacctgccggagcgtcccgccacggcggcggtggaattcgatacggctccccagcccaagttcaacaagaacttcgagatgctggccgatgacatgatccgcaattcgctgcgcggctacacgacctatatcctctcggaaaacaaggtgcaggtcgagcgtcttgaaaacatctttcaccagatcggccgcgggcaggccgtcgtgcggcccctttcggtgacgctgcacgagggtttcgtggacaacgacctgaagttgtgtctctataccgaccatcagattttcgaccgctaccagcgttaccgcatcaacggcgagatccggcgcgacgaacagatgaccgtcgccgagctgaaccagctgcggccgggcgactacgtagtgcatatcgaccacggcgtgggccgcttcgacgggcttgtgaagatcaacgaaaacggcaaggcgcacgaggcgatcaagctggtttacaaggacggcgacgtgctgttcgtgaacgtccattcgctccaccgcatttcccgctacaagtcgggtgacggcgagccgccgaaggtttacaagctgggcaacggcgcatggcagaagctcaagaacgccaccaagaaggctgtcaaggatatttcgcgcgagctgatcgccctctatgccaaacgcaaggccagcaagggattcgcatttacgcccgacagttatctgcagcatgagctggaggcgtcgttccagtgggaggacacgcccgaccagcagacgaccgtggcggccgtcaagaaggacatggagtccgaccagccgatggaccggctggtctgcggcgacgtgggcttcggcaagaccgaggtggcgatccgcgcggcgttcaaggcggccgtggacggcaagcaggtcgccgtgctggtgccgacgacgattctcgccctgcagcactaccgttcgttttcggagcgtctgcgcaacttccccgtgcgggtcgagtatctcaaccgcacgaaaacggccaaagaggtgtcgcagatccgcgccgacctcgaagcgggccgtatcgacatcctgatcggcacgcacaagattctgggcaaacagatcgtattccgcgatctggggctgctgattatcgacgaggagcagaaattcggcgtggcggccaaggagaagctgacgcagctggcggtcaacgtcgatacgctgactctcacggcgacgccgattccgcgaacgctgcaattctcgctcatgggttcgcgcgacctttctgtcatctcgacgccgccgcccaaccggcagccgatcgtcaccgaatcgcacgtcttctcggaggagatcatccgcgacgccgtcgaaacggaactcgcgcgcggcggacaggtctacttcgtccacaaccgcgtcgaggacctgatgaccatgcaggggcttatcacccgcatctgccccaaggcccgcgtgggcgtgggacacggcaagatgcccgccgagaagctggagcggctgatcatggacttcatctacggggaattcgacgtgctggtcgccacgaccatcgtcgagaacggcatcgacattcccaatgccaatacgatcatcgtgaacaatgcccagaacttcggcctgagcgacctgcaccagctgcgcggacgtgtgggccgcagcaatcagaaagcctactgctacctgctttcgccgcccgacgaactgctgtcgtccgatgcgcgccgccgcctgcgggccatcgaggagttctccgatctgggatcgggcttcaatatcgccatgcaggacctcgacatccgcggcgcgggcaatctgctgggagcagagcagagcggattcatcgccgatatcggtttcgagacctatcagaagatcatgaacgaagcgatcgccgaactgcgcgccgagggactgcacgtcgcgggcctgaacgattcggaacaggaggtggtcgagcagctgcgctatatcgacgacgcgcatatcgaaatcgaggtcgaagccggtcttcccgactcctatgtggcgcagcaggccgagcgcctgaagctctaccgggagctggattcgaccaaggacgaggaggcgctgctggccttcggagagcgtctggtggaccgtttcggccctctgccgcgtgaaaccgaagagctgctcaacgtggtgcgcctgcgctgggaggcgatccggctgggcatggagcgcgtgaaggtcaagaacgggctgatgatcgtgcatttcgtcggcgagcaggactcgccctactacaagagcgacactttcatggacctgcttcgcaaagtcacgcagaatcccggcagatttgtgttgaaacagcacaataatcgtctggcgatgaccgttaggaatgtcaaagacattgaagacgcatataaaacgttgcagcagctttgaatttagtagtagatatcggaaacaccctcgtgaaactcgctgttttcgaccggggggagattgtttttcagcgctgcgtggagcggctgcatccgtcgatgctcgaagagctgttcgcggcatggcccgtgtgccgggccgtcgtggcttcgacgcgcggcgaagtggacgaagtggccgatctgctccggccacgcgtggagtatctgctggagttctcttcgcagacgcccgtacccatcggcaacgcctacctgacgcccgaaacgctgggccgcgaccggctggccgcggcggtcggcgccacggtgctttatccgggccgcaacgtgctgatcgtcgatttcggtacggcggtgaccatcgatctggtgacggccgacgcaacgtttcgcggcgggtgcatatcgccgggcatgaagactcgtttcagggcgttgcacgactatacggccaaactgccgctctgcgccgcgaccgaaagcgaagagcttgcggggcttaccacccggcaggccatcgagctgggcgtgatgaacggaatcgcgttcgaaatcgaaggctatgcggcccgcatgcgcagtcaaatagacgatttatgcgtaatttttaccggaggagacgcgaatttctttgttaaacgaattaaaaatacgatatttgcaaattgtaatctggttttttgcggattgaatagaattttagagtacaatgcaagtgaagaacaccttaattaaactggttgtcattgcagccgtgatgattccctgcgccgcagcggctcagacaagcagtattaacgcattctctccctacacgatgtacggcatcggcgaacagaacacgcccggtaccctgccgatgcgttcgatgggcggtgtaggtgtggccatgcgcagttcgggcgtggtcaatctgctcaatccggcggctttcagcgccgcgccgcagaagagtttcctcttcaacttcgggctggagggccagaattactacaactcccagaaggtcgacggcatgtcgaaaagcacggcctacaacaccttcaacttccacgacatcgcatttcagctgccgctggccaagaagctcggtctgggcttcagcctcacgccttacagttcggtaggctaccgcacaaaatacacccatgactacgatccgtccgatcccgtatggggcaacgtcggccgcgcgcagtacatctatcagggcgaaggcgacgtgacggaggtcaaactcggcgtcggctgggagcttttcaagaacttctcgctgggtatcgccgcgcagtattactggggcgatatcgaccgctcgttcgtgatgaccccgaccccgatcacgggcgacggctcctactcttcgacggtaggtaccgacaactacagcatttcgagcatcaaggggcagatcggcgtgcagtggaacgccatcctgaatcagaaacgcgccctgacgctgggcgccgcctatgatttcggcggcgacctcaatcccacggtgacgaaaaatatctatgtgggtgacctctacaactccaccgtaaagggcgatacgacgcatttggcactcgtattgccccgtcagctttcggcaggtgtcttctaccagacctccaagtggacgatgggtgtggattacgtctatcaggattggggcggccgtaacaggcagatcgaatccaccggcgtcagcggaccggaccggagcgcctttgcggtggcgtataccgatacgcatacgatcaaggccggcgtggagtacacccccaaccgctacgatgtgcgtaatttcctgaaacgctggtcctaccgggccggattccgctacggaacccacaaccagacctacaacggcgacaaactgggacagtatgccgtgacgctgggcgtcggggtgcccgtgaagttcctcgccatctcgtccatagacgtcggcgtcgaatacggccgccgcggttacaacttggccgaacgcctcggactggtgcggcagcagtatttcaaattctcgatcggcttcacgctctttgccggcagcgagaacggcgagtactggttcctgcggcctaaatacgattagtttttgacccgaaaatttgcacttttggagaaccggcagtaaattgcattggatttcggtagatccgacggacactaaaacatacaaaattaaatacaaaaattaatctctgaccgatgaaaaacgttaaaattctgctttccgctgctcttgtattcgtaggggcgacggctctggctcaggacttcagcgctccgcagtacgagaagtggggagacacgcccgaacaacgcgaaaagaacattctgaacagcaatttcctcaaggagtcgtgcgacaaccgcgactacaatgccgctgctcattatctgaatgaactcatcaacagcgttccgaccgcttcggtctcgttctaccagcgcggcgccgtgatttataagaacaagatcaaccgcgccaagagcgttgccgagaagaatacgtatatcgactcgctgatgctcatgtacgatctgcgcgccaaatatttcggtgaccatcccaagcagggcaccgctttcattctcgaccagaaggcgcgcgagtacctgcgctacaagcccagcgaccgcaagggtatccgtgaggcgttccgtgccgcgatcgaggccggcggcgacaacaccgatcccgaaaccgtcgtggcttatttcagcaacctctgcgacgactacaagaacactgacgaggtgctgcccgacgagatcatcgccgagtacgaccgtctgacgccgttcttcgagaagaatcccaatgccaacgagtacaaggcacagttcgacgccgcgttcggtctgagcggtgccgcaagctgcgagaacctcgaaaagctcttccgcggcaagctcgaagcggctcccgacgacgaggcgctgctggcgcaggccgtggcgctgatgtcgcgcgccaagtgcgacggcgacttctatttcacgctcgcagagaaatactatgccgtgaaaccctcttcggagaccgccatgttccttgcgcaggctttccagagcaagggcgattacgccaaggcgatcaaatacctcaacgaggcgcttgccgtcgagcaggatcctgcggagcgtcagctgctgctggtgcgcatcgcgctgatcgacttggttgcaaacgatatccccggagccgcttccgctgcgcgtcaggcccgcgacctgaatcctgaggacggcgtgccctattacgtgctggcccagtgctatgccatttcggcagccaactgcggcggttttgccggtcaggccactttctgggccgcttacgacacgatgtcgaaggccatcgaactgctgccctcggattcggagtacctcgaatccgccaaaacgtcgctgaatgcgttccgcagccgtttcccgacttcggaggagtgcttcttcaacgagctgcaggccggctcccgctataccgtgacctgcggtacggccgccggtgtcgtgacttccgtacgtccccgctaattaatgaacaggctcatcgcaagatacgccatggtagcactctccgttatggggagtgctatcttgctattctcctgcgaacgcgaagaggcggaggatgccgcggcttccgaagagacgatgagaaccgaatacagcgaaaacctgtcgatcgtcgaatcgaagaacggccgccgctcctaccatttcgtaactccgctggtcgagggctattcgctggcccgcgaaccctaccgcgagttccgcaagggggtcaagatcaccacttataaggacgattcgctctctacggtcgatgccgtgctgacggccaattacgccatctactacgagaaccgcaaattgtgggaggccaaaggcaatgtcgtggtcgtcaaatcggacggcaagaacctctacacgcagcagttgttctggaatcagcagaccaagaagatctattcgaacgtcgattcgaaaatcgtgcagaacgacggacgcgacgtatttatcggcgaaggtttcgaatccgacgaggagttcaaggactggcgtttccgccgtatgaaaggccgcatggaggtcgaggtcaaacccaccgaacaggaggtcgaggtcgttcccgattcgactgccggaggccggacgggggcgtcgggacctgtccctgcgcagcagtccggcaaaaccgccgctgcatccgccggcgagcctatgcccgaacccgctgtcaagcccgccgtcgctccggttccggcccggcggcccgttcgcagggatgcgcccggcagaccggcgtccgcaggggagcctgccgaagcccggcccagaacggaacagcagcagatgaagccggtggatctgaaactggacgatgacgagatacaatcaacccaataagagatgcttacttcggtcatactgattgtcctgatgctgttgctgtcggcattcttttcgggtatggagatcgcttttacgagcaagaaccgcctgaaactggagatcgaccgcaagcagagccgcatgttcgaccgcatagcggatatattctcccgccaccccggacagtatatcaccacgattctggtgggcaacaatatcgcgctggtcatctactcgctctacatgtcgctgctgctgcgcggtattttctacgcgctggggtgggagagcatcgcccggaacggttccgtggcgatcgaaaccgccgtttcgaccgtcatcatcatctttttcgcggaattcctgcccaagtcggtcttccgcaacaatccgaacttctattaccgcgcgctggcgccggtaatctatttcttctatttgctgctctatccgatcgcgcggctgacgacgctcatttcgcacggtatcctgcgtctgacgggccgccgcgtcgaagagcggacgacgacgcacagtttcgaccgcgaggacctcgcgtcgctgctcgacaccaacagttccgagccgcgtcccgaacccgacaacgagctgaagctgttccagaacgcgctggatttcgccgacctgcgggtgcgcgactgcatggtgccgcgcgtggacgtcgaggccgtggacatcgacgatacgaccatcgaacagctcacggcgcgtttcgtcgattccaagtattcgcgtatcttcgtctggcgcaagagcatcgacaacatcatcggctatatcaactcgaagagtctgttcacccgtccggccggtatttccgacgtgatgatgcaggttaatttcgtccctgagaccatgccgctgcaactggtgctgcagaactttatcaagcaccgcaccaacatcgccgtggtgatcgacgagttcggcggcacggcgggcgtcatttcgctcgaagacgtgctggaacagattttcggcgagatcgaggacgagcacgacgtgcccgacctgaccgaaaagcaggtcggtcccgacgagtatgtcctctcgtgccgtctcgaagtgaaatacctcaatgagaaatacggtctgggtatcgaggagagccgcgaatacgatacgctggcgggtttcatcatcttcaattacgaggggattcccacggccggcgagaccgttttcgtcggcggtctgcaggtgcgaatcctgcgtacgacgcgttcgcggatcgacttggcgcgggtccggaagttgtgagaatttttatggcataataagggccttttccgaataaatttactacctttgactgctaattcgaaacaatacgaataatttacaatttatatggcaagtttaaacactttacgcaccaagttcggcatcgtgctgtcgattgtcatcgcaggcgccctcttggctttcattctctccctgaagaccgaaatgggcttctcaggcaacgacccccgggtcggtgttatcgacggtgaaaagatcaactattcggagtattacaaccagtacgagcaggtcaaggcgcagagcggtgctcaggagagcaacgaacagcagtcggcgatgcttgccaacgctgcatggcaggccctgatcggcaaatacgtgctgactcccggattcgacaagatgggccttcgcgttaccgagcctgaacgtatgtcgatggtcagcggccagcatccttcgcaggctttctacaatgccttcgcggatccccgcacgggtgagtacaacgtcgccgccgttcaccagttcctctccgaggccgaagccaacgcgcaggcgcagcaggcttgggcgcagctcaacgagcaggcccgcatggagcgcgaggtcgccaagttcctcggcctgatcaagggcggtgtgtatgtcaattcgctcgaagtggccaacggtgtgaactccgccaacaacacctatgccggcaagtgggccggtaagaaatactcggccgttcccgattcgctgattcagctcaagtcgagcgacatcaaggcgtattacaacagccacaagaacatgttcaagcagacgccgtcgcgtgcgctttcgtatgtcgtgttcgaggtttctccgaccgacgacgacatgctggcgctcgaaaagagcgtcgccgaggtcggcgcgcagttcgccgccaccgaagagctgaagtcgtttgtccgcgccaaccgcaacggcaaaatcgccgacaactacgtctcggcgaagcagctttcggaagaggaggccaaggccctgctcgacggcgccacctacggtcccgtactgaagaacaacgagtggacgatggcccgtgcgctggataccaagatcgttcccgactcgatgggcatccgccacatcgtacttccctatacgcaggaggcgctggccgacagtctgctgaccgtgctcaagggcggtgccgacttcgctcaggtcgctgcgcagtattcggtttatgacgctaccgccgccaacggcggcgaggtgggcgtcatgccgttctcggccttttcgggcgaattcgctgcagcgcttgccaatgcgaaaaccggcgatatcgtgaagatcgcttccggcgacgccattcagctgatgcaggtttaccgtgccgacaaaccgtcgaagcacgttcaggtcgcttcgatcacctatccggtcgaggcttcggccgctacccgccgcgacatccacaatcaggccggcaccttctcggtgaacgccaaaggttcggtcgaagcgttcaacgacgccgcttcggctgccgccgttacgccgcgcatcgcgtcgctggcgcagggcgagcgtacgatccgcggtcttgaggattcgcgcgacgtcgcccgctgggcttacggcgccgaggtggacgatgtttccgaaatcttcccggtaggcaaggattatgtgatcgccatgctgaccgagatcgacgacaacgaattcgctcccctcgaaaaggtttcggcacagatccgtgctcaggtactccgcgacaagaagtacgactatatcgtgaaggagctttccggctccacgctcgacgagcaggccaagagtctcggaaccgaagtcgcagacttcgacaacgtgaccttcggggctttctatgtgaacggtcccggtttcgagcctcgtctgatcggcgctatctcgtctacgaccgagaaaggcgttctctcggctccggtcaaaggtctgagcggcgtatatgtcttcgaggtggacgacatccagacctcggacaagcagactgccgaaggcgagaaggtgcgtgcgcaggctatggccgagagcatggcgcagcagttctcggtgcaagctatccagcagatggccaagattcaggacctgcgcggaaaatatttctaaacccgattttcgagacataaaagaacgccggagtattccggcgttctttttgttatttttgcgtatatttaggagtcgtattaaaacttatcgcataccgttatgaataatttcatttatcacaatcctacgaaactggttttcggcaaaggacagatcgccagactcggcaaactgatccctgccgacaagaagatcatgattaccttcggcggcggcagcgtgcgccgcaacggggtttacgatcaggtcgtgaaggcgctcgaagggcgcgactgggtcgaattctggggcatcgaacccaatccctccgtcgagacggtccgcgaggccgtggctttgggccgtgagaacggttccgacttcctgctggccgtgggcggcggatcggtcatcgacggtacgaaactcatcgctgcgggtctgctctacgacggcgatccgtgggatatcgtgctcaagggacaggcggataaaaccgttccgctgggcaccgtcctcacgatgtcggctacgggttcggagatgaattcgggttcggtcatttcgcgtcaggaaaccaaggagaagtacgccttctacggcgattatccggtcttctcgattctcgatccggaaaccctctactcgctgccgcagcggcagatcgcctgcgggctgtccgataccttcgtgcatgtgctggaacagtacatgaccacgcccggccagtcgcgtctgatggaccgctgggccgaggggatcctgcatacggtgattgaaatcgctccgaaaatccgggagaaccagcatgattatgccgtgatgtcggagtatatgctgggtgcgacgctggcgctgaacgacatgatccgcatgggcgtgtcgcaggactgggcgacgcatatgatcggtcacgagctgacggccctgcacggactgacgcacggtgcgacgctggcgatcgtcatcaacggcaccctgcgcgtgctccgggagcagaagcgcggaaaactgctccaatacggcgaacggatctggggcattgccgacggttcggaagaggagcgcatcgaccgtacgctcgaagccaccgaaaaattcttccgttcgctgggactttcgacccggctttcggaggaggggatcggcgaaacgacgatcgcggagatcgaacgccgcttcaatgcctccggcgtcaagtacggcgaagcgcagaacgtggacggcgccgtggcgcgccggatactcgaagcgtgcatgtaggccgttcgcaccgaatttaagcagaggggctgtctgacaagttcccgaaattggaaatcacccctgccagagctttgtctgacggggtgaaattctaaaaatcggacttgttagacagctccttttgttttcggaggtgcgcttcgtgtaaatcggtcggtttttgcgaaagcggggaatttcgtcatcgcccgccttcccgctcttttccccgaacggataaaaaataccctccgggaaaccggagggtatcgctattgctttcagtcgctttagtcggcgagcagaatttcgagcatcttgatagctgcggtggcgatcggcgtaccggggccgaagatggcggcggcgccgtccttatacagctggtcgtagtcctgcgcggggatcacgccgccgacgatgacgatgatgtcttcgcggccgagcttcttcagctctgcgatgatctgcggcacgagggtcaggtggccagcggccagcgacgagacgcccactacatgcacgtcgttctcgacggcctgcttggcggcctcttcgggagtctggaacagcggacccatatcgacgtcgaagccgatgtcggcgtaacccgtggcaaccaccttggcgccgcggtcgtggccgtcctgaccgagcttggcgatcataacgcgcggctgacggccctctttcttggcgaactcggcgcacaactccttggcgcgctcgaactgtttgtcgtttttcacttctgaactgtatacacctgagatggaacggataactgctttgtagcggcctacgacgacttcgcaggcatcggagatctcgcccagcgaagcgcggaccttggcggcctcgacggccagctccagcaggttgccctgcttggtcttcacgcactcggtgatcgcggccagcgccttcttcacggcggcttcgtcgcggttggcgcgcagctccttcagacgcttgatctggctctcgcgtacggcggtgttgtccactgcgaggatgtcgatcggggcctctttttccagacggtactcgttcacgccgatgatcttctcggtgccggagtcgatgcgggcctgcttgcgggccgctgcctcctcgatacgcatcttcggaatgccggtctcgatagccttggccatgccgcccagcttctcgacctcctgaatacgctcccaagccttgtcggcgatctcctgcgtcagcgattcgacgtagtacgaacctgcccacgggtcaacctcgcggcagacgttggtctcctcctgaatgtaaatctgcgtgttacgcgcaatacgcgccgagaagtcggtcggcagggcgatcgcctcgtcgagggcgttggtgtgcagcgactgggtgtgtcccagcgcggcgcccatggcttcgatggccgtacgggccacgttgttgaacgggtcctgctcggtgagcgaccagcccgaagtctgcgagtgggtgcgcagggccagcgatttggggttcttgggatcgaactgcttcacgatcttggcccacagcatacgcgcggcgcgcatcttggcgatctccatgaagtggttcatgccgatggcccagaagaacgacagacgcggtgcgaaggcgtccaccgacatgccggcgttgatacctgcgcgcaggtactccagaccgtcggccagcgtgtaggccagctcgatgtcggccgttgcgcccgcctcctgcatgtggtaacccgaaatcgagatcgagttgaacttgggcatgttcttcgaggtgtactcgaagatgtcggcgatgatgcgcatcgagaactcagggggataaatataggtgttgcgcaccatgaactccttgaggatgtcgttctggatcgtaccggccagctggtcgagcgtgcagccctgctccagtccggctacgatgtagaaggccagcacgggcagcacggcgccgttcatggtcatcgacaccgacatcttgtcgagcggaatgccgttgaaaagcaccttcatgtcctcgaccgagcagatcgacacgccggccttgcccacgtcgcccaccacgcgcgggtgatcggcgtcgtaaccgcggtgcgtagccaagtcgaacgccaccgacagacccttctggcctgcggcaaggttgcggcggtagaatgcgttggactcctcggcggtcgagaaacccgcatactggcggatggtccacggacgcatcacgtacatcgtcgagtagggaccgcgcaggaagggggcgatacctgccgcatagttcaggtgctccatgccttcgaggtcttcggccgtataggcgcccttgacgggaatgcgttcggccgtcagccacggctcgacctgtccgcagcctttcgaggcgcagcagctcttctgctggcctgcgtcatatgtcagttctgaaaatttagctctcatgattagattcccatctctttaaggtagaacttaagtgtttccaagacgttcgacttcacgttgatgaagttggtgatgccctgcgcttcgagttcgggtgcgcaggcgggtgctccggcaaccacgaggatcgccttgccgccgagcagctccttgattttgggagcggcttcggcatagtcgtcgtcgctggcacagaccacgacgatctgggctttcgactccagcgcggctttcacgccctcctcgatcgacttgaagtaggtgttgtcgatcaccttgatgccggcgcatgcgaagaagttgcacgagaactgcgagcgggcgcgggccatgcccagattgccgcacgtcagcatgaatgccttcggctccttgccgctgcgatcgacatgcaggcgcatctcctcgaacgccatggcgccgcggtagggaacgagcacgttgccctcggcctgcttgcgcgtaacggactcggcggtgatctccttgccggcgacctccgtaaagttgggatactggttggcgccgagcagtatctggcggcgcgttgcgatgttcttgtccttggctgcggccgacgctttgatgcgctcggcgatgaagcctgccttgtaggcttcggtgtagccgcccttctcctcgatttcgaggaagagcttccacgcctcggcggcgatcgactgcgtgaggttctcgatgtagtacgaaccgccggccgggtctaccacctgatcgaagtgcgactcgtgcttgagtagcagttcgacgttgcgggcgatgcgcttcgagaactcggtcgggttttcgaacgatgcgtcgaagggcgtaacctccagcgaatatacgccgccgattgcggccgacatggcttcggtcgtgccgcgcagcatgtttacataggggtcgtatacggtctggttccacttcgacgtctcggcgtggatctgcattttgcaggcgcagttcttttcgggattgtagcccttgacgatgttggcccacagcatgcgtgccgcgcggaattttgcgatctccatgaagtagttggagcttaccgagaacgagaagcgcagcttgcgtgcggcttcctcgatcgtcagtcctgcgtccgtcaggcgtacgaggtagtcatggcctgccgaaaggacgaaggccagctcctcgacgatggtcgaaccggagttgccgaagatctgacccgatacggtcaccacgcggatgtgcttgtactctttggtcttgcggatcagctctgcgatgcgggcgaagcacttctcgccgttgggcgagcagaagtctcctttggtcgagaggcccttgaccagcgggtcgatgcagaacgcgatgcggacatcctctttggcgatgccctctttttcgatcttcgccagtacgagctcggctacgtcggccgttttctgaccgcagaaggtcagctggacggccggaatgcatatctcgccaagcagcgtgtcgaggtcggcggcggtgaaagcctccgacgcgatgcagaagccgagcgaatcgacgcctgcgttgaggatcttcagcgcctcggcgtttgcctccttggggcatacgacgcttacggtctgatgtacgcgccagcggttgtgtgcgcgtgtaccccgtacgtaagggaactcgcctgcctgcgagcccagaaacttgatgccttcgaggttctcggcgcggtagtagggacggacgttgaatccttcgcccgttttccataccagtttgcgctcgtaatcagcacctttcaggtcggccgtaatcacttcctcccacttctcggtcgggaccggcgggaattcggtgaacagcttttcacgtttggtatttgccataactatttagagattagtataagtgttgtttcaaaattgcttgtaaaggtacaaaattattaatgattgaaacaagaaattgttaataaaataacactatataatttctttttataatgtggtgcatttcgtttactttcgccagcgggttgaacggtcgatttcgtcggaggtgaaatagttgaaatatgttctttattgcttctgttttgcggaaaaaccaaaaattgcgatttttgggatttcggtgaaaaattgaggcgtttttccggaaaatggcgtgaaaattcgggtttgttgttgaaaaatggccttgtttttcgggaaatgttgaaaaaaaatcggtgtttttcgaaaaatagccgtttttgtaaaaacaacgtaacggaaaaataattacatttgcaaccagataacaatacatacggcggcgggggagaagcctccggttagttaggtcggagagagcctgccgcgaggcagttgtccgttgaatttcaggttaggttttagtttagcaattatttcggtttctcccctgcccgtatgtttttcggaacactaatccaattcagttgattatgtcatcattactcagattcaagatggtcgatgcggctataaaccacaccgccgtcgaggttaatgcccccgaaggacgtccgtcggactatttcggcaagaaggtgttcgggcgcgccgccatgcgcaagtacctgaacaaggcgacttacgaagcgctggtcgatacgatggaaaacggcacgcgcctgacgcgcgaggtagccgacagcatcgcggcgggcatgcggcagtgggcgctggagcacggcgcggaccactacacgcactggttccagcccttgacgggcggtacggccgagaagcacgacgccttcgccgatcccgacggctgcggttctgtgctggaggagttttccggcaagctgctcgtacagcaggagccggacgcgtcgtcgttccccaacggcggcatccgcaatacgttcgaggcccgcggctattcggcgtgggacccgacgtcaccggcgttcatcgtcgatacgacgctctgcattccgaccgtcttcatcgcctatacgggcgaggcgctcgattacaaggtgcccctgctgcgctcgatcacggccgtgaacaaggctgcgacggaggtgtgccgctacttcgataagaacgtgcagcgggtcgtgtcgtatctgggctgggagcaggagtatttccttgtggacgaaagcctgtgggccgtgcgtcccgacctgatgctcacgggccgtacgctcatgggccacgagtcggccaagaaccagcagctggaggaccactatttcggtgcgatcccgacccgcgtgatggcattcatgaaagacctcgaatacgaatgcctgaaactgggcattccggtcaaaacccgtcataacgaggtggctcccaatcagttcgagctggcgccggtctacgaggaggttaacctcgccaacgaccataaccagttgctgatgaccgtgatggacaagatcgcccgccgtcaccggttccgcgtcctgctgcacgaaaagcccttcaagggcatcaacggttcgggcaagcacaacaactggtcgctgggcaccgacacgggcgtgaatctgttcggaccgggcaagaccgcttcggagaacctgcagttcatcaccttcctcgtgaatgccatctccgcggtctacaagttcaacggcctgctgaaggcgtcgatcatgagcgccacgaacgcccaccgtctgggcgccaacgaagcgcctccggccatcatctcgaccttcctcggtacgcaggtttcggccgtactcgataaactggccgccagcaagggcgacgacgcgatccgtttcgacgccaagaacgtcttcaagatgagcggcatctcgcacatcccgacgctgctgctcgacaacaccgaccgcaaccgcacttcgccgttcgccttcacgggcaaccgcttcgagttccgcgccgtgggttcgtcggacaactgcgccgaagcgatgatcgtgctcaacacggcgatggcctacgagctgacggagttccgcaaaaaggtggatgccaagatcgaggccggtatgaagaaggagaaggccatttacgaggtgctgaaacagatgatcaaggcctgcaaggcggtgcgtttcgacggcaacggctattccgacgaatggaaggccgaggcgaagaagcgcggtctggactgcgagacctcgacgccgctgattttcgagcgttacctcgacaaggcgaccctcgaaatgttcagtgcgatgggggttttcaccgatgtcgagctggaagcccgcaccgaggtgaagtgggagacctacaccaagaagattcagatcgaaggccgcgtgctgggcgatctggcgatgaaccatatcgtgcctatcgcgtcgaaatacgaagccctgctgctggacaaggtctacaagatgtcgcagattccgggactgaatgcttcggccgacattgcgctgatcaagaagattcagtatcatacggcggagattcagcgtcttacgggcgaaatgatcgacgcgcgcaagaaggccaacaagatcgagcagatgcgcgaaaaggcgatcgcctaccacgataccgtgtcggttttcttcgacgagatccgccgccatatcgacaagctggaggagatcgtggacgaccagatgtggccgctgcccaagtaccgcgagctgcttttcctgcgctgatgcgctccatagtaaatagtattgacgtattgtgcgataatccgggcttgccgcccggattatttctttatctttgcttctccggaggctgcgaatagtgtgcggccgccggattgattataataagtatggagtatttgaagagttggtttcgcggattcgagcaggggattgccgatttgcagccgcagcagcgggaggtgctgttccgtgcgtgcgccgtaaactgcgtgcatggaggaccgttcggactctaccgcagtctgttcgaggcggcggagggggatttggaccggttttttgtgaaaatagacgaactggagggcgttcgtggcgaaatcgtgtgtgcgggacgggagtacaacctctgtttcgaggcttgttcctgtgccctgcaccgtgcggggtgcgtgaatacgccgatgttgtgcgaatgttcgcggcaaagcgtgctttacgtgatgtccgaactctggccggatcggaaattcggggtggaggtccgcgcgtcgatcctgcggggcgcggacgagtgcgtgctgaatatccgggtcgaatgacggaccggcatgtggccgccggggcggaaaacggttctgccggacgcagctctggccggtgacgcgtccgctacggtgcccggtggcggaatccggcccgcgcctgatattgtgccggataccgtgccgccggcgcgcttgatccctgcccgatgccgcgtccgctgcggaatcgtgatttcataacgcggataaccgttttttttgcatttattttttacttttgttttcatgaaaatcattgccgacagcggatcgaccaaatgcacttggctgctcatcgacggcgtgcatacccgcgaggtgcgcacgcggggaatcaatgccgtgcagcactcgccggagcagatacgcgaggcccttgcggaacttccgccctgcggtgcggccgaagccgtctatttttacggcgcagggtgcggacgtacgtttcccgacgcgacggcgaagatggtccgggcgctgtccgaacgtttcggtgcggagcatgtcgaagccgaatcggacctgctgggcgctgcgcgggccttgttcggccggggcgaaggagtggcctgcatcctcggcacgggttccaattcgtgctggtgccgcggcggcgaaatcgtggaaaacgtaccgccgctgggctacgttctcggcgacgagggcagtggcgcgacactggggcgcaacctcgttaacggtatcttcaaggggcatattcccctgcgggacgagtttctcgcggcgcacggactgacctatgaggagatcatccgccgggtttaccgggaaccttacgccaaccgttttctggcgtcgttcgcgccgttcgtccatgcgcatctggaccgtcccgatatcagggatatggttgcgaggagtttcgctgatttcgcccggcgcaacctgagccgttatcccgcccatctgcccgtggcgtgcgtgggcggcgttgcggccgctttcggggatttgctgcgcgaaacgctgatgcgctgcggccgcgaagtggtgacgatcgtccgctctccggcggccggattgacagaatatcattatggaaaacagaataactgaacaggcttcggcctatgacgatttacagcggatgtcggtgcacgacatcctgacgggtatcaaccgcgaagacgcacgcgtgcatgaggccgtgcgtacgacgattccggtgatggaacgtttggtcgggcgcatcgtcgagcgcatgcagcgcggcgggcgcatgttttatatcggtgcgggcacgagcggccggctggccgtcaccgacgcttcggaactgcccccgacctacggcgtgccgttcgaccgtgtgatcggcctgatcgccgggggcgacggggctttgcggcgggccgtggagcatgccgaggacgacatggaaggtgcgtggcgcgatatggcgccttacgctccgaccgggaaggacgtactgatcggtatcgccgcatcgggaacgacgccttatgtgatcggcggcctgcgcacggcgcggaaacacggactgcttaccggctccataacctgcaatcccgcctcgcccgtggcggccgaagcggagtatgcgctcgaagcggtcgtcggtcccgaattcgtgaccggctcgacccgcatgaaggcgggcacggcccagaagctgatgctcaacatgctctcgaccgccgtgatgatccggctgggccgcgtcgagggcaaccgcatggtcaatatgcaacttacgaatgacaagctcgtggcccgcggcacgcgcatggtggccgaagcttcggggctggacgagacgcgggcacgcgaactgctgctgcgttacggatcggtaaaaaaggcattggagcatgtaccggagtctgaatgaatatatcgcgcggctggagcgcgagggtgaactggtccggatcggggcgcccgtatcgcccgtggaggagatcgccgagattaccgaccgcatctccaagacgccgggcggcggcaaggcgctgctgttcgaaaataccggcacggcgtttcccgtgctgacgaatctgttcggctccgaacgccgcatggcgctggcgctcggcgtcggaacgctcgatgaactttcggagcgtatcgacgtcctgctgaagcaggcggccgcgccgcgcaattcgctctcagacaaactgcgcgccctgccgatgctggccgagatggcgcgctggtttccccggaccgtgtcgggccggggcgcgtgccagcaggtcgtgctgaccggcgccgaggcggcgctctccgcgcttccgatcctcaaatgctggcctgcggacgggggccgcttcgtgaccctgccgatggtcaatacggtcgatcccgaaacgggcgtgcgcaacgtcggcatgtaccgcatgcaggtcttcgacgaccgtacgacgggcatgcactggcatgtccacaagaccggagcgcgccattacgacgcttacaggcgtctgggccgtcggatgcccgtttcggtcgcgctgggcggcgatcccgcctatacctacgccgcgacggctccgatgcccgacaacatggacgaatacctgctggccgggttcctgcgccgtcgtccggtgaagttggtgaagtgcgttaccaacgatatatatgtccctgccgactgcgacttcgtgatcgagggctatgtcgatccggccgaagagaaggcggccgaggggcctttcggcgaccatacgggcttctattcgctcgaagaccgctatccgcgtttccatgtcacggccctgacccgccgccgcgatgcggtttatccggctacggtcgtcggcatcccgccgcaggaggacgcatggatcgcccgcgcgacggagcggatctttctcgccccgatccgcatggccctgcagcccgaagtccgcgacctgacgatgcccgaagccggtacggcccacaacgtcgccgtcgtttcgatcgaccgccgttacgaggggcaggccgtgaaagtcgcccagtcgttgtggggcgcgggacagatgatgttcaacaaatacctgctcgtcgtgccgtcggggaccgacgtgcgcgattccgatgcgctggcgcggttgctgcggcggatcgatcccgtgcgcgacctcgttcgcagcgagggaatcctcgatgtgctggaccatgccacggcgacgcccggcttcggcggcaaaattgcaatagacgccacggcggccggccttgcgccggactcggcgtcttctgcgcaatccgcgccgcggctgccggagggctgccgcaccgatctgctcgaaaagtggggcgcggcgcttgccttcgccgaaccgggggccggggttcgaacccctgagggggtgcgatatttcgtgctgttcgacccggcggcggcggaattgacgcccgaagagctgttgtggctcgcggcggccaataccgatccgcggcgcgacgtgcggacggagggcgcgacgctcgtgatcgacgcgcggagcaaacgtcccggcgagggcggcaatcctgtgcgtttccccaacgtcgtgacggcgtcggaagcgaccgtcggactggtcgaccgccgctggacggagtacgggctgggcgctttcgtggaatcgccctcgcggcgttaccgccgcctgctgctctccggcggtgcgcagtggtaggttccggcctttgccggagggtatgtaaatagtctctgcatatgggaaagttttttacagaacgtgagattcgggccgtggcggtttttctgccgctggccggactgctggtgctgggcctcctcctcgtgcgtccgaaagccgatcccgcggcggccctgcgggctgaagccgaaatggaggagcgggccgatacggtcgtcatgcggccgttcgatccgaacaccgtagattacgacggcctgcggcggctggggcttacgaaacacgaagccgtgagcctgctgaaataccgcgccgcaggcaagattttccgtattcccgaagatgtgacgctctgttacggcatcagcgattcgctcttttaccggctggaaccctacatacgcatcggacgcaagtatgccatcgctccgcaggagtaccgcacggggcgcgtcgtctccgagccgatgccgcctgcgccgttccgcatcgacacggtgagcgcgcgttacctgcgggccatcggcgcattgtcgaaacggcaggccgaagcctttgtccgatggcgcgacctgagcggcatttatgacatggaggagctgcgggcgtgctatgtggtgagcgattcggttgcatcggcgctcgaaccttacgtcatcttccccgaacgcaaagcggaaccgatcgacgttcccgtcgagatcaacacggccgattctgccgcgctgaggagcgtggcgggcatcggcgagaagacagtcgtctcgattatcggctaccgcgaccggctcggcggattcctccgcgtggagcaactcgcagaggttccgggagtcacggaacgcaattatgagaaaattttgaaacaaatttactgcgatagttgtgaaattcggaaaattgatattaactttgcaaccccgaaagagttgggccggcatccgtacattccgccgcagacccttcggaaattacttaaacgaagacagttgaaaggaggttggagtaccgcagaggaattgatcgaagacgacataatgacccgcgaggaggcagcacggctggttccttatctgcggttcggtgcccgaagcggacctgacgacgagtagacgaagcgacattgcaagggaaaaggtatcggaagatatgcgtcccggaggattttaagtaaacgaaagaattaaaaaaacaataaaaagtagaatattatgattatcatgccggtaaaagagggcgaaaacatcgagcgcgccctgaagaagttcaaacgtaaatacgagcgcacgggcgtcctgaaggagttgcgccgccgccagtacttcaccaagccttcgatcgcgaagcgcgtggcgaagcagcacgccatttacgtggagaacatgtaccgcgacgaggactagtcctccggtgttctgcaccatatacgccccggcccgaaaggaacgggattaaaaagctgtaacgattcgatttatcgggtcgttacaacttttatataggaaaacaggtaacgagaaggtaacggtttattttcagcatcttgcgctcgaataccgcgtttcaaataactaattgcaagatacgaaaaaaatacggatttgacaaatttgctaaaaagggcggtattctaacgcatggatatttcattttctcaagcatacaaagtttttgttggaagaaatagaacaagaaattatcattagtgtcagaacacaaaatgctcgaacagttttatgtgtcagttatgatgaatgagaatcatcgagacagaaacaatcattaacttattttcttcctctcaaagaagagttcgggcaatatgatctttatctcttttgcaactttctcgctctgccagtagacaatgaaatttaccattgcacgttttaattcgtacccttgcctatgtagcctttcataatgttccgacataaaatttcgagaaaatttcaacacggattgtccatttccatccaagcattcgtctcccctgacatacaaagtatcaccgcttctgagctgagcgatctgcggctgtcgattaatgaaataatccagccatatatcactatgggtcaaatgtattgccaattcttccggcggcagatagtcatttttaccttcaatatgctcaacagcttctgaggataggccgtcgagaaaatcagaattcaggtgaattgtcagttcccgtcgtgcccttgtcatggcaacgtacagttgtcggattctttcgtccgagaacaaattgaagttgttcagcatcaaaaaaacatgatcgaactctttgccttttaccttgtggatcgtcgaaacgaatatagtctctccgttttcaccgaagaaatcattcaatttagactctctgataaaaagctccaaatcggacttgtatcttcttttaggatttatcgtttcaaaatcccgaattaaacccaaacaattttccagtttactactgttctgaaacacggtttgcaactccttcttcgcctgatcccatacatcatcgtcaatcaggaaaatatcttccaccgaatgtaaccgggaaagaaaaaaattgatttcatcgagtttcaacaagcagaatccgctgttatcctgaatcaactgtgccggcatcccgtttttaagcagaagccctgacacctgcaatgcctcgtcattcgtatacgtaagcacacaaacgcttccgcgaagttcggcggatagaatatctttcaccagcggctcaataagattttcactcttataacgaaccactttaatttttccgttatcagcctgtttggcaataatcggattttctttcagtcgatgatgaatgcgtgcaacgaattgattcgtgaaatcgacgaggttgcttttgctgcgaaaattctcaaccagttcgtatttcatggctccgtattcccgaataagccttttgaaatattggggactcgcatgccggaattcataaatactttggtcatcatccccgactgcaataatccgcatatcgtcgttatgcctgataagagcttcgatcagtgaaaactcatcttcgttcatatcttgcgcttcgtcgatgacgaatacattttttgtaatgcgactcaattccacatcccctttttcgatgcgttcgacggcgcatttcaaaacattgtcaactctttccagactgccgatctgccccagcagatcgaagcaataggaatggaaggtctttatttcgatgaaattagcggcgttgccgatcagtttgagtaaccgctttttgaattcggtggccgccgcccgtgaaaaagtaagcatgagcaactgttcgtgcttgacatcctccatgagcatcagggatgccaatttatgtaccaagacccgcgttttaccgcttccgggacctgctgcaactacgatatatttcgattcctgatctcgaataatctgtaattgcgcgggagagagttcgccgaaaagttgcctgtatttagccggagtgatattcctttttatctcagattgccgactgcctttgaaatacaaattgagaaacgacgcataattcaatgcgaaataatcgtccacaaatttcagcgcatcctccgaaccggcaatcatcttttgggcatattcgccgacgatatgaatttgctgaattttgttttcatagaaccgcaggagcttctggtaatcttcgaatttgtagcgtttcttgttgtctttttcaagccgttcgatcgtcagtctgttgtagacgaccaagaagccgccctcgattttgagcgcctcgattcgggaaagatagaataacgcgtcttcgacctcttccagagagatttttcgcccgaatgcttctatcgatctttcgaaagcgtctttcaattcgagaactgagaattctacgaaggcctcctccttgtctgccccggtatcttcggtgcttctgtcataaagaaatccaacgatgaatttcgccaaatcatggcgcaacttcattttttcccggatagtctctttcggctgcatccatgtgatcagtacttgatccttggaaaacgccggacttttacgcttgatccagttctttatcgcccaaaaattgagtatgacttttatcttgttcagggtgatatttatctctttcagagccgcatcgtgtgtcgcagccacggcttttccgttgatttctttcaggtagaagactttctccggattgtcgaacatgtcaagcaggaaactctcagtccaacaagccgccgttacgatcagaagagaccgattgcggaattcgcttcttttgatgaatgccgtcaggtcttttgcatcggccaaaatctcctcttcacgcatcagattcacgacgcttatcacctcttctttcttgattcccagatggtcgctgatataatcgatccgcgattccgctacctcgtcatcggattgcttgcgacttctgctcgaaaagagcttcttgataatccgcacagcatattcctgccgtttcccgtcgaaacgtgcggatgttcgtattttctcaatcgcctcctgagctgttttcgaccgaatgctgttggcaaagactcgcggcatattctggccgcgtttcagatagccggcatcttccaaggccgagattgcggtggttacccgagtttcgatttccggaacgttgtcatcccaccctgctttgcgtgcaatctccaatgccgaattcgataccgtggaacggaatcgggcaagttccttaatcgccttccaaacctgctgaatctctttgaaggagagtttggtctgattgagcagaacaaagtgtttattcaaatcgtcttcattgaacaagacataacactccgcgtcgatgcgttcgttacgtccggcccggcctgcttcctggatgtaattttccaatgaatcggatatgtcgtaatggatgaccataccgacatcctttttatcgacgcccattccgaaagccgatgtcgcgaccataatttgaaattcaccggctataaaggcattttgattcgccgttttctcccggatgtccatcctgccatgataggctcgggccgggaatccgtcccgggtcaaacatctcgccaactccgtcgcccgatgcgtccgcgatacatagacgatcgtcgggcaactcttagcttcgagcaagcacctcaaagtctgatatttctgcgccgcatccgtctgggccaatactttgaagtgcagattcgtccgggaggctttcgaagcgaacacttcgaattcgagcgaaagtttctcccgaaaataacttcggatgtcctcgatgaccttttgtttcgccgtagctgtaaaacaagaaacgggaatcggctcagccatattcttcttttcttgaatcgatcggataaaatcgccgatatacagataatcgactcggaaatcttgtccccacgcagaaaaacaatgcgcctcgtcgattacgaaccgcacgacattccgtcccagaatcaaccgttcgatcgttcgcgaacgcagcgattcgggagaaatgtaaagaatggaagccgatccgtcttccacccgttcgaacgacttcgccctttcgatcggattgagcaaaccgttgatggtaacagcatcggtaatctcggctttttccaagttatcgacctgatctttcataagcgattgtaacggcgatattacgatcgtcaaacccttggcgttttctccgctcatcagggctgggagttgaaacgtaatcgactttccgccgccggtcgggaaaacagccagcagggatttgttatccacagcggcccggaccgcatgctcctgcaacggttcgccggcatagctccggaaagaatcgaatccgaaccagcgtttcaatcctttatgaatatccagtgcgctattgcagtacgggcaaccttcgacacaaggagtattgcgcagccggaacatgatgcgctcgacatgcggataatttttcaagacccaaggcggagtaatggaatgcgttttccgataacgcaccagagaatcgatcaatgacaggcaataagccaattcaatcggatgctttgcgatcattcctgccaagtcggcatgtatgcagatttccgcttcgaatttctgacggatcaaattttcgagatcttttttttcagaggcataagaaataaaacggaaaaaagcctgaaactccggcgtatcccccagcaatccgaaaaatatttgtttaagaagatcgtctttccgctgaaaagccgcaatttcgtcgtggaataaatgccgggctttgactgaatcgttcaacgggttattggcctcgtccacttgcagtttgtcgtctttcagaagtgcatggtaaggtttcgttggaaaaagcaacggagagagaggcaaggtatcgatggcatcggccggatttattccagcggcctgtaaagcacctccgatgtattttatatcatgtttgaggatattatgtccacaaatgaagtgtgtgccgctgagaaacgatacgaactccgaaaaagattttttgtggaattcgcatccgtcgcttctaacaccgccgatatcgagtatttgtcggctcctcggttcgatctcagtatcgataaatgcaatcgggtatttcattttacgaattttgtgatatcatgcccgtccaactaaaagcaaaaactcaagtttatccaaatatagtgaaaatgattcattttacaagatgtagacgtcctgtaataaataatttattgtacatttgcgatataactactattcttactttatgaaattgcgcctcaaaaaactccttaaaggagttatcgtttcatccatggcgaccttggctaatacctacggagccgaagcaatgccgacctatcagttttcggacaatccgtccgatgatgccatggacgagtatagcaaatcgtcgaaagacggaagtatcaaaatgttgctgcacctgaattcggacgatacctatgcgttggcaggacatcgaagccacagttcacatcgcagtcatagctcgcacagatcacacagttctcatcggtcggggtcgtcccattattcccattattcgtccgctactacatccggaaatacgtcatcctcctccgtatcgccagccaattataccctcggatcgagaaccctctcaatgaacacctacggggcggatgtcaaagcactgaccgatttattggttaagcacaaatatattgcacgatcagctgtcggtacgaattatctgggttatgtagtctatgatgtggatgtcagaaatgccgttagggctttccagaaagatgcgggtttgtcgcaggacggtattgccggaaatgccacgattgccaaattgcaaacgtgggttcccaaggtttacaatctgggagaccgggtattgaaaaaagagatgcggggcgcagatgtaacccaactgaaaaatatcttgatcgacaagggattcctcgaaaaaccgtttgtcaagggtgaaacactgttcgacgctgcgattgaaacggcgttgaaaagatttcaggatagtatcggtatcgatacgacgggaaaagtcgatgcgcaaacgttttattttctgaaaaagcaaaatgatcgacattgaattgaatccgcaaggcgacgttgtactcaacgtcgacaagtcaatttacgacgaatccgtcatcgataaagtcctttattggtgggcgggcgattatgtaatcacccggcgaaacaccccgggtacgagcgttcaaacgattatcgtctcggcttcgaatccgatcacacaggaggcattcgataggatacgaaagaaactgagcgcagattttgtcgattataaaaacagggcgctcatcgcttcggaaacccgagacctgcggaacattctttatgccaaggctttcgccaacagcgacgattttgtcgagttcgaattcaaagattgacgatgtattacctgctgccgttccggtttcatgttttccgcaatcaggaattgctgactaatgaccttggggactacctgctgttgccccgcggcagcgtacaacgcatcgtcgatcggaaggtgcttccggaagaggaattgtacaagaatctgacagcttcattttttatttgcgaaaaaccgttgccccggctgattgacacgatggcgatccgtttggctacccgcaaggcatttctcgatcattttactgcgctgcatatctttgtgctgacacttcgctgtaaccagaactgtatttattgtcaggcatccagtcaggaaagttgccggaatgagtatgatatgagcgaacagacgctcctgcatgccgtcgatctgatgtttcgttccccgtccccttgcctgacaatggagtttcagggaggcgagcctacgttggtcccgcatctcatccgccgggccatcgaatatgccgaagagaagaatctgaccgaaaaccgcaaacttacctatgtaatttgtaccaatagtgtcaatctgacggacgaattgctcaatttgtgcagacaatatggcgcagttatctcgacttcgcttgatggcccgctgtacctgcacaaccacaaccggggaaaaatggacagctatcagcgtgttgttgccggtattgcaaaggctcgcgaagaattgggtgaagaccgggtttccgcattgatgacgacctcggagtattcgctcggctttccgcgggagattatcgatgcttatcgggaaaacggatttcacagtatcttcatccgggcgctcaatccttacggactggcgaaagacaatgccgattggactgcttattacgatcgcttcgttgagttctacaagcaagcgctggaatatattatcgaactcaataaatcgggagaggtgttcgtcgaagagtttgcgacgcttattttgcgtaaaatcctgacaccttttccgatcgggttcgtcgacctgcaatctcctgcaggaattatcaacggcgtaatcgtctataactacgatggatatgtctatgcttccgacgaatcccgaatgctggccgaatttcgggattatacattccgggtgggatcgccacggtgcgggattaaagtaatgtaacgacttgatttatatggtagttacatttttgtataggagagtaggtaacgagaaggcaacggtttgttttcagcgtcttgcgctcaaataccgcatttcaaataacctatcgcaagatacgaaaaattttcgagatgggcaaattaggcaggggcaaccggcgagtgcaattttaagaaattagtttaaagaacttttttagacgaagaaaattttaattttcccgatgtcttctgttcattgtattgcacttgtttaataaactcttccgttaacacaaagaaatctgccccattcagtatatattgcctgatggtttattctgattttcaattgccccttttctgtcaggggaagcatatgaatcgacaaaacatacttttgtaccgatagtttttgcaattttcttatgacaaaagaattcactgccatggtcgctgtgtcgcaatggtcggggacggcatcaacgacagtgcggcgctggcgcaggccgatctgggcattgccatggggcaggggagcgacattgcgatcgacgtggagaaggtcacgattctttcgtccgacctgacgaagatcgccgcggcggtccgcctttcggccgcgaccgtgcgcaccgttcggcagaaccttttctgggcgtttatctacaacctgatcggcgtgcctgtcgccgctggcgtgctctatccgctgaccaggtttctgctcaattcgatgctcgtcggggccgccatggccctgagtagtgtgagcgttgtggccaatagcctgcagctgagtacaaaacggctcggcacgaaagccgtccataaaataaatacagaatttataaccaaaaaacaaacagccatgaaaaaagagtatcgtatcgaaggaatgatgtgcaaccactgccggatgcatgtcgaaaaggccctgaacggcatcgaaggtctccgtgccgttgttactctcgatcctcctgccgcgacggtcgaattcactgggcgggagccggagttggccgaattgcagcgggtgctgggcgaagattataagatcacggagcgttgaaaccccggtctcggagcggccgctatccatctataaaggtattgcggctcctgaaaacccctaaaattaggtattgccgttcccggcgtaatgtcgtttctttgtattactaaaatctgccgagacgctgcgggacggcccgttgcgccgaatgcggaaaacgaagaaaaaattcaaaccgattatgagacatttcgtttattgtgcggcgcttgcagccgccgtatttttccttgctgggtgcggcgggaacccgaataaaaagaacgcttcggagactcaaacctcagaaacgcagagttctgtcatggaggtcgataacctgctcgccgatgctgagaagttgaccggcggcaaggtgacggtcgagggcgtctgcacgcatatctgccgccacgggggccgcaagattttcctaatgggaaccgacgatacgcaggtgatccgcattgaagccggagagaagatcggcagcttcaagcccgaatgcgtgaacaacgtcgtgcgggtgacgggcacgctggtcgaagaccggatcgacgaggcttaccttgccgagtgggagctgcggctcaaggaccagatcgcccggcagcacggcgagggcgaagccggatgcagcgccgaacagcaggcccgcggcgaatcggttgccagcagcaccgaaaagcgtatcgccgacttccgtgcccgtatcgccgaccgcaaagccaaagaaggcaaggaatacctttcgttctaccatgtggacggcgggagttatgaagttttgaaataagaagttttgcacgtcatggggacacggtcgtttatgtccgccgtgaggaaatggagcaggcctgttcaccgcgacctctcctttttcttttcgggcgtactgctgatttatgcggtttcgggcttcatgctcaaccacaaacgcgatttcaattccgattattcggtgcgccggaccgagctggtcttcgcacaggagataccgcgcgccgagcaggagtggacccgtgcgcgggccgaggaactgctcctgcgcgtcggcgaggagggcaattacctgaaacattactttcccgaaccggaccagttgaaagtctttatccggggcggcagttcgctgacggtcgatctggcgtcgggacacgccgtctacgagtcgatccgcaagcggcccgtgctgagcagtctgaaccggctgcattacaatccgtcgcgctggtggacggtcttttcggatgtctttttagcgggattgatcgtaatcgtgctttccgggctggtgatgatgcgcggcccgaaaggattgcggggccgcggaggcgtcgagctgatcgcggggattctgattccgctgctgtttattttcctgacctgatccgggaaactgcgtgtgataaaagggcggccgttttcgacggccgcccttctcttccgtatgggtttgttgtcatcgttttgccgtgccgaataccagcagcgggacgaagaggaagagtccgaacaagacgacgccgacggtctgccagagccgtccgccgggcgatctgcggcggatgagcgcatagaacgcgccgagcgcgagtcccagccagagggcctgaaacgacacctccgcaatccggggctttacgtagccgtccagcggcgaggtgaacgacagttcgaagggaaacaggtattttgcgtactcggcccatgcctgcggtttctcttcggggcggtattcgtccgccagtgaatagtcgcgggcgttcacggcgacatagcgtttcgattcggcgccttggatggtgaccgtccagtagaacatgtcgccgatgatcatcatgttctcccgtgtggggccgaatttcccgacgggaatctcgtgcagtttgtaatcctccgcaccgagcgtatagaaacgcttttcgctgtccaccagaaaaccgagacttttgcggtcggcgaactccgtgacgaaaatctggccgatttgcagcgagtccgcaacgtcggtacggcgcacgaacgggcggccgcggacctgcttcatgtggtagacgcgctgcgcgtcgtccaccagcaggtagccgttgtcgtaccgcttgcgcgtcgaggggttgccggagacgacgcgggcggggaacgaaaatcccttgtcccgcaggactttggtgaatgccgcgctcttcttttggtcgatggtgttggtctccatatcgacgaactcgattccctcgccggtgatgcggaacacgtccgtcgccggttctaaatcgatgcggtcgggcatcgattccagcagttgatagaccgtcggtctgcggcggttgatttcgccgggcgacgtgcggaacatgaagttcgtgcgctccacgtcgcgcgattcgaccgccacgccctcgatttcggacggaaacctcccttcggcggcgagttggcggtaatagaacgtcggcaggatactgtcgaactgctgctgggtgtaggtgttgccctgcagatcgcgtccggcgacgttgttttcgcggtcgaaatccaccgatgcgaatccgtgcgtcacgcagctgtagagcgtgaacggcgaccacgaaggcgatgcgaacacgaacgcgtagcaccacggcagcagccatgccagcagaagcgccgcaaggaggattattccggttttgatactctttatcatagatttgtcgttttgcgggttaatcctgacatccctgcttgaaacggtataccgaaagcagcgggaagaacagcgaacataccagcagcagcgccagccacggcagcatgccgtcgtaggcctgcggggtgtcggagaggaagaagatccggcagacgcccacggcgatcagcagattcgccagccgccgttt

SEQ ID NO: 12068 - DNA, 443 bp, Unknown
  gut microbiota DNA sequence
atttgaaccttaattcttacttgcggattaaagagattctgttgctggcttcacgcttgttgctgtccacaactttcatgtaccgttgtgtcgtggtgatacttctatgtgccatattactttgaatggtacgtatgtctgtgccggctgctccttgaagtgttgcgtatgttcttcggtaggagtggaaagtgatattcttggttataccagcttcgcgaatccactctttcatgggatgctgtgtccaacttcgtttcaatcctttaaatactaatccggttttttccggagaatagccgattaattgcagggcttcgtcgctgattggaatgatgtcctctgttttggtcttttgggtaattgtatggacacatttccctccggctgcaaagtcaacgatttcatgccattgtaacgatagtatatcgctgattctgaga

SEQ ID NO: 12069 - DNA, 147945 bp, Unknown
  gut microbiota DNA sequence
attttttttaatgcggattcaagagctgagggagttgagtttcaaactatcttatctgcctctcgtttatccgacattttttttatgcgtctttctgtcgcatcggtcgttttcgtttcgggtgcttgaaaaggtagggattaggggatgcaaggtttttcgggaaaaatactacccgcagggctggagattttttccgaaaacaggaggcttgaccttgcattcccgtccaatcccggaattacctttgcgcccagaacggaaatgactgcctgatgcggcgtcactgaaagacgcgaaaatggaggtaaacggaagtggaggcagattagacaggaaaacttcaaaagagaaatctgtgaaaaaaagaaatccccaaaaggaaaaaaagggacatagccggaagcgtgaaaccgggcaaaccaccggcaaggaagtatgattttatatgtctggccgagcgtgtccggtcggacatataaaatcattcttcccggtttgcctgccgtgcataacggcttgttccatttatggatcgggcggtcagacacggctttccgcttacggctcaaaggaacagcgaaaaagaaatcgtctgcgaacccgtaaaagcacctctctggcataagcacaaaagaaatgggccttgcatcatcagtctaaactgttgtttaggcgtgaggcaaagcccttttctccgcttatgcggcagtcggcatacgttcatccaaaattcttttgggcgatggtgtgccgacggataaaacagcttttacggaaaaacttgtatgagatagaaaaaaaattagggagattcatttcaaaatctcccgttttattgttacttttgcatatgaagagttctttgaaggttacgcaacgcgcagaaagatgatgcagtagataactaactaaatcgtaacctattactatcatgagcaattaacctacgctcatttccaatgaattacactcttttcgtaacttctccatgcaaggaaaccatgccgtcatccggatgtcacaggattttccatccgctttttcctcgaaccgcgatacggagagcgatgccgtggaaatatcagacggagaacgtaaaagaaagggcaacatgcaatttcatatgaaaatcaaaggcgctgaaaaatggcaggacaaagaattaataatcatactatataataatacgaatcaatgctttgttcgtctacatggagggtacgcgggagtcaatgtcataaacttcaaagggcatatttacccaatggcagaggttatagaaaaaaacgaattgcggtaaagacgtctgatttacttaaaattatccatcatgaaaaccacactgagaatatccgctggaattatgctgatcatggctttagcaggctgtgcggcgcaaaagggcgggaataacacagttaaaagcacagcggaagaggtgctttacaagcaggcgattcaggcgctcgatgaacgaaaattcattatcgaagcgaccgagttttactttcccggcggcaagtacccgactaaatcggagactaacagccagatatccatggatggcaataaagctgttatccggttctcgccggacctttttccccggtcccccatggaccattggaatatagaggacgatgccgcagaaataacgaaaggcgaacataaaaaaaacggcgacatacagttttgcatgaaaatagacggtgctcaaaagtggcaggacaaagaactgataatcatactgtataaaaatacgaatacctgcttcgtgcatgtcaacggaggatattccggtcataatatcgtcgatttcaaaggatacgtatacccgctggcgaccgaatgacacaaaaccgggagaccttttcaaagggtctcccggttcgaataacataatcgtcggaatcagacggttttcagcacttcgagcagcaggtcccagaatttgggaaccgtggcgatttcgagccgttcgtcgggcgagtgcacgccgcgcagggtcgggccgaacgagaccatttccagttcgggatatttttcgaggaacaggccgcactccagtccggcatggatcgcacggaccttgggatcggcgccgaacagccgtttataggcatcgaccgtctttgcgagcagggccgactgcgggtcgggcgtccagcccggatagccgtcggagtgagcgacatcggccccggccagcgcaaacaccgattcgaccatctgcattacataggtcttggcgctctcgacggacgaccgctgggacgaggtgacgacgatgcggtcgtcccccacgaatttgaccgaagcgaggttggtggaggtctcgaccagccccggcacggcgaacgacatggcgatcacgccgttgggcacgcccaccagcgaatagaccagtccgaactgcgtccgggcgtcgagcacccgatcgacctgcggcatttcgttgagcgtgatcttgaagttgggttcgcgcagacggaactcggcttcgagatcggcggcgaaaagtttatagtgcttggtgaattcatccttgaaccggaccggaacgccgaagatcgcataggcctcgcggggaatcgcattgcgcaggttgccgccgtcgaaccagctcagcttcagctcgtagctctgcatgccgtcccacaacagacgtgcgacggtcttgttggaattgacgcggcccttgtcgatgtcgtcgcccgaatgtccgccctgcaggtccgagacatcgacccggaagaaggcgtagtttttcggagcctcctccatcgtatagcggaacgtggcgaccgtgtcgatgccgccggcgcagccgatgaagatctcgccctcgtcctccgaatcgaggttgacgaggtatttgcccgtaagcatatcttcgcccagctcgaaggccccggtcaggcccgtctcctcatcgaccgtgaagagcgcttcgacggggccgtgctccacggaggggtcgatcaggacagccagcgcggcggccatgccgataccgcagtcggcgccgagcgtcgtgccttcggccctgacccacccgccgtcgatgcgcgtgcggatcgggtcccggtcgaaatcgaactccacgtcggagttcttctcgcagaccatgtccatatgcgactggaggataaccgtcggacggttctcgaagcccggcgtggcgggcttgcgcatcaccacgttgccgatggcgtccttcttgtattcgagattgtgcttccgggcgaaatcgaccagaaattcgatgatcctgccctccttcttcgaggggcgcggaacccgtgtgatggcgtcgaactgctcccagacgatgcggggttccagattggtaattgctgacatatcctatgataaattaaagtccgttctcccccgccggatttccggaacgttctgcgaatccggctctgcagagcgagggtattttttacaaagatattaaaaacagcgcaattcgcggtatctcaggtcctgttttttgcagcggaaacgcggcgggcaaataaatttgcttttacatgccggttcgattatctttacgcaaaaaaacggagagcatatgaccgatttcaggataggacacggatacgacgtgcatgcgctggcggacggcctgcggctggtactgggcggaatcgagattccccatacgaaaggatgcgtcgcgcattcggacggcgacgtggcgatacacgccgtatgcgatgcgctgctgggcgccgcggcgctgggcgacatcgggctgcacttccccgacacgtcggacgacttcgcgggaatagattcgaaaattctgctccgcagggttgcggcgctgctgcgcgaacggggatacgaaatcgggaatgtcgattgtacgatccggatgcagcggcccaagctccggccccatatcgacgcgatgcgcgccgcaatggccggtgcaatgggcgtaggcgatgaccgggtgtcggtcaaagctacgaccacagagcatctcggtttcgaagggcgcgaggagggggtttccgtctcggccgtggcattgatctacaaaagctgagccaaaacggcttggcgaataaaaaaacggagcggcttttcggggccgctccgcctgttccgggattttccgccggcgtcagtctatccgccggaacttcggatcgcccatccgtttgttccacaaccagccgacgtaacgcatcgtaacgtcgggcgtcagcagcgtcagcaccgtctcgccggtagccgtcgaaacggcgaaatcggcatgatagaccgtattgccgtcggcgacatcgaacgagatgcaccacccccactgcaggcgcgcggcctgataactgcggatcgacatcgagtcgaaattgagcatttcgacgtattgcgtaacgccccgctcggtaggcaggtgaatctcgacgtgatcgacgaacatgccgaaaaagaagtagtcggcatagatgctgcggataaggccgccgggaatctcctgcatgctgttcggaaagaacatgtagtcgcgcgactgcaccagcgagtcgatcttctgcgcataaagtctggcccggtaggcccggcgttcggggcgggtcatgccgcgggctgggtcttcatagaccgtcgtatgctcgacgagctgcacgggctgctgctggacgggaaccacggtcgtctgcggcacgctgtccacggccgaagcgcccagcgaaaactgcggggaggacggaacctgcggagaggatgaagcttgcggagattgggcggctatttgcggggacagagcagccacctgcggcaacagaacagccgcttgcggggattgggcggcggcctgcatcagccagagaagagccgccgcgcagaggagcgtccggcctgttttcaaccgccgcaggacaaaagcccccgccgaagcgggggtttctgacagcggactgcattcctgcggttccggcaccgcgtccggcgtgcggcctttcgcaggatgccgccggaaacgctccggacttgccgacacggcggcgcggcgcactgccccgccttccggcgacggggtgcggaaccccgtccggctttgcaacccggatttcatactaatagagctgagaaatgcttccggagtactccacggggttgtaccacggattggtgatcgtcaggttggcgccgcccgtacgggtgaagatctcgaaggtgaaggtgtaggtcgaagccgagaagagcgaagtcgagaaggtcaccatccagccttcgtgggtctgctcggtcgtatatccctgcacgttgggaaccgtatagttgagtatcatgacgtagtaaggcggcacgtagcctttgatgtaaggcaggcagatgtccaccgtgccgtcccagactccgacgttgaaggccggattcatgatctgacgcatggggccggccggctggcgctgcatggtctgggggttgaactggaaattgcgcgaaaggatgaccgaatccatcgttttctcaaaactggcgatacggtccgcacgtcttttctcacgcacctcgcggcgctcttctttgggcgacagattctttttctgtccgatcacggtaacgccgactacgcagagcagcaggcccacgacgataataactgtttttttcatagcacataaaagatttgtacggctatgaagtgcaaaatcggtgcctaactgcttagcgtagtgactaaagtcccagttttttcaggaattcgcccgtgtagctgcgtttgcagcgggctacctcgtgcggcgtaccggcggcgacgatctcgccgcccgcggctccgccttcgggtccgatgtcgatgatatggtcggcgaccttgatgacgtcgaggttgtgctcgatgacgatgacggtgttgccgcgctccacgagtttgttcagcacctccagcagcaggcggatatcttcgaaatggagtcccgtcgtaggctcgtcgaggatatagagcgtgcggcccgtgtcgcgtttcgaaagttcgctcgccagcttgatgcgctggctctcgccgcccgacagcgtggtgcagggctggccgagggtcaggtagcccagtcccacttcctgaatggcgcggagcttctggtagatgttgggaatgttttcgaaaaactccacggccatattgaccgtcatattcagcacgtcgtcgatattcttgcccttgtatttgacttcgagcgtctcgcggttgtaacggtgtccgccgcacgccttgcagcgcacgtaaacgtcgggcaggaagttcatttcgatggtctgcacgcccgcgccgcggcactcctcgcagcggccgcccttgacgttgaacgagaagcggcccgccttgaagccccggatctgggcgtcgggcgtcatttcgaagagtttgcggatgtcggaaaagacattggaataggtcgccggattgctgcgcggcgtacggccgatgggcgactgatcgacgacgaccagtttgtcgacatgttcgaggccctcgacgctgtcatactccagcggctgggcgaaagagcggtaaagctccttcgagagaatcggccgcagggtctcgttgacgagcgtcgatttgcccgaaccgctgacgcccgtgacgcagacgaacttgcccagcgggaattcggcggtcacgtttttgagattgttgcccttggctccgcggatcacgatgctctggcccgtccccttgcggagcgtttcgggaatttcgatgcggcggcggcccgtcaggtaatcggccgtgatggagtcggacttgagaatgtcgccgaacgttccggccgcaatgatattgccgcccttgcgacccgcgcggggaccgacatcgacgatgaaatcggcggcgcgcatcatgtcttcgtcgtgttcgacgacgatcaccgagttgcccgcgtcgcgcagctcttcgagactgcggatcagtttgcggttgtcgcgctgatgcaggccgatcgacggttcgtcgaggatatagagcacattgaccagcttggagccgatctgcgtagccagccggatgcgctggctctcgccgcccgacagcgagcgcgacgaccgcgacagcgacaggtagcccagccccacgtccatcaggaagcgcaggcgttcgcggatctccttgacgacctcctgcgcgatcttccactccttgtcggtcatatgctcctcgatacgggcggcccactccgaaaattcggaaatcgacatggccgaaacgtcggcgatgctcaggccgccgatacggaactgcagggcctcctttttcaggcgcgtgccgccgcagaccgagcatttgcggtagacgaggaactgctcgcgccacttctggccgtgtttggagtcgtcgtcctcggtgcggccgatgtattcggcgacgccctcccacgaaacgaggtggttgccgcccgacgaactgaactccgagaggttgatcgtcagcggctcggaatcgccgtagagaacagcgttcagacctgcttcgggcagcgtgccgacggggtcgtcgagcgtgaagtcataacggcggcccagcatttcgaggatggcgaaaagcatgttgttgcggaacttgcccagcggttcgacggccccttcgcgcagcgaaagcttcatgtcgggaatgatcttcccgacgtcgaacaccgcctcctcgcccagaccgttgcaatggggacaggcgccctgcggcgagttgaacgaaaaggtatgcggcgcggggtcctcgaaagccacgcccgtcgaggggcacatcagatggcgcgaatagaagcgctgctgctcggtgccgtaatcgtaaacggccatcgtgcccttgccctgccgcatagactccctgagcgaagtcatcacgcggtcgcgggcgtcctcggccacgacgagccggtccacgaccagatcaatggtatggattttatagcggtcgagacgcataccggccgaaatctcgcggatctcgccgtcgatgcgcgcatagatatatcctttcttggccagcgactcgaacaattcgcgatagtggcccttgcggcccttcacgatgggagccatcagggcgattttacgtccggcaaagcccgtcatgatcagctcggcgatctgctcgtcggtgtaatgcaccatctcctcgcccgtgacgggcgaataggcgcgcgacgcgcgcgcatagagcagacgcaggaagtcgttgatctcggtaaccgtgccgacggtcgaacggggattcttgttggtcgtcttctgttcgatggccaccacggggctgagacccgtgatcttgtccacgtcgggacgctccatcgtccccacgaactgacgcgcataggtcgagagcgtctccatgtagcgacgctgcccctcggcgtagatcgtgtcgaacgcgagcgacgatttgcccgaacccgaaaggcccgttatgacaacaagtttgcggcgcggaatctccagatcgacattcttgaggttgtggacccgtgcgcccagtattttgatcgtatcttctttcatcatcgtaattaaacgcaccggaagctccgtttattgagcggagcggatttttccggcgggaatatcgtacaaagatacgacatatgcggcgcaaaacaaaacgaacggaagaaaattcggccgggacaagatgcggcgcaactgccggaaagacagagccggaatacgaagaaaagcaaggcggaattccgaagagacagcagcccggacgccgaggaagaacaggcccggacgccgagggaaagcaggcccggacgccgagggaaagcaggcccggacgccgaggaactgcgagaatccaagccgggactccttaaagacagcgacgcgcctctgaagaaaaaccggatcgggcatctaaagaaaaaacgcaggaccaagcctccgacggacagcggagacgggaaaagcacaagccggggttccgaaagacagcggagccgcggacaggcaggacgaagctggaccggaaagccgtcagagcctcagcacttcagttcgaagtcgtcggcatccatccatgcgggaaatttctccttgaaggccgcctgagcttcggagtcgaattcggcggtcagcgtccgttcgcggtcgccggcgtcggccagcgtacggccggcgaaatcgatcagcgccgaatcgcccgcatagcttgcgtcgggatccgtacctacacggttcacgcccgccagatagcactggttctcgatggcacgggcgcggagcagcgtgcgccacacctcgcgccggtcgtcggcccacgaggcgctgcacaaaatggcgtcgtagtcgcccctattgcggctccacaccggaaagcgcaggtcgtagcagaccagcagcaggaagcggaagcccatgtattcgacgatcacgcgccggtcgccgggcgtatagtcgcgcgcttcgccgccggggcggaacagatggcgtttgtcgtaccacgccgtctcgcccgaaggtttgacgaagaacatccggttgcggaaccgctcctgctcggcgacgacgacactgcccacgacggccctgccgtactgcgctgcccagcggcgcatggtcgtgacgaccagcccgtcggccggttcggcgacgcaggccggacgcagtttgaatcccgtggcgaacatttcgggcagcacgaccacatcggcatcggccgcggccacgatcggctccagacgtttcaggttccgggcggtgttttcccactccatatcgacctgacagatagctacgcgtattttcataggaaacttctcttttgtaacaaatatatgaaattttcttacagtttgcactttttgcaagaaaaaagcgggacatcctgtaagacatcccgcaaatttcatgcgatccgcgcataccgacgcggcgcggcgtaagccggaacagagcggcgaaccgggtcagctttctccgagccgccacacggtaacggacgaagcgttgctccgctggtgcagcaccgagactttgcagggcacgaaatccgaagcgccgcacgtccagacatcgacgaactgctgggggctgcgctccgcgagcgggaaccatgtgctctgcacctgaatcatcacccggtgtccggcgcggaacgtatgcgcgatgtcggtcatgcggaacggcacgcgggccggaacgcccggcgtaaaggctttgggacgcgagaacccgtcgcggaaacgcccccgcatcacgtcgccgcgcacgagcatccggcagccggactgcggatcgtcgtcgggaaaaacgtcgatcagcctgacgacaaaatcggcgtcggtggtcgaaaggatcacctccagctcgacatcgacgggtcccgcgaaggtcatatccccgtcgagcggctcggtgacgaaggtcagcacgtcggaacggtccgacacgaagcgctggtcggcgagcatatactctttggggcggcgttcgccgaaggattcgatataaggcacgggatcggccggatcggacgtataggcggaggcggagcttttggccgtcgggcggcgggtttcgagacgtccgccgtcggagaggtagaaggtgagcttacgcgcttcgcgcggcgtccagcggtcgaaagcatgccagcggttgtcgcccgacgagaaaaccgcggcggcgggaagcgggtccgcggcgccctcgcccttgaggtaatggtcgaagaaagggagttcgaaatgctccatatagtattcccacgccgcttcgcgcccgaaatcgaacgctccgagttttccgctgccgttgcgccatgctccgtgcgcccaaggtcccacgaccagatggcacggcgttgcggggctttgccggaccatggcccggtagaggttccacgccccgaagcaatcctcggcgtcgaacgtccctccgacgaccagcacggccggctgtacgttgtagcaggccctgcgcaggtcgcgcgcctgccaccatgcgtcgtaggaggagtgttcggcaagctcttcccagaaaggattgggacgctgaagttccgtaagttcggccagcgtcgcatgttcccggaagaacgtccactcgtcggggcgggtccgcttcgacatcgagggcatcttttcggtcggagtatggcccggaggggtgttcatgccgctcaggaaacggtaggagtcggtgagcatcagcacgccgttgtggcggacgtcgtcgcccatgaaccagtcggtgacaggagcctgcggcgaaacggccttcaccgcaggatgggtgcagagaccgcccatcatggcgtagaagcccggataggaactgccggcgaaacctaccctgccgttgttgtgcggcacatgtttcacgagccactcgaccgtatcgtagctgtccgtcgtctcgtccgtttcgccgtatcccgcagggcggacatggacgaattcgccctcgctcataaagcggccccgcacatcctgcatgacgacgatatagccgcggtcgatataactgcgcatatagccgctcccgaagccgcggggaaactcgccgggaccgtagggggcgcagccgtagggggtgcggaaaataaggatgggggctttggcatccgttttgggcgtatagaccgcggtatagagtttcacgctgtcgcgcatcgcgatacggtattcggccttgtcgtacagttcatcgacgggctgccgggcaaaggccgcggccgccgtgagcaatcctgcgagcaggagtgcggaaaataggcgcagcttcatggtcgggagttttcggttagtgtccgaaaggtacgcttttttccgcaatagccaaagcctcggcggaaaatcggattcattcgaagcggcgggtccgatctattcccgcgcggaaagttgcatagccgcgaaattaaacgtacttttgcagtcggtcaattccgacaaacgacaatatgctcagagcaggacgcatccagaaactcaccgtaagccgcatctcggattacggattataccttgcggacgaggagcagaacgaggttctgctgcccaaccgctacatatccctgacagacaagccgggcgacgaaaaggaggtcttcctctaccacgactccgaagaccggctggtggcgacgaccgaaacgccgctgctgcgcgtcggcgaggcgggttatctccgcgtcgtggacaagacggcccacggggcgttcctcgactgggggctgtacggcaaggatcttttcctgcctaaccgcaaccagcagggcggcatcatcgccggacggagctacatcgtctacctctacgaagacagcgtcacgggccgctgcgtggcgacctgcaagctcaagagcttcatcaacaacgacagcatcacggtggcgccccgtcaggaagtcgatctgctcgtggcttcggagagtccgatcggctaccgcgtgatcataaacaaccggcactggggcatgctctaccgcaaccagctgttccgccccatagcggtcggagaccggacgaaaggttacgtccgcaaactcactgaagacaaccgcatcgacgtcagcctccagcaggagggtttcgcgcaggtgaaggactcggcggaggttttgctgcagctggtccgcgacaacggcggcttcctgccgctgaacgacgacagcgccccggaagaggtgaaccggctgacgcagacgagcaagaaggttttcaaacgttcgctgggcatgctgctcaaacgcggcgccgtcacggtggacgaacagggaataaagatcaacgagtaatggccaagataacgaccgcggaacgggtttcgcgcgaagcttccgacaatttcgtatttcagcgttcgctgctggcctaccatgccgcggcgcagcgcatcagcggcgacgtgctggagataggcacgggggccggttacggcatcgaggtcgtggcgccccgcgcccggagtttcgtcaccatcgacaaactggcccccgcgcccgaaccgacgcagctcccgaacgtcgaattccggcaggcgacagttccgccgctgcccttcgcaaacgacagtttcgacttcgtgatctcgtttcaggtgatcgaacacataaaacaagacctcgaactggtgcgcgaagtgaagcgcgtactgcgtccgggcggaaagttcatcgtgacgaccccgaacgctccgatgtcgctcacgcgcaacccgtggcatatccgggaatacaccgccgcggagctgcgcagcctgctcggcagcgaattttcgtcggtcgaggcgctcggcgtttcgggcaacgcgcgggtcatggaatattacgaacagaaccgccgcagcgtgaagcgcatcacgcgcttcgacatcctcgacctgcagcaccggctcccccgctgtctgctgcaattcccctacgacgttctcaaccgcataaaccgccgcagactcctgaagtccaacaccgatctcacgacctcgatccgcatggacgactaccggatcggccccgtgacggacgagagtttcgatctgttcttcgtggcggaaaaataggcgcaaccatctgataaaaaccaagggctgccccactgcggggcggcccttgccgtatcctgtcatcccgaacatacattcgacattgcagaccgcgccgccgaaatcagcggccgcggccgtcgcgcgggaactgaattccgcggcttccgcggttccggtccggcagttcgcagccgcgtcccgcacacgtttcggcggctccggcacacgaaatccgagggagcggatgccgcggcgcggcaggctccgggaccgacggcggcaaccggtgcggccggcggttccgccacgaaaagagacgaagtttcaacggctcggcggggatgttccgccacctgatttcgaggcccgtatttacgaaaaaattgccgagaagcggacgtttgcgataaaatattgtacagaaaacaacattacattttaatcttaccgcactgattatcaacatggagattcgttaaaaatcttatctttggctttcaaaaatccaacgatttgactgctaacgacatgcatatcaggccggttatccgaatccgggagttctgcaataacttaatataaaaaagggattgcagcatgctcataaagaatcattcgccttaacgaagaccgactccgccaaatctcaagcattaactattaatccacctccatatggaattcataataacgattctcgtcatggacatattcattgtcctcataatatatcgacgcctgcgccaccatatccaatacgtttcagggcaggcaaaagccagactgaattatatccgtatcctgatcgataccgtatatacctattcccaccagccggaactgctgcaaaaacacctgcaaaaagagatgtcgatcaaaaaactgctggcttatcatgtgatcgacaaccgatgcgaccgtcttttctccgccagaatgaaagtgaacagcaacgaccaattgctatacatgcttcataaagagggattttcaccgcgggagctatgtatcatattcgaattgaacaacctcaattcggtatatgtcaaatgccaccgaataaacaagaaactgcatgcgggcgacatgcaggaagtgctttcgaaataaacgaccagaagcgggccgcgtgtccgcagcggccggaagcccagcttccggcttttttcgtcccctcccggcaacgtattcttcatagctgcggttcggaatccgccgcccagcttttaggcaaaagcgttcccgccccggttcggcagaccgactttcgatctgttcggtgaaaacggatccttggaaaaacccccgtccggtccctgcgttcgtcccgtttccttcggaccggcagggagccggcggaaaggccgcgggaagaccgcggcggtcaactgcggggcgacatttgacaaatatttgaaattcagcagggtaaataataaaaaagtctccgtttttccacccggttcggcgcccttattacatgaaaccttcgtaacaggatatttttcgttttgtaaactaaaaaaaatacgaaatattttgcatagtaaaaactaattcgtatttttgttttgaaacgaaaggcattattttcatattgaaattaaaaagaggcttcgggaacggagaatgaacattgcaatgaacgcagaaatcagccggcccctaaacaactgaccatgaaatcgaaactgccgccaaaccggattccggaactctccggaataagaacaacagcgatggccgccgccgatgcgacggcacatgcacccgccgcgaaatgccgccgccacggccctgcggcaaccgtcggagacggtgtttcggactgcacctcccccggaccggcaacattccctgccggaaaaaaccgaatcgaatcctgaatccgctgatcgctccctgcgctttccgtaccgcgcagggagattatacctatatatatttattccggaacattcaaacaacttaaacatctaaccaaaaacaaatgcttatgaattttaaattctacgttaagaggtttttgttatccctgtttctggtgctggcatcgacgatgctctacgcccagaagaaagcggatatcacaggaaccgtctacgattcggacggcactaccccggcggtaggctgcgccgtaacgatcgagggaacgccgacaggtgttatcacggacatcaacggcaagtacaaaataagggggggggaaaaccagaccctcgttttttcttcgctgggttataagacccagaagatactaataggccctaaaacgcggatagacgtcacgctggaggccgacagtcaggaaatcgaaggcgtcgtcgtaaccgcactcggtatcaagcgagacgaaaaagcgctcggttatgccgttacgaaggtggacaacgacgtactcaccagcacggtatcgagcaactggatgaacgccctgtcaggcaaggtcgccggtctgaacttcgatcaggcgtctacgggtcccggaggatcgatgcgcgtgaccctccgcggcgaaacatccatcaacatgaacggcggcacggccctgttcgtggtcgacggagtgcccatcaccagcagttccacctccagcacgtcggaaagcgcatacaactcgaccgacggcgccgtcgacttcggtaacgccgcgggcgacatcaaccccgaagacatcgagaacgtatccgtactgaaaggtcccgccgcaacggcattgtacggatcgcgcgccgcaaacggcgccatcatcatcacgaccaagtcgggtcgcaccaccaaaggcataggcgttacgttcagctcgtcggtttcgttcgagaaagccggattctggcccgatttccagtatgaatacggcgcaggacgcttcggcggcaacccctattcgttctacagcgtagacggcgtgtcgcgcaactggtcgtcctatgccttcggcgacaagttcgacggccatctgacctacgagtggccctcgctgaacgacgacggcacctatacgatgatggagtggcgtccgcgcaacttcttcgcaggattcttcgacaccggcgtaacgtggaacaacaacatctcggtcagcggcaacaacggcaaaggcacctcggtccgggtttcggtaaccgacgtgcgcaacgactggatcgttcccaacaccggttacaaacagcagaccttctcgatatcgctctcgcagcagatcaacaagtacatcaagctggacgccaaggtgaactactaccgcaaggacagcgacaacctgccgatgaccggttacggcggctcgtcgatcatgtatccgctgctgtggaatacgcccaacgtggacgcccagtggttcaaggcggactacaagaagtgggtgcgcgaaggcggcgacctgagcaagagcacccagcacgtatcggccaacggcaacaacccctactacacggcttacgagcagctcaacaaactggaccgcgaccgcgtgttcggcaatctggcagcaacgatcaacttcaccgaagagctttcgctgatcctgcgatgcggcatggacctcaacaacgatttccgcacccagcagaaacccaagggcgccaagacctacatcaacggtatgtacaaggagcagaccgtgttcgactacgagatgaacaacgacttcctgctgcgctataccaagaaactgaacgacttcgacctgagcgcatcgttcggcggcaacaacatgatgcagtcctaccgttcgaacacctcgctggccgagagtctggtcgtggaccgcgactaccgcctgagcaactcggtggaccgtcccaaagtgacttccatacgccgtcagaaatcgatcaacagcttctacggactcatatcggccagctggcgcaacatgatattcctcgacgtcaccggccgcaacgactggtcgagtacgctggctccgggcaacaactcctatttctatccttcggtcagcggcagcgtcattctcagcgacctgctgcacatcgacaccccgatggtcaatttcctcaaggtgcgggcttcgtgggccaacgtgggtaacgacacgtcgccctatcagctgctcaactactacaacaactcctccttcaccggcggcttcaacatgccgaccaacaaggcgaactacaacctcaaacccgaaaacgtcgagagctgggagttcggcgtcgagggccgcttcttcgacagccgtctgacgttcgacgtggcgttctacaacgcgaccaccacgaaccagatcatttcggtgcccgtagacatcaccaccggcgtctacaatacgatcgtgaacgcgggcgaaatcaacaaccgcggctgggaggtatcggcccgcatacagcccgtgaggaacaagaacatccgctgggacatgaacttcacgtggtcgcgcaaccgcaacaaggtcgtggagctggctccgaatctggattcttggaccatcgcaaccggtccccgcggcgaaatccgcgccgttccgggcggatcgctgggcgacctgtacggttcgggctacgagaaggcccccaagggttcctacgtcacggccgacgacggatcgacgatcgacgtatcgggctgggacatcgtcgattcggacggttatcccgtactggcttcggaattcgagaacctcggcaacacgcaggccgactggaaggcgggctggatgaactcgatctcctacaagaatttccgcctgagcttctcgttctcggcgcaatggggcgggcaggcctactccttcaccaatgccatgctgggctatcagggtaagataaaggcgacgctccccggccgttacgacggtctgatccacaagggcgtgaaccagaacgccgacggcacctactcgatcaacaagaccgtgacggccagcatcgagagctactacaacctgcgcgtgttcaaccgcgacaacgtggtgaacaacaccttcagcacgtcgttcctgaagatgaaggacatacgtctcgaatattcgcttcccaagaagatcgcggccaagaccaaggtgctgcagggcgcttcgatcgccttcttcgccacgaacctcttctgctggaccaactggccgcagttcgacccggagatcgcgacgatgaacggttcggaaatcaccaagggtttcgaaaccgcggcattcccgatgacacgcacgtatggcgttaatcttaaacttcaattctaataagacgatgaaacgaatcaattcatatatattgaccgggggagtgataatcttgggattgtgcggctgtacgagcaatttcgacgattacaacaaggaccccaaccgggcggaggtcggcaaggccaactcctcccagatgctcgaagacctgattttcgagggcgccggaagcatgaaataccgcacgtggcggcacaacaacgagttcatgcagtatacggtggagaccagcacgctgaatcagctgcaccgcttcgtgctcaccgacagcgaattcaagggcgcgtggaacttctgcggacgctgggccgtcaatgccatagagatgtataagctcgcggagaaggaggagaataccaacgcgcaggccatcgccctgaccatgaaggcgctctacctttcgaacatgaccgacttgttcggcgacatgcccttcaaggaggcgttcaagggaatcgaggagaatatcatgcagccgaaattcgacgatcagaaagtcatctacgactcgctgctgatggacctcgaaagggccaacacgctttacacgaagacctccacgatagacgccaagcgcgacctgctctacaacggcgacgtgaccaaatggcggaaattcaccaactcgctctatctgcgtctgctgatgcgcgtgagcaaccgcagggacatgaattcggcggaacgcatcaagaccgtattcgagaacccctcgcagtaccccatattcgagagcaacgacgacaacgccacgctgaaatacagcggcacgcgtccgttcgtcaatgatttcggcgacaacgccaccgacgacagcgcgatgggcgaacgtttcatcaacatcatggtggactcaagcgacccccgcatctcggtttactgcaaccgcgtaagctccggagccaacgcgggcggttacgtgggaatcacgagcggcgccccggcttcggtcatctccaagcagtcggccgacggcgcgtccaacagcaacaatacgactttcaggcagtacacctccccgtacacgttcatgacctattcggaggtgctgttcatcaaggccgaggccattcagcgcggaatgatggacggcgaagcgtcggagacctactatgctgcggttacggcgtcgctcaagcagtggattcccgacatctcagaatcggccatcgaaaccttcctgcagaacggagccgtggcttacgacgctacgaccgaaatcatcatcacccaaaaatacgtttcgctgttcacggtgggctacgagtcttggcacgagtaccgccggacgggttatcccctgctggtgatgggcgaagccatccgcaacgacggcgtgcatccgacccgtttcccctacccgctggtgctgcgttcgtccaacaagaactatgcggcccagctggccaaaatgggcgaagacaacatgaaaacgccggtgtggtggagccgcaaggccgtcaagctggagaatccggaggaggacaacaacctcggttacaccggccacaaatgggatgcggacatcaaatggtaagagtgtccgtaaaacgaatcgcaaccggaaaggcaacgcagcatcccggtcgagttttgaatttaacccgcaaataacgaaaaaacaattcatatgaaaataaaacaattcatctccggaagatggcccggcctgaaggcgctcgctctctgcgcgatggcggcaacggcattcgtcgcctgcaaggacgacgagaccgacgttgtccgggatccccatatcacgctgtcggaagacgctttcctgtataacgcagcgggagagacgcacagtttcaccgtgtattccaatatcgactggaaggtcgaaatggcggacacctcccagacgtgggtcaatatctggcccaaggagggttccgacgacggcgttttcgccgtgaaggtatccaaacagccgtccaaggaccccgtactgcgggaggcccgcttccgcgtcgtgggcaagcacgagcatgacaacatcattcaggaaatcacgatttcgcagcgggacgtcgatccggcgctcaaactcggagtgaccacgacgcctcccaaggtggttatcaacagcaacggcgaggagaaatactcggtcggcgtcacctgcaacgtggagtggacggccaaggtcggcgactccggcgagggttggatcacgatcgacgagatcagcgacaacgaaatcaagttctccgtacccaagtatgcgggaacggtgccccgcacgggacgtatcgaattcaacgccaccaccgagcgtatgacgacggtagagctgatcgtctaccagagcattccgctggatatcggcgaaaacgccgaactcaagaccattgccgaggtgtacgagaagctgggcggcctgcagggaaccgttcgtgagaacgtcaagatacagggcaccgtgatcagcgaccgcgtatccggcaactgcccgaatcccgccgcgttcttcgttcaggacgccagcggacgcgccattcagttccgcgttcaggaaggctcgcactcgctccagctcaattcgctggtgaccataccgctcatgaacacgcagtcggtgatcgacgacgacggacagccctacatcaccatttcgacggaacgcatccgcgacgtcatcaccacgggcggcgctccgatcgaaccgaaggtgatggaaagcacgcagggcctgacggacgaaatgctcggtacgctggtaacgatccgaaatctccagttcgtattcccgcacggaacctactacaacgccaacgaaggctccatttacagcggcggacgtcctaccgacctcgcccagctgcttctggaccgcgacggcaacacgatcagccactacgtctacggcggcacgagcgtcgagacgggcgccatgttcaagcattacgaactgctgacggacgatccgatgctggatataacgggtattctgatcaaggtcgaaaacgaatgggcgatccgcatgcgcaacatcaacgaccgcgacaaactgaccgaagcccggcgttacgtgcccatcaccgaattctactggcccgaaacgcttcccgacaaggagatactcgttcccaaagtcggcacgggacagctgttcgtgaacttcgcccccaaggccgtcatcgcgcagagcaccaccttccgcctttacagcggcgccgcctatgtccgcgtcgatgcgtcggtcaacggcaccgagaagggatactattccgccaactgcggcggctggggcgcccagtcgaacgacacctatacgccgacccagaaggcatggtacttcgagacttcgacggcaggcatttcggatgacctttacgtatgcttctgcaccaccagctcgcagtcgggccccggtcccttctcgatcgagtgggctgcggccgaggccggtccgtggaccttcgtaaccgactacaaggccggaaactgggaggtaatacccggtcccaagaacttcgccttcaaactgcccgacggttgcaagaaccagtcttcgctctggctgcggttccgcgtcaattccgacgagcgcgtggacggcaaggcagccaacagcgcgacgggtacgaaccgcatgatctatacgagcctgaagaaaaaagtcaattaatccggtgtaacgcaggataatcttgccggaccgctcccctcccggagcgattcggcaggattagacaaaaatctaaacaatgagaaaaatgaaacgattgataaaattcagattaccgtatctgttcgcagccgcatttctgctgttgtgcatcggaatcagctgttcggaagatccgacatggaccaaaccgacgcccgaacaggaggaaattatccccgccgtcttcatcgaagatctcgtgatgcccgatgcggaggagatcttcatcccggaggaccccatcaagatcatgggaaccggattcgacaaatacgacgtattcctgttccgctccacgtcggaagaccctgaagaggagaccaaatattttcaggccgagatcagcgaggtggccgaggattacgtcataataaccgttcccaaaacgatcgacctgcgctcgtacgagcttatcctgaagcgttacaacaagcagcaggtgctgggtccgatgaccatctacaaggcgcacttccccgcgattcccgatcaggcgggcatgaccgtcaagggccgcgtctactgcgggaaaaaggcggtcgcagacgtggtggtgtccgacggagtcatcgtcaccaagaccgacaaggacggcgtctattacctgccctcggagaagaagatggggtacgtattcgtttccatcccctccggatacaacatcgagagcgaagcgggttatccggccttcccggccatgagccagcagctgctcaacgaagacaacgagcagcacgatttcgcgcttacggagatccccggcggaaacacgaaccatgtgatgatggtattcaccgaccttcatctggcgagcaagaccccgaacacggccggcaaatatgccgacatcgaccagtacaagaacaagttcatgcccgacatcacggccgaaatggcgcagtatgcgaacgtgtatgcgctctgtctgggcgacatcacgtgggatgcgttctggtacaaaacgatgaatcagggtcctgagaacatggtggaggtacgctaccagctgccgaactacaaggacttgatgaagaacttcccctgcccggttttcaacgtgatcggcaaccacgacaacgatccgaaggtggtcggagactacttcacggagctgcctttcaagcagcacatagcccccacctactattcgttcaacatcggcgacgtacactacatcgttctggacaacgaccagtacgacaattacaacggcggcagccgcatcgagcggatcgggctgctcggcgactccgacccgcagaaatggcagatggcgtgggtggccgaagacctgaaatacgtggacaagtccaagaagatcgtggtcgccatgcatgccccgatgacctcggccggactgaacccgatcgtgacgctttcgggcggaaacgacctgctcggtctgctgcaggggtatcaggtggaattcctcaccggacatacgcacaacaatcaccacgcgaagatcgccgaaggcgtacgcgagcataacgtagcggccgtatgcggcacgtggtggttcaacgtgaaaagcgccaacggaggcgccgactacgacttgtgcaaggacggctccccgacgggctacggcgtattcaaattcaacggaacggccgtgcagtggtactataaggggatcgaggtggcccgcaacgagcagttcgccgtatacgacatgaatttcgtgaagagcgactacaagagcgccgtgggcgccaaggccaacgaagtgctggtcaatgtatggaactgggacgaggactggacggtatccgtgaccgaaaacggacagccgctcacggcgacccgcgtataccgcaaggacccgacgcactacacatggcagaaagacgtactggaaccggcccatgcccccggctcgcccaacagcacctacctcacgggctacaatgcccatatgttctccgccatagcgcaggttcccggctcgacgatcaaggtcgtcgtaacggatccgttcggcggcgtctacgagaagacgatcgtacgggaaattccttcgaatctgccggcgcaatgggtatttacaaagggcgtcaatgtcgatgagttcgtcgtggacaacaaaatgccgtcggcgaccggaaagggctatatcagctatatcagcaactgcgatccggcgctcgacgtaaacaacaagatagcccgtgccaatacggccggcgagccttatatcacgggcggatggccgggcgactggtggctgttcaccattccggaaatgaccataaaggccggaacggtcatcaacgccaagttccacgcacgcgcatccggaaccggtatgaaatactggatgctggagtactacgacggcggtgaatggaagcccggagcgcccttgcagacgacgaccgtcggagagggcgatcaggcgcagacattctcttacaattacgaaatgatgaatacggaccattgcctgatcgaccgcaacatgacgttcgagcatgccatcaataacggggatattctgatccggctccgttgcatggccaactggcaggccagcggaaagggagccttagccgcacccaacggcggtacgcaccgcatatccgtacaaaacaatatcaaccccacgatctcgatcgttcagtaaacgggatcggacagcaaacagaacggccgcttctttcgggagcggccgttttattcgtctacagccgagcaaatgcgcgtcatagcagacgatccccgaccgggcggacatttggccgccattcttacgtttcagaaataagtatcacccatagtaacaagagtatgcttaaaaattaggatgaaacgggatgcaacttcctcttatgcgttcggcttggtgcgcacaataaagttgccaaagggacattctgatttaagtctacccataatttccgattttttaccatcacaaagatgaatcgcaaagtttgtgatgattttgtgaatgttatttaaccggaaatctcccttaaatactaacggcacgattaagaatcgtgccgtcgagtaatttaactatgtcattttgagccatttcagcccaaaattcttttcagtactcctcctcgttgaagaagaaatcgtctttcgaggggtaatcgggccagatgtcttcgatagattcgtatatctcgccttcgtcttctatttcttgcagattttcaagcacttcgagaggtgcacccgaacgtactgcatagtcgatcagttcgtctttcgtggcaggccaaggggcatcttcgagtttcgatgccaattcaagtgtccagtacataatttcaatgtttttaagttcccaaatatcagcggattagccaaaccgaaaacgggactgttccgccatcactgatttgcaaaagtataaaaaaaacgagaaaaacaaagaaaaaacaataaaacatcgccggtgcagaataaacacgcttgcactcaacgaattacggaatccacaaggtttcatcgacctcgtaatgcgccgtaagcatacgtccgagcgcatagaagtaatccgacagccggttcaggaacatcagcgcctcggcatccgtgccgtatttctcgtcagcgcgcagtgcggcgcgttcggcgcggcggcaaaccgtgcggcagacatggcacatcgaaacgacggcgttgccgccgggaatcgtaaacttgtcgatcggcggtacggcagcctgcaaggcgtcgatccgcccttcgagccacgtgacggcttcgggcgccagcggagcgaccttctcgcagcccgatttcccgcgggccagcagggcttcgacggtcatcagccgcgaaaggatgcggttcaagtcgtccacatacggcgtcagtgcggcatcggagcgcatattgtcgcacaacagcgccgtaaaagcagccaattcatctaccgagccgtacgcttcgacccgttcgtcggtcttgaaaacccgctcgccgccgaccagagacgtggtccccttgtcgcccgttttggtgtatattttcatatccggaaatgttgtttcggcaaattattattgaaaatcagcaggtatcccctattgtccaccgtcgtcgaacgatgcgccgccacgatctgacggcacaacatctggcgatcctgtccctcgcagggcgacatcagggcgacggtatgccccgcttcacccgcggctgcgaccagtgccagcgtctccgcacgtggcaggtcccgcgtcaggatacagaattcggcatccgcacgattcaggccaaacgtaccgtaaccgcaatgaatcgccacgttttgcaactgtatcgcccggcgttcgggcactccggcaccgcgcagcgcccgatacagccgccggtcgcccggcagcagctcgccgcgcataaagacctcccgtacaatattatatacgaacggcgaatggactccgtgcccgcggaaataacgggcgcggacaagccggttgtgcagttctgcgatccgtccgtaaaaacccagtccgatagtgcggccgccgatcctcatctcccctactttttcagcatgcccgccagacggcccgtcgaaaaggcgatctgcaggttgtatccgcccgtattggcgtcgaggtccagcacctcgcccgcaaagtaaagtccccggaccttcagcgactccatcgtataggggttcacctcgtcgcagcagacgccgccggccgtaacgacggcatattcgaacggtgcataatccgtaagcgggaaggtgaatcccttgagcgtctttatcaggcggccgatctgctcttcggtgattttgctgacgtaattcttgccgttgacgtccatttcatgcacaagagtcaagacgagcggcttcggaaccagcttacgcagcagttcggtaaaaaactcggtcggctccatatcggcgatctcgcgcgcgatccgctcgcgcaacacctcttcggtaagcgcgggtttgaggtccacgaccagtttcacgcgccgctggtcgatcagcgcatccaccgcgtcgcggctcatccgcagcgccacggcgccctcgatgccgcgctgcgagaatcccagttcgccgaactcctcgcgcacgggctggtcgtcaatccaaagcgtcgcccggacgttgcgcagcagaaggccgtcgaggtatttgatctgcggatgcgacgagacgagcggcgtcagcgaagggcgcaccggctctacggagtgccccaagtcggatgcgaaggcgtatccgtcgcccgtggaacccgtcgcgggataggaaagccctcccgtagcgacgatgacgttcgggcactcctccttgcgttcgaaaccgcgcttgttgatatagcggacgccgaaaaccttgctgcccaaggtcataatcccggtgacgcgcgtattgtatatgattttgacgccgttctcgaagcaatattccagcagggccgtagcgatgtcccacgccttgccgctccggggaaagacccgttcgccgcgctcgatttcgagcttcacgcccgccctctcgaagaagcggatggcggcgcggttgttgaactcggcgaaggccggcgcgaaaaactccgcattggtccgcacctgcgaggcgaactcctcggcaggccgggcgttggtgacgttgcagcggcccttgcccgtgatgcggaccttgcggcccgatttctccatcttctcgatgagcagcacacgttttccgttgcgcgcggcggttcctgcggccatcatgcccgcagcccccgcaccgacgacgatgacgtcgtacggtatgatctctttttcttccaattgctccatacgaccgcaaagataggcaataattctttctttacggaaaaatttttctatctttgcggccgttaaaaccgttctaaaagatatgttgagcagaagattacttcgtattaaggtcgtcaaagtgctgttcgcgcacctcaaatcgggtgcagacaacatgattgcgtccgagaaaacgctgatgacgtccgtcgacaaggcctacgacctctacttccagatactgatcctgcccgtggaaatcgcccgttacgccgaacagcgtcaggagctggccaagcagaaaaaactgccgacacacgaagacctcaaccccaacaccaaattcgtcgacaaccagatcatccgcgtaatcgccaacagcgacgcggtgaacgactatgcggcggcccgcaagctgaactggacgcggtatccggagttgatacgcacgctctacacccagctgaccgaaagcgactacttcaaggattacatggcgcgtccggagcgttcgttcgccgacgaccgcaaactgctcgaagacttcttcaaggagcttcagagctgcgaaccgctggacaacgtgttggaagagatgtcgatcctctggagcgacgacctgccctatatcgtgatgatgatcctgcgttcgctctcgaacctgcgcccgacgcacacggagctgaaggttccggcgaaattcaagagcgacgaggacccccaattcgtccggacgctgttcgaaaaatcgctcgtcaattacgactcctatcaggattatatcgagaaattcacctccaactgggacgtggagcgcatcgtcttcatggacaacctcatcatcggcacggcgatggccgagctgacctcgttcccgtcgattccggtcaaggtgacgctcgacgaatacatcgaaatctcgaaatactactcgacgcccggcagcagcaccttcatcaacggcgtgctggacaagatcgtcgattcgctcaccgccgaaggccgcatcaagaaagcgggccgcggcctgatctgaggcccgatgccgcgtgtctgtctgttgctgcttctggccgcggcgctcgcggcgtgcggcgcccggcaggtgaagaccgaacgcaaaggccggattatcaccctcacggacacgattctcgacacgggaggtacggacaccgtgcgtttcggacgcctgcattcgggcgaaatcgcccagctgcgtctgtggctggccaacgagacgagcggaccggtcgtcatcgccaaatacggccgcagctgcggatgcacgacgctcgaatatgacaatcagccgattaacgccggcgatgcacagcaggtgaagctcactttcgacgcaaggggcgagtggggctggcagctcaagacgctcgacgtctcgttcgccggggcgcgcagtcccctccggctgtttatcgaagccgaagtggaataaatagttgcgtattcgacaatatttcgtatatttgtcccgttacagaaattaaacactaaaacataacgacgtatgatcaattttcttcaggtgccgcccgtagaaccccagccgggtttcatgcagcagtacagtttcatcattatgatcggcctcatggtgctggttttatggctcttcatgtggcgtcccgaagccaagcgccgcaagcagatgcaggctttccgcgacgggctgaaaaagggcgacaaggtcatcaccgccggcggtatctacggcacggtaaaggagatcaaggagaccaccctgctgatcgaagtggacggcaacgtaacgctgcgcatcgacaagaacatggtggtagccgacaacagcgacctccagcgtcagtaaaacaggatacgcaaaaacggaaaagctgcaaaatttgcagcttttttgtttgtaggttaggaatttatccctatatttgcaccagcaaccggagcaatccgggcacgatcccaacaacattgtcgagggggggggaatcttttaagcgcctcttacggattacccccttttcggcaatgtttttttatgcccgtcccgcaaagagatacgcgatcttcggcccttcggccgccgatccatcggtcaagcgacagacagacagacagacagacagacagacagacgatccgcaggtcggcaggtcggcaggtcggcgcattcccgcaacagccgcggccgcgaaagccctctcccctacattcagaaaagatttcacgttttgccgtttattgctatatttgcggtcggattttcataacagacaccatgacccagcacatatcctatcccaccgtcggaacctgctcccggcaaatcgacatcgaactggaagagggcgttatccgcagcgtaaccttcacgggcggctgttccggaaacacgcagggcgtcgccgcgctcgtacgcggcatgaaggccgcagatgccgtcgcgcggctcgaaggcatcgactgccgcggcaagggcacgtcatgccccgaccagttggcaaaagcgctgaaacaggcgctttagcgccccggtgcaacatcgggaacgaattttgcacgcggcaggtacataagatcaaaactggaaatctatgtattttgtctggtacctcctgctcggtctggcgtccggatggatcgccaacctcatcgtcaagggcgacggctcagggcttatcatcaaccttatcgtaggactcgtcggcggcgtgctgggaggctggctcttctcgcccgtaggacctgcgccgctaggttcgctcggcagtctggcgacttcggtcatcggcgccgtcgcgctgttgtggatcgccgccgccataacgcgcaagaaaatccgataaacctaaatcattcgatcatggacacactgaaaaccgacaaaaccgacaccgcaaaggcggaaaatatcgaaacgatggaactgttgaccggcatgctcgacaatgcgacgcagtgcggcggtgcagacgacgaaaatccggagccggagaagtccgggaaatgacaccggaacactccgacagaagccgtgccggactggcgtcggcagctgatggacagcgcgataacacaaaagggagacctcgaaagtctccctttgtgtgagttgagctgccaggactcgaacctggaacgacagaaccaaaatctgctgtgttaccattacaccacagctcaatccgttgctcgaaagcggcacaaagataagcaaattttcccaaaatacaattccggaagcgaaaaatgctgcaaatcaaggtgcatagtcggtataattttattacttttgcaaagatgaaacagtggttgatgatattggctttgtgctgggcggcggcgacggtaaacgccgccggggagagtcagtcccgtacgctccgggccgaaatcaccgccgccgttctctcgcaggccgacagcgaacgtttcgagacagacaacgcgcccctgctggctaccgcctgcacgggctgcacccagctttcgggagcggaacagggcgccggccgaagcgtccgccacgcagggaatttcatcgtggcggcgacccgcgggtacgcctgcgccggcaatccgcatccggccgcaccggccgtcggaaaatgcggcgtacgcccgcccagcatacgcagggccgatcggtatatttattatttgaggaggatcatcatttagcggaagattcacgtccgaaccgcctgctccggcatgcggacaatactttcacgaatctttcaccaaatgaaaactcatcaatgaaaaatatgatcgatgatgcgatttattccgcatcgcccgaaattgcatgccgccgttacaacccctcattaggcatcgtgctgacggctggcagcatcgccctgctgtgggccaactcccatgtcagtctctttaccgagaacgacatgctgtcacagtggaaccttttgatcagctcctgcatcctctgcacgggcatcgtgatgatctgctaccggctgttcggcgattcgtcggctccggtcgagaagcggagccgcgagcggctctaccgctcggaatactccttcgaggcgcacgatctgcccaaagtgcagtcggcgatcgaatgcggcaactttgcggtactgcagaacctgccccgcagctaccagcccgcggctcaggtcatctgctaccggacggacagcggctcgcttattgcggcgcaggtgctgatgaaccggcagccgaccggggagatcaaggtcttccgtgccggagaatatgatttttaacacataaagcatgattctgacaatgattctgctcttcgtggtgggttacacgttcatcgcgctggagcataaggtaaaagtggacaaatcggccatcgcactgctgatgtgcggcgcgatatggacggttttcagtctgtggggacacgacagcaacatcagccacgagatggtagaccatctgggcgacacgtgcgaaatcttggttttcctgatcggagccatgaccatcgtcgatctgatcgacacgcacggcggcttcaacgtcatcaccgaccacattaccacccgcaacaagcacaagctgatgtggctgctggccatcatcacgtttttcatgtcggcggcgctggacaacatgaccacgacgatcatcatggtaatgctgctgcggcgaatcattgcggatcagaaggagcgctggattttcgccagcctgatcgtcatcgcggccaacagcggcggcgcgtggtcgcccatcggcgacgtgacgacgatcatgctctggatgcgcggcaacgtcactgcggcggccctgatgggaacgctcttcgtgccgtgcatcgtatcggtaatcatcccgacggcgatcgcgatgcgctacgtgggcaacgaagacgcggcccccgtggacgaaagcgcgttcgaagcggagctgcccaagggcgtgggtccgcggctgagcaagttcatcctcgtcacgggcgtcctcagcctgctgttcgtacccgtattcaagagcatcacccacctgccgccctacatgggcatgatggtttcgctgggcgtgatgtgggtgctgacggagatcatctacgaccgcaaacgcggcatcgaggagtcgatcaaatgccgcgtttcgaaagtgctcaagcatatcgacatgccgacgattctcttcttcctcggcatcctgatgtcggtggccgcactgcagagcgcgggcgtgctgaccgacgtggccaactggctcgacaagcaggtgcacgaggtcttcacgatcgcgggcgtcatcggcgtgctttcgtcggtcatcgacaacgtaccgctggtggccgcatgtatgggcatgtatccggtcatggacgcggcggcggttgcggccagcgccgatccggcctacatgcagtcgttcgtgcaggacggactgttctggcacctgctgacctactgcgcaggcgtgggcggcagtctgctgattatcggttcggcggcgggcgtcgtggcgatggggctggaaaagatcaacttcgcgtggtacttcaagaaaatcacgctgctggcgttcgtcggctatctgtcgggaattctggtcatcctgctcgaacacctgctgatcgggctatgaccggagaggagcgatgtgaaaaagggcgcggaggattttcccctgcgcccttttcatttacaggcggttattcatagccgggccgctgattgtcggccggccgttttccgggctgagcgttctccgcaaggaacggcgaatacatcatcagcgcgtcgttgcgggtgacgtactgcacatcgacgcagcggccttcggcgtcgtacacctcgcggtagagcttgttgtggcggctgtatccgccccagtattcgctctgcatgcagtgatcccgttcgaccacgcggtaggagtattccggccgccggtcggcgcgccactccccttcgaggaactcgccgcctacggtgacatgcaggcggaaagtcgtctgcgtatcgttgcggatcatcaggtcgcggtagggataaacgcatgtagcgccgctcccgaaaggctgggtgcggctgcagtcgggaaatacgtcgtacgaatggcggtaacgctcgacaacggtcagcggcgtatggagcgtcatccagaagatcaggttggacatctggcagagtccgccgccgactccggggcggaacgtgccgcagaaaagaacgatgccgtcgagatagcccttgcggcgggagggacgtccgatcagccgccaatagctgaacgtctcgcccggacgcagcaccacgccgtcgagacgcgccgcggccagccggagattggtgatcttgttgtattggtactgcatgtcgacgtccttcagcctgcgcagcaagggcgtccggtgccggaagtgcgaatagtcgcagctcggagagccggatttacgggcgaaacgcaggccgccgaagtaccacaacccgtaacgcaggcaggtgtaccagagacgtccgcaccacaggcggaagcggctgcggcgccgaggttcggcacttggtcggtccacggtcagcccagtttggccatgaacttctcgcggtccacgacatagcggatatgcacgccctcgccgatcatccccccggcgtcgcgcgcgccgacgttgaaagtcagcttgcgtccctcgacttcggccagcacggccgtcgcggtgatttcagcgcccagccccgaaggcttgatatgggtgacgttcatctccgcgcccacggtcgtcgagccggcaggcaatgcggccgccgcggctgtcatggcggcgttttccatcagcgccaccatcgaaggcgtggcgaatacgggcaggtcgcccgaccccatcgcggcggccgtattttcgttcgttaccgtagtgcggctctgagccgacaatcctttttcgagcataatatcgttctggcgtatgacgtttaaccgataaataattaccttcgcaaaggtaacaattttttacggacatgaaaaagtggcttctgcttctgataacgctggccgccgcactccccggagcgcaggcgcagggaggccgcggcttctggcatcaggagtggtgcgtggaaaagggcgactcggtgccgctggtgcatattctcccggtttacgtattcagccgcccggtagacctgcgccgctaccgcaagctggtcgatgccgtgaagaaggtctaccccatcgcccggatcgccaaagccaagatggcggccatggaagaggagttatgccgcctgccgacgaagaaggcgcagaaagcctatatcaggcaggtttacaaccaaatcaaggaggagtatacgccggtgctgaaacacatgacccgcacgcagggcaaagtgttgctgaaactgatcgaccgcgaaacggaatacaccgcctacgaggtgctgaaggagttccggggcggcttcgtggcgggattctggcagggcgtgtcgcgcatattcggacagaacctcaagtcggaatacgacaagcagaacgaagaccggatgatcgagcagatcgtaatttattacgaagccggactgctcaggtaacctttcccgataaattacgatctgtccggccgcaaagcggccttcatactgacaatcccccgaaatccccctttgaaaagggggacttgtatttttagtggtacgaagccggactgctgcggtaagcggccggctggggcaaccggattgcgcccacacggcaaccggaatgcgatggcagcccggcactccggtcagaagttgaacgacaggccgacgcccatgcccatataggagcgggtcggacggaagtctccgtatctgaatccgaaattatccgtaatataacaatggtaggtgaaatctccgtagagattgaaccgccagatggggatgataagccgcgcgccgatgtcgaaagtacagctgaagcggtgcctgacgaggaatcccccgtcatagggcggaaggctcagcggcccgaacatcatgcccggcgtgaaccccgtatgcacttcgaacgccgaggggagaatcgcgaacagcgtggagaggaacgcactgccccagtcgggtttgctctccccgtaataaccgttgccataggggtcgttgttcggatagccttcgtccctgcttctgcgccatgccgacaccatacgtcccgtccgccatgtaaactgcatcgggatggaatagtagtcgaagacgtcggagtccagaaagacgttcagacccgtgcggaagccgatgttgtagtagttgtagcgggcatagtcgatgctgaacgcctgcaggtcgggcgaaagccggccgccgctgccgagctggatctgggcgccgtagcggatgccgatttcattaccgtagggcaggcccttcggcggctgccattcgtcgggagtctgggccgccccgctgacgcaatacagaagcgcgaggagtaccgcaaaagctgtttttctcataatttgccgtttgcttcggtgacaaaggtagtacaatatgccggacagccaaacatttatgccgaaaagtgcggacggcggcggcagcggcgccgaaaatcgccgcggcccttgctctttgtgaattattcgttatctttgtgggcaaaatttcgcagacctatgtttgaaaatttaacggataaactcgaacggtcgttcaaaatcctcaaaggcgagggccgcatcaccgagatcaacatcgccgaaaccctcaaggagattcgccgtgcgctgatcgacgccgacgtcaactacaaggtagccaagtcgttcaccgacgaagtgaagcagaaggcgctgggacaggacgtattgaaggcggtgaagcccggacagatgatgaccaagatcgtacgcgacgagctggccctgttgatgggcggcacggcgacggacatccggctggagggcaatcccgccgtgattctgatcgcgggtcttcagggttcgggtaaaaccactttctcaggcaagctggcttcgttcatcaagagcaagaaaggccggcaggtactgctggtcgccggcgacgtttaccgtccggcagccatcgaccagctgaaggtgctcggagggcagatcggcgtcgaggtatataccgaagagggcagcaaagacccggtgcagatcgccgaaaacgccataaaatacgcacgccagcacgcgttcaacgtcgtgatcgtcgataccgccggacgtctggccgtagacgaggcgatgatgcaggagatcacggccatcaaaaccgccgtgaaaccctcggaaacgctcttcgtcgtggacgccatgacgggtcaggacgccgtgaacacggcacgggagttcaacgaccggctcgacttcgacggcgtggtgctcaccaaactcgacggcgacacccgcggcggcgccgcgatctcgatccgttcggtcgtgaacaaaccgctgaaattcatttcgagcggcgagaagatggacgccctgcaggtcttccaccccgaacgtatggccgaccgtattctgggcatgggcgacgtggtgtcgctcgtggagcgcgcacaggagcagttcgacgaggaggaggcccgcaagctgaaaaagaagctggtcaagaaccagttcaatttcaacgacttcatcggccagatccagcagatcaagaagatgggcaacctgaaagaccttgcgtcgatgcttcccggcatgggcaagatgctcaagaacgtggacattccggacgacgtcttcaagcagaccgaggcgatcatctcgtcgatgacccccgccgagcgcgaacgcccggaaatcatcaatgcccgccgccgcgaacgcatcgccaaaggcagcggcacgacgatggccgacgtgaaccgtctgatgaagcagttcgaggacacccgcaagatgatgaaggccgtggccggaggcggtatgaagatgccgaagatgcccggcatgcggcggtaattcggacgacaagccgtcccgccgtcccggaaactatgaagttcccgaaacaaaatcagaaaatccctgcccgatgaatcggcgcagggattttcggtttctagtcccggactaccgcgtccagccgttacgccggatattgccgggattccatttctgtttaggctccggggtctcggccggatacccgatcggaatcacattcagcggcacgacggattccggaagtcccagaatagtgcggacggccttcacccgctcgctgcggggatatacgcctgtccataccgcccccaaccccacggcgtgggccgcgagaagcaggttctcggaagcggccgaagcgtccatcacccaccagtcgccggaagcgcccggattgcgggtgaggtccgcgcagacgacgaccgccagcggcgccgatgccgccatcttggcgtattgcagtgagtcggcgaatttttggagcagcgccttgtcgtccacgaccacgaagacccacggctggcggttcatggccgaaggcgcggccatcgccgcacgcagcagcagttcgaccgtatcggcccctaccggacagtcccggtaggcgcggacgctcgtgcgcgtcgcaatcacgtcgagggcgctccgctcccccgcggccggcagtccggcggcagagattcccgcagctggcattccaacggcggaggtgccggcggcggcctgtttgtcgccggccagccaccacgtcagcagggctgccagcagggcgccgagcaggaaaaagagagttttcgaggttttcataggcggttgcatcgggatttcacgttacggcaaatataaacgaaaaaatcgggaaatgcggcaggacgggtccaatcggtaaaaatgccgggtaaattaatcgttcccgtgtttggagggggtgcattttatcgttacctttgtccggatcatatcccagaaagaaaatgcacaaatcgggctttgtaaatatcatcggaaatcccaatgtcggaaaatcgacactgatgaacgctctggtcggcgaaaaactgtcgatcatcacctccaaggcacagaccacgcgccaccgcatcatgggcatcgtctccggcgaagatttccagatcgtctactccgacacgccgggcatcctcaaacccagttacaaactgcaggagtcgatgatgaaattcgtgaccggcgccgtgaccgacgccgacgtcatcctctacgtcaccgacaccgtggagcagggcgaccgttcggccgaaatcatcggccgcatccgggaaagcggcattccgaccgtcgtggtgatcaacaagatcgacctctcgacgcccgaagcgctcgacgcgctggtggacaagtggcggcaggagctgcccgaagcgcagatcgtacccgcatcggccaaggaaaacttcaatatcgaggggttgttcaaaaccatcctcgccctgctgcccgaaggtccggcgttctacccgaaagagacgctgacggacaagacactgcgtttcttcgcatcggaaatcatccgcgaaaagatcctcaaattctacgacaaggagatcccctactgctgcgaaatcgagatcgacagctacagggaggaaccgacgatcgaccgcatcgccgcgacgatctacgtcgcccgcgactcgcagaaaggcatcctgatcggccacaagggcgaaaagctcaagcgtgtgggacagaccgcacgcgaggacatggaggagttcctcggcaagaaggttttcctgcagcttttcgtcaaggtgagcgacgactggcgcaacaacgagcgccagctgcgccgtttcggatatgaattggaataaaccggaataataaacagcccgaaaagaacgttagagggacaagtgagtcggaaaatgcgtaaatatatcttgggaatcgcccttgccgccgcgctgatgtgcgggacgaaatcgtatgcacaatacaaccgggaatattttttctgggtcggacgttcgtgcatgatgaacaacgattaccaagaggccatccgcacgctcaacaccctgctgcgtttcgacgaaaacgccttcgaaggctatttcctgcgcggcatcgccaaatacaacctcgacgacctgctgggcgccgaagccgatttctcgaccgcgatccgcatgaatccggtctacacgcaggcctacacctaccgcgccatcacccgctcgcggctgggcaactacgacgacgcgctgcaggacttccgcgaagccatcgagctgcgtcccgacctgccgggaccttattacagccgcggcgtcacgcgtcttttgaaccagcagttcaccgaggccatcgacgatttcgacaagttcatccgtcaggagaacaaggtcgccgacgcctttatctgccgcggcctgagttacctgcacctcaaggacacggtccgcgcctacgacaatttcaacaccgccatccgcaccaaccgcgagaaccccaacggttacaaccgccggggcggtctctacatggagcagaagcgttatcccgaagccgaagccgacttcaacaaggcgatcgagtgcgactcgacctacctgctgtcatacttcaaccgggcgctggtctactcgaacaccaaccgcccgatgctggccttgtcggacttcgacaaggtgatccagctcgattcgaccaactcgctgacctacttcaaccgcgccatgctgcgcacgcagatcggcgactacaaccgcgcgctggaggattacgacaaagtggcgctctattcgcccaacaacgtgctggtatactacaaccgcgcgggcgtatacgcccagctgggcgagatcgaaaaagccgcagaggactatacctcggccatcaagctctatcccgacttcgccaacgcctatatctaccgcggccgcctgcgcgagctgctgcgcgacccgcagggcgccaagaaggaccgcgacacggcgcagaagaaaatcgcggaataccgctcgcgcctgagtgacagcacctattcgatattcgccgatacgacgcagcgcttcgaccgcctgctgtcattcgacagcaaattctcaggcggcagtttcgaccgcgtgacgggccacaacggcggacgcgaagagatgcgcctgctgccgctgttcaaattcacgctgatgcgccccgacaccgtgccggccgtggagcgttaccacgtgcagcgcgtcgaagacttcaagaaacgcgtggacaacgaattcctgacgctttcgtggcgcgaaaccaacattgcgcccgacacgctcgtgatgctcgacaagcagtatgtcgaggagctgaaagcggcggaaacctcgtggacggtgctcttcgagcgcggcgtctcgcaggcgctcatcaagcagtacaccaatgccgtcaataccttctcgtcggccatcgagctgaatccgagcaacccgttcctctacctgaaccgctcgaccacgcgcgccgagatgatcgacttcatctcgtcgatcgacaactcctaccagcgcatcaccatcgactcggacccggcgaaccggctgaacaacaacagcaaacgcacgtacagctacgacgaggcggtagccgacctgaacaaggccatcaagctcttccccgatctggcctacagctactacaaccgtgcgaacctgcgggccttgtcgggaagcctgcccgaagcgttcgaagactacacgaaggccatcgaactcaaccccaatttcgccgaggcgtattacaaccgcggcatcatacagatattcatgaaggacacgcgcaaagggtgtctcgacatttcgaaggccggcgaactgggtatcgtcgaggcttacgaggtgctgaaacgttacgcgccgacggacaagtaagctaactcaaatcaaataactatgacggaaattatccaacgaaaactcaacgattcggcattcgtccgctggacggcgctgattctgatcgcgctgacgatgttcttcggctacatgttcgtagacatgatgtcgccgctgcagagcatgatcgaggcccagcgcggctggacgcccgacgtcttcggcatgtacggaagttcggagttcattttcaacgtcttcggattcctgattctggcgggcatcatcctcgacaagatgggcatacgcttcacgggagtgctctcggcgtccctgatgttcatcggcgccagcatcaagtattacggagtgagcgacgccttcatcggttcgggcatcgaaacgtggctcaacagctggtgggtatcgtttccgggcagcgccaaactcgcatcgctgggattcatgatcttcggctgcggcatggagatggccggcatcaccgtatcgaagaccatcgccaaatggttcgaaggcaaggagatggcactggccatgggactcgaaatggccatcgcccgcgtgggcgtattcgccgtgttcaccatctcgccgtggctggccaacatggcgccggcaacggtcgtacgtccggtggcgttctgcaccctgctgctgctgatcggcctgctgacctacgtggtctttacgttcatggaccgcaagctggacaaacagctgggactcgacgccaaaggcaacaacagctcggaagaggagttccgcgtcagcgacctcggcaaaatattcggcagcaaggtcttctggatcgtcgccatgctctgcgtgctctactactcggcgatcttccccttccagcgtttcgccacgaacatgctggagagcaacctcggcgtctcggcccagacggccgccgacatcttccgctggttcccgatgggcgccgcggccatcacgccgctgctcggcagctacctcgaccataagggcaagggcgctacgatgctgatcttcggtgcaatcctgatgacggtctgccacctgatcttcgccttcgtactcccggcctatccgagcacgctgatcgcctacggcgcgatcatcattctcggcatctcgttctcgctggttcccgcggccctctggccctcggttcccaagatcatggagacccgctatctgggttcggcatactcgctgatcttctggattcagaacatcgggctgtgcctcttcccggccgtgatcggctatgcgctcaaattcagcaaccccggccatatcgacggtacggcctacaactatacgcttccgatggtgatcttcgcaagctgcggcgtcgtcgccatgctgctcggcatatggctcaaagccgaggaccgcaggaaacattacgggcttgaactgcccaatatcaagaagtagccaaactacgataagtaaatgaagaggaagggctgtcgtgcgatgcacgacggccctttataatttactgctacatagcccgttaatcgtacagtgccgaagcggcggcaccgcgccggaagacgaaaaaaagcagaaggttgctgtttgtaatattttttactatatttacagccaagttgttaggttaaaacaaacaggataaaacgtaaaaatcagcgtaacgaacttacagtttgttacttcagacttcgcacccggcggaaccggggcggatacggtttgttcgattaaaacgaaaaaacaatgtgtgatcccatcaaatcaatcgccaaccgcctgcgcggactgcgtgaagtgctcgaactctcggcgcaggaggtggcggagagctgtcatctccgggtcgaagagtatatggcgctggagagcggcgaaagcgacatctcggtaaacgtcctgcagaccatagcccgccgttacggaatcagtctggacgtgctcatgttcggcgaagagccaaagatgaacgcctatttcatcacccgtgcgggtgcgggcgtgtcggtcgaacggcgcaaagcctacaagtacgaagcgctggcgtcgggattccgcgaccggaaagccgatcctttcatcgtgacggtagaacccgctccgaccgacgccccgatgcacctgaacagtcacgaggggcaggagatgaactacgtgctcgaagggcgtctgctgctgagcctgaacgggaaagaattggtgttgaacgtcggtgacagtctctatttcgattccagcctgccgcacggaatgaaggcgctcgacgggcggccggtccgctttctggcgataatcatgtaagctatggtagagagattcttacagcaaacggccttccgctcgcaggaggattacagaaagaacctgcatatccgcgtcccggagaatttcaacttcgcgtatgacgtggtggacgcctacgcggaggaacagcccgaccggaaagcgctgctctggacgaacgatcagggtgcggagattcagttcacgttcgccgacatgaagcgggagaccgaccgcacggcctcctatttccagagtctcggcatcggaaagggcgacgtggtgatgctgattctcaaacggagatacgaattctggttttcgatcctcgccctgcacaagctgggggcggtcgtgattccggcgactcacctgctgaccaagaaagacgtcgtgtaccggtgcaacacggccggaatcaaggcgatcgtcgcggcgggcgaacgggtgatcaccgaccacgtggcggcggccatgccggaaagcccgacgaccgagctgctgataagcgtcgggccggaaattcccgaaggattcctcgatttccacgcgggaatcgcaaacgccgcccctttcgtgcgtccgcagcgggtgaacgccaacgacgatatcatgatgatgtacttcacatcggggaccacgggcgaacctaaaatggtggcgcacgacttcacctatccgctggggcatatcagcacggggtgtttttggcacaacctgcacgacgggagcctgcacctgacgatcgccgacacgggatgggcgaaggccgcttggggcaagctgtacgggcaatggctggccggagccaatattttcgtctacgaccacgagaaatttacgccggcggacatcctgcacaagatcgagcagtaccgcatcacctcgctgtgcgccccacccactatctaccgctttctgatccgcgaagacctctcgaaatacgacctctcgtcgctcgaatactgcaccacggccggagaagcattgaacggagccgtctacgacaccttcaagcagctgacgggcgtccgtctgatggagggtttcgggcagaccgaaacgacgctcacgctcgccacattcccgtggatggagccgaagcccggcagcatgggtgtgcccaacccccagtacgaaatcgacctgctgacgcccgacggacgttcggccgaggacggcgaacaggggcagatcgtgatccgcaccgacaagggaaaaccgctggggctgttcaaggagtactacctgaacgacgaactcacgcgcgaggtctggcacgacggagtttactacacgggcgacgtggcatggcgcgacgaggacggctatttctggttcgtcgggcgtgccgacgacgtgatcaagagttcgggctaccgcatcggccccttcgaggtggagagcgcgctgatgacccaccccgccgtggtggagtgcgccattacgggcgtgcccgacgaaatccgcggacaggtggtcaaggcgacgatcatcctcggcgaaaagtacaaggcgcaggccggagaagcgctgatcaaagagctgcagaaccacgtgaagcggatcacagcgccctacaagtatccgcgcatcatcgaattcgtggaagagctgcccaagacgatcagcggcaaaatccgccgcaaggagattcgcaacggggatgaaaaacggtaatccccgccggggcggacctatccgccggtagatttccggagccagccggatatcagaacccggctgaattgccctgaatctgcaggttgtccggagttttcgggttacccggagttttcgtgctgcagttcgggaacttggccgggcgctgttcctgcgaccgaggtccggctccgccgcgatatacccccccctctttctattccgatcgcctgaaacaaatgtttcgggcgatcgagtttttccgcatcggagggtcgtcacgatccggcacgcccgcgccagcatctcgatacgctccgcaacgactcgatgcggccctccaatgccccacgggatcagcatactcgcaggatcagcggacctgccgatcagcggacccgttcgtacagctccgtgatgcggctgcacatctcttcccacgaaaaacgcttgcgctcctcgatgcagttcagtcggaaacgctcgaccgcgtcaccctcgtacatcttcgcaacggcttcggcgacgccccgcgccgtcggttcgcacacataccctacccgtccgtcgggcacgatctcggccagccccccgacatcggtgacgaccatcggaacgcaaaactgataggcgatctgcgtcacgccgctctgcgtggccgttttatagggctgcacgacgaaatcggcggccgaaaaatagtatttcacctgctcgtcgggaataaagcggtcgtgaagaatcacgtcgtcctgcaagccgttgtcggcgatctgacgcaggtaacgctccttcggggtgtagaattcgccggcgacgatgagtttgcgcccttcggcgcgccccgcgcgtttcaattcggcccacgcatcgagcagcagatcaagccccttgtaatcgcggatcaggccgaaaaacagcgcgtagcccaccgcaggatcgagtcccagccggacgcacgcttcggagcgcgccacccgctcgccgaaattttcgaacagcggatgcggcgagaagagcgccggagccttgctgtaggcttccagttcgcggtgcacctgctcggacatatagacgaagccgtctacggcccgcaggtagtaacggttgaagggcttatcggtcagatggcgttcatgcggctcgacattgtcgatctggcagaggaccttcgtatggccgttgccgcgcgcgatgcgcgcgatggtgccgaagcagggcgccatgaagggcgtccagtacttcatcagcacgaagtcgggccgctcccggcggatgcgccggcccacgcggagccagttgaagggattgaccgtattgacgcaccggcagatgtcgaggtcggcgggaggcggcgtatcgacggtctggctcttgccggggaagagcagcgaaggatattgcagcgtgaaggttttgatatcgacctcgttgccccgcagccggaacgtgcgggccatgatctccatgatcgaagccaatcccccgcggtaggggtgcgcaggtcctaaaatcgtaattttcatagtacaaatataggaaaatatgcgacatggcaaccgttttcccgctctttatcgccgacgcagagggcgcatcggcggatcggccgcccgcaggcacggaaaatccccgccgaagcggggacttcccgtgccgcagaaggcagaaacgcatatacgattaaaaaccggaatccggcccggaaggcatccgcggtaccggtccggcaggacggactattctccgtcgccggggtgtccgaagctcttggcggcgtgcttgcttcccgcggcggattgcagcgcgaggtactcctcgccgtagtcgagtacgttttgcagttcggtgcggaaggtgtcgaggtgctgctcctcctcggcgatgatgtcctgaaacatcttgtgcgtgacggcgtccttgtgctcggaagcgatgcgcgaagcctcgttgtaggaatctatggtgctctgctccagctgcagcgccaaacggagcatgtccttgacgtcggtcacctgccgggtgcggaacgaagcgttcatatcgacgtcgccctgcaggaagaggatgcggtcggagaactcctcgatatggcgcatctcggcgatcgagatttcgcgcatgatcttcgaaaggtactgatagcggtcatcctcgaaatgggtgtggaaatacatgtactggagtgaagtggcgatctccttgcccacggcatcgttcagcaggtcgatgctcacctgatacttgttttgtgttttaactgcgttttccataatgaaaaaggttttgcagccgtaactgcaaaacccgttccacgaagcagatgcgggacacgccccgcaggcttatttccactcgatagaggcgcgcacggccggagtgccctcgtcgctgcgtatctcgaaaagcgccgtgcggccgcgctgctcgtaaccgacgctaagcgtctggccgtaacggcattcgcgcaggaaatggatgtcgaagcgcaccggcgtctcctgcatgagcagttcgacaggcagcatgtcgatcatcatttcgatatagcgcatcgtattgacgtggcggttgaagtcgatgtcgctgtagaccaccttgtgttcgaccgtctgcgcaggattcacctcgcggatcttgcggggcttgtcggtcggcgacggggcgtcgacgatggcgtcggcatgggcgtcgcccacccacgacagatcgagcgccgaacggctccgaaggtcgatcatcgcccactgcgtcacggcgcggccgaattcggtccccgcggcatcggtcagcgtgaagttacgcgtggagagcacccggccgtattcgttgatccacgtggcgatcgtataatcggtatactgcgtgggctggctgtcaaattcgacagccatgcgcgagaggacccacgagtggttgtcggcattcagcgcgtccacgccgaagcccttgccgtgggcgtcgacgcccgccgtattgaggatcgccgaaccgagcgagggaatcgtagccctcagcgtgaaatccacgtcctgcggttcgacacggtaattataatgcgatttttctgccatattgctgatttttaacgttgcgtcccggcaaagatacgttttttgcagatattttcatatatttgtttgactattaacccttattaaaaatcgttagttatggaaatgaagaaactcgacttctcggaaacgctgaaggattcgatcgccatcggcgtgaaaaacgccccgtcggtggtcgtggcagtggccttgtggctcgtgacgatctgggtaccctatatcaatatagggacgaccatcgccatcagcctgctgccggtcgaactggccaaaggcagcgtaatcaacccgctcggaattttcgacagcaaataccgccgctacatgggcgagtacctcatcacggccggcctgatggtgattccgatctacatcgccttcgtattcatgatcgtgccgggcatcgtgctgtccctgtcatgggcgctttcgttctatttcctgctcggcaagggcaaaaatccgatgcaggccatcaaggcgtcgaacgacgcgacgtacggcagcaagtggacgatgtttctcgtgacgctggtattcggcatcatggtgggcatcgtattcggcatcttgttcgccatctgtctggccatcaacgtcggcttcatcaccttcctcgttatgttcgtcctgatcgtgctcgcggcttcgatccggatggcgatcgacgcatcgttctggaaacagctgaaagacaacgtggaataagtttacggcactatttcccaaagacggcctgcgggtcgtctttttttgtctcggaccaaatattttatcgaaaaacgataaatattatttgtttttcgaaaataaatactaaatttgcactatcgaaacttaaaaaccgaaggtatgcagaacaaaaagagactgcacaaacatttgctgatgatctacatcatctacttcgcggcgctgatcgtcggcttcgccgcgagtttcgtgcccgacttttcgcggggatggcgcaacgcgcagaatacgctggagatggaaattccgcagggaggcatacgctcctactacgtttcggctccggtcatccgctccgccggcgaacccataggcatcgacaacctgccggagaacatcaccccgacgatcagccgtctcgacctgaaggtgaccgtggacgaagcctacacgctgggcaacgcgttcaaggtgatgggcaacaacagcttctgctacctgctgatggtcatcacgggcctttcgtacctgacgatcctcgtactgatcgcgctgatcatcaactcgctccgcaagtcgatccgcgacgagcagccgctgcgccacagcaacatccttcgcacgcgcgccatcggcatcctgatcctcgtgggcgagttgagcgaagccttcatgaagtacctcaacaacaacgaggccgtccgcctgctcgaaggcacctccttcgaagtcgtgcagacatttccgctgagttactggaacgtgatcgtcggcattctgttcctcttcatggccgaagtgctctcactcggcacgcagctcagcgaagagcagaaactgactatctaaaaacaacgtaattaccatgataacgacaggaacgacaaataacgggggggggacgacattatggctataatcatcaacatagacgtcatgatggcaaagcgcaagatgtcactcggcgagcttgccgaacgtgtggacatcacgcccgccaacctctcgatcctcaaaaacgggaaagcgaaagccatccggttctcgacgctcgaagcgatctgccgcgagctggactgccagccgggagacatcatcgaataccgcccggaccagccgtcggaagagtaacaaaaacccctttatacgatcaattatgagaaaaatcaccatgctcgtcatcgcggcattcgcagtgacaagcgcagcggcccagttcaatccgcagcagccgattccggcggacaaggacgtccgcacgggcaagctcgaaaacggaatgacctactacatccgccacaacgaaaagccgaaaggacaggccgacttctacattctgcacgacgtcggcgccattcaggagaacgattcccagcagggtctcgcccacttcctcgaacacatggccttcaacggaaccaagaacctccccggcaagatgctgacggagtatctcgaaaaagtaggcgtgaaattcggcgccaacctcaatgccggcaccggctgggaccagacgacctacatgatgaaggacgtccccacttcgcgcgaaggcatcattgacagcgcactgctgatcctgcacgactggtcgcacttcatcgcgctcgaacctgaggagatcgactccgagcgcggcgtcatcatggaggagctgcgcacccgcgacggcgcgtcgtggcgttcgaccatgaagatgcttcaggcgctcggtaaggacacaaaatacgagcaccgcaacctgatcggctacctcgacggactgaagggcttccaccacaaggagctggaggacttctacaaccagtggtaccgccccgactatcaggcggtcgtcgtggtcggtgacatcgacgtggatgccgtagaaaacaagatcaagacgctcatgagcgacattccggctcctgcggccgacgccgcccggaaggagacgatcaccgttcccgacaatgaggacccgatcatcagcatctacaccgatcccgaaatgcagggttccaaaatccagctcttcgtgaagcgtccggcgcttcccgaacagatgaacaacctgatatacggcgaaatgttcgacgtcatacaggcctacatgaccaccatggaaaacgcacgtctgcaggagatttcgatgaaacccgacgcaccgttcctcggcgcaggcatgggttcgggcgaaatcggcgtgattccgacgctcaacgcgacgacgttcgtggccatgacgcaggacggcaaactggccgaaggtttcgaagccatctacaccgaaatggagaaagtccgccgctacggcttcacgcagggcgaattcgaacgcgcccagaacgacctgatgcgccgcgccgaacgcgcctacgccaaccgcaacgaccgccgcaacggcgagttcgtacagacctatctgaacaactactcgaagaacaccccgatgcccgacgccgagaccgagtggcagctggacagcatgctgatcaagatgatcaacgtcgaggcggtcaacggattcgcccagcaggtcatatatccccgcaatcaggtgatcgtcgtcacggcgcccgaaaaggagggcatcgtgaatccgacggccgaggagctgctcgccatccgcgagaaagtcgccaacaccgagatcgaggcgtatgaggacaacaccgtcaaggagccgctgatcccggaaggcaccgtactgaaaggttcgcccgtaaagaaaacggcacaggacgccacgctcggcacgaccgagtggacgctcgccaacggcgtgaaggtagtcgtgaagcccacgacctacaaggccgacgaggtgcgcatgagcgccgtggccaaaggcggactgtcgatcctctcggacgaggagttctacatgggcgagatgatgcccgcattcaactcgatgtcgggcgtcggcaaattctcggcgacggatctcaagaaacagctttcgggcaagtcggcttcggttcagccctcggtagagaactatgccagcgccgtgaacggctactgctcgcccaaagacctcgaaacgatgatgcagctgctctacctgaatttcacgcagccgcgcttcgaccagaacgactacaacacgctgatgaagatgctgcgctcgcagctcgacaacgtgaagtcgaatcccgactacctgatggaggagaaattcatcgacgtggcctacggcaacaacccgcgccgccagatgatttcgaccgagatcatcgacaagttcaacttcgaagccctgccggcgatctacagaaagctctatccggatgccaacagctttacgttcaccatcgtgggcaatgtggacctcgacgcgctgaaaccgctcgtggagaagtatatcggttcgattcccgtgtcgaagaaggccatgacgttcgctgacgacaagtgcgcccccgtcaagggcgacgtgacggaggagtttacggcgccgatgcagcagccgaaagtctcggtacactacatgttctccggcaagatgccctacacgctcaaggacaaagcggccctgacgttcctcacgcaggcgctcaactcgcgctacctgatttcgatccgcgaggagaagggcggcacgtacggcgtgcaggtttcgggttcgaccgagtatatccccgacgagacctacaagctggatatccgcttcgacacgaacgaagagatggccgacgagctgcgcgagatcgtgatgaaggagatccgggagatcgccgagaacggccccaagaccgaggacatcgagaagaaccgcgaattcatgctcaagagctggaaaaacagtctggagcagaacgccggctggatgaactacattcaggccaaatacggtccgggactggaatacctgaaagattacgagcaggtgatcaggtcgctcaccaacgccgacgtacaggccatggccaagaaggtcctcggcgacaacaacctcgtgaaggtcgtcatgcgccccgcgaaggaaaaggccgaataacacacctgaatccgctgaaaaagccagccgccacaacggctggctttttatttgtcagcccggcgaaaaacattaactttgcagacaattaaaacaatcagttatcacctatgcgccaaagtcttcggctggtttccggcctgtatctcaaacttagcctgctcacaatcgctgtaggcttcctgttacgcatcgtactgctcttcaacgagcagaccaccgacctcggtttctcattcggcgaatggctgcaggttttcctgctgggcgccgtgaacgacctctgcgccgcgacgatcggattcgtgttcctatggctcttctcgatgagcgtctccgaaaccaagtacggcaaaccgtggggctacatcatcctcggaattctcgttgcggcattctgctacgtgaccttctgcaacacgatcttcgacgaatacggcagcgtcgcgccgcagatcgcctccgccgttctgggctattgggccggcacgttcgccctgcgtctctttttcaagggtttccgcacctactggaccacggtatggttcgcgctcatcatcacgctctacgtgggcgccatcctcttcaacggactcagcgaatacttcttctggagcgaattcggcgttcgctacaacttcattgcggtagactacctcgtctacaccaacgaggtggtcggcaacatcatggagtcctaccccgtcgtgccgatgacgctggggctgatcctcgtgacgctggtcgtgacatggtatctcttccgccgcgatctggccctcgccgaccggctgaaaggctggcgctggaaagcggtagcaggaccggcgtacatcgccgccgtgctcctcgccgtcggactgctgaacttcaacacccggtttcaggacagccagaacgtctatgtaaacgaactgcaagccaacggactctacaaattctacgacgcattcgtcaagaacgaactcaactacaagcagttctatctcaccgaacccgaagagcaggccgaagccttcgtccacgggatttacggcagcacgggcgacaacctgcacgccgtacgctgcgaaggacccgaaatccgccgcaacatcgtgctgattacgatcgagagcatgagcgcttcgttcatggagcgtttcggcaacacgaaccgcctgacgcccgtactcgactcgctttacaagcagggactcgccttcgaccgcgtatacgcgacgggcaaccgcacggtgcgcggactggaagccgtaaccctctcgctgccgccctgccccggccagagcatcatcaagcggccgaacaacgccggcatgcactccacgggtgcgctgctgcgcgaaaagggctataacgtcaagtatttctacggcggcaacagctacttcgacaacatggagaccttcttttcgggcaacggctacgacatcgtggaccagcggcagtatgcgcccgaagagatcactttcgccaacatctggggcgtatgcgacgaagacgcctaccgcaaggtcatccgcacgctcaacgaagacgcgcagagcggcaagcccttcttcgcccacgtcatgacggtcagcaaccaccgccccttcacctacccggccggaaagatcagcattccccacgactcgaagtcccgcaacggcggcgtgatgtataccgactacgccctcggtgagttcttcgcggaggcttcgcggcagccgtggttcgacaacacgattttcctcgtcacggcggaccactgcgcatcgagcgccggccgcaccgagattccgctgaacaagtaccacattccggccctgatctacgctccgggcttcgtggagccgcagtgcgtcgacggcatcgtctcgcagatcgacctgatgccgacgctcctctcgctgctcaacatgagctacgactcgcacttcttcggccgcagcatatacgacgaacagtacgtcaaccgcgcattcatcgccacctatcaggatctgggctacctcgaaggcgacgtgttcaccatcctctcgcccgtgcggcggttcgagcaataccgcgtcgttccgacggcggagaatccgcacaacctcgaaccgatggaagagaagaaccgggagctggtaacccgcgccgtcggctattaccagacttcgggcgaatggaacaaacgctgagaaacggacaaaaagagagacccgtcgttgcaaattgcaacgacgggtctctcttttacggtcggatccgctacttctcgacgacggtaacgtccctgtccgtattcagcgtcagctgataggtcccataattacccgaaccgttcgtgaacttggtgtagatcgccgtaaggttcaccacccagccgtcttcgggaatcttgttgtcgcggaactggctgtaaccgctcgtacgcaccacgtagttgcccggagccgcattggtaccggagccggtcgccgccgcgtcgtaggtaaaccatgccgagccgtagaaataggtctccgcattagcgccttccagcctgcgtttcgtagcccaagtcgcccactcgttgatgtccgaccagccgggagagttcacgtcgtacgacgtcgaattcgcaaaatagttggggaaggtattcttgtatccccacggcgccgtgccgaacttgctttccagcccttcgaaacgcaccagacggcccagatcggcatccgaaatcgccgtcttgtagttatccttggtaacgaccagcgtatccgacttcagcatctgctgctgttcgccggagaaaatgtgctcgtcctgcatgatcttgctctcgatgttgtcattcgaatagctggcgttggaggaggtcgtaccgatgctggtcataccgcggtagttgccgagcaccagcccctgcagtttgacgaaaacgatctgtcccgcggggtggaaaaggtagttgcccgtattgagcttaagctcgatcgccgattcggactccgcatcgtagaggtagaccgatttatagacattgccgtaacggtcggtggagatgaccttgccggaggtgaaaatcggctcatccaccgtccacgaagcgaccgtcccgtcgttcatgccgggattctcggctttgaactgcgccttcaggtccttgatcgatatatattccagcccctctttctcgaaatcggcgcgggtatatatcttggccgccttcgggttcctgtaatcgttgtaacagccaacgaagaacagccctgccgcggcgatcagaaacagtttagatactttgttcataatattcgtgttttattcgttagccgtcagaaacggaagtagagattgaggtaataggtcgtaccgaacatgtagaaatacttcgagtcgaaggcctgataggtagtcaccgtcgtctcggtgttcttcgtcagacgggtctgctcgtaacctccggtgcggatgtcctgattgttcaggatattcttgacttcgaggctgaagcccagcgtatactggcggtggatataccagttcttgccgatgctggcgttgagcgtataagccgaatcgaacttctcctgacggcgcaggtgagcgatgtcctcggcggtcatgccggtggtaatcaccgcatcggtgcgatagatcgggctcatcgacagatacatgttgttgtaatagttgaaatcggccgacaggaagatgttgttgttgctgcggtacgaaagaccgacattggcggccagctgcggggtgctctcgacgcggaagttcttccagtaaacatagccgtcggagacgatatcgccgctgttgtcctgcgtctgcaggtaatagggattcgaatcgtaggtgtactggccccagctcacggctccgttcagggcaaggctgcggtacaggggaatcgaaacggccgcttcgagaccgaagtggagcttgtcgataccgctcatggcgaagttcgtgaaggtcgcggccacgtcgtcgtagtacgaaatcactttcgactgatcgtaaatgcgggtatagtaaccggaaacgcgcgctttcaggtcgccgacacgcaggttatacgacgcatccacaccgaagacacgttcggcggaaagccccggagtcgtggtgttgcgcgtacggggcgacacgaacgaagcttggaattcgggggcgtcctgcaggtaaacgacattcgcttcgacggtatgagccgcggagaagcggtagctgaagttgcctttggccttgtaggtcaggtagtcgagtttcttggaatcgcccttcgaattgtcggggaacaagcctttgcgccaaagaccctcgcgccattgcgaagcatatcccacttcgccgccgacggttacgcccagaccgccgacattgaaattataggcagcccatgccttcgtccggaggacgtgcgcatagtagtcatagccgtatttgtcgccgactttggctgcgtgcgcatgaccgtggcgatagtaatagtcgaggttgttctgatatgcgatggcgttcgaaccgaagtcgcgctcggcgaatttgtcgatgtcggcccaatagtcgccgccaagcaggtctttgacctccgaatagtactccgtacggttccggcgcagcgaaaggcctccgtagattttggagttattgcggaagatatgcgagaagttggcaaccagattccagtccagctgatcggtgtgacgctcttcgaccatatagttagaacgacggcccggaccgtactgcgcctcatcgaccggatcgttctggatatagttcgtctgatacatcttatcccagtcgaaatggcggatattctggtagttggcctgccagtaaacctgctgccaagccgcacccagcatattcttgtcgagcgcgaagtagctcggcagataacggtaatagtccggacgcgggtcgggaccgttctgccacgtcagcgccgagtaaccgttcatgccgaagcgcagcgaggtggccagatcgagtttcgagcggtccgaaatgtcgaatgtatagttcagcatcacgacgggttcgtggttgttgcgcacacgggcgttacgtttcttgccgtcctgccagccccagttggggttgtaatagttattgccgaccagatcgtaagcttcctgcgtcgccgcctgctgcgcaccgcgttcggtaggagcgcccagcagggtcagcgccagacgatgacgctggccgaactgcttctcgacagcggcgaaataaccgaaagcgttgtaatagacgccattgacataggagttgccgccctgacgggtcgaaaccgaaaaggcatacgaccagccgttgtcctgatggcccgaagcataggtgaccatcgcgcggaaacggtacatcgaattgccgtttacgaggctcgcacgcaggccttgacgcatctgcgaaggactcgtcacgatattggtcgtaccgccgatgccgcccagaccggcgtccgacgccacgatgcccgacgtaacttcctgattgcgggtagcgtcgttcagaccgctccacaacgaccacggcgtatagcccgtcatggcgtcgttgagctgaatgccgttcatatacacgtcctgatactgcgaatcgtaaccgcggacgttgaaacgcatttcgctgaacttgtaggacgcgatgttattgaagaggtctttcgaagccgagagcgacgtgggcaaagcctgcgcgtcgtcggtggtttcggtgtcgaactccgcgaagaccgcgtcgtcgatcatctgacgctgcgtatcgggcacgaggatcaccgcattgatgtcgcgcatctgcgaaccgacacgtacggcgatattcgaagtctcgaattcgggagtttcgaactgcagcgaatattcgcccgcaggaatattttcgaaaacgaagttaccctgcgcatccgaaaccgttgtcgtaccgcccggcgtcatcgtaatcttcacgtcgccgagtgcaatgcgtcccgcacgcgaaacgaccctgcccttgatgccgccgtcctgtccaaaggcggtcagcgtcacaagcgacagcactaaaattagtagactcttgattttcatagactatgtaagtaatttatttggcaaaatagatatacaccgggaagtggtcgctgtaaccgccctgaaagttatttcccacgtacgtacgcaggggatatcccttatactgtccctctttctgcagcatgtagtaccgcttgaagatattgccgtagaacttcgatccgggagccttctgcaaacgaagtctgccttcggaacccgtagccagattctccgtgaccacgatattgtcgaagagattccatgcgtcgccgtaagccagcgttccgagtcccgccttgagcatatcggcaaagggattgtaaaaatcgcccggcttgagatccttcatcttggctttggcacccaaaccctcggcaatgctctcgtccgtaggatcgtcgttgaagtcgcccatggctacgaccttggtcgccgggttgatcttcagcacggaatccgcaatgcggcgcatctgctccccgacggcaatgcgcttgaattccgaagcgtccttgccgcccagccgcgaaggccagtgcgccaccataaagaagaagggttcgttctcgatggttccccacatcgtcaggatgtcacgggtcttgaagttgggaagctgcggcacgacggttttcaccgggaaactgccctccagtttgaacacatcgggacgatacatgaaggccacatcgacgccgcgggcttcgggcgaatcgtaatgcacgatacggtagttgccgggggccaatttgggcgtcgccacgatgtcctccagcaccgagcgcgtctcgacctccgagacgccgataacagccggataattcttgtctgcggcagcaacgtcgaaaagcacccgctcgatattgccgagcttcttgtaatacttggcggaattccacttcttggggccttccggcgtgaactcgtcgtcatgcacctccggatcgttgatggtgtcgaaaaagttctccaagttatagaacatcaccttgtagggcttctgcgcaaagcacattacgacgaacgccgccaagaacaaagtgaatatcagtcgttttttcatcgttctgaaattttaaggttttacaatccccaagaggcggcatccttctgcgtcttgacctcggcaggcagcgtggggaagaattcgaacttggtcagctcttcgatctccttgacgctcttcacccagcttttggcctcaccctgaccgccttcgttggccacccagaaaccgatggacttgagctggccggccggaagattgcccagccggtcgccgggctgccggatatttcccttcaccgtacgcaccaccactttaaaataatggctgggcagcgggcacacctgtccggccttgtcggtcgtcgatgccgtgctgccgggcttccaataggcgcccgtcactacgtagagcgtatcggagcagacccagtcgcgcaccttgccttcaagacgcatccacccctgctgattgagcgtgccatactgaggcgtagcgttggagttgtagaatgtctggtactgcatggccatattggcattgcggtctgcattcggaatctggtgaccacggtcataagatccggtataactgccccgtcccagatcggcctgaaataacgacgaaatcttgggatcgaaggcccacgggtctttggaaggacgccccgaaccgatatatacgtcgtgcaggggatatgccacccaccatgcaccgcgcttcgtcttatcgaaacacaacgtgtaattacgcatattccggttgttgagctgagcgaaatgcgacacataaatatagttgccgtcctccttcttcgccggaatttcgggccagaccagattatggccggtctcgtatacatcatcgtccgacgaagtgctgaactggacgagttcaagctcgacgggcatctcgccttcgaactcgaacctgatcagggcatgccgctcgtccttggtgttgttcggccaataatagacatactgattcttgtcggacaaactcgttccgacctttcccgtcttgacagtctgacctcccggcgctgtccggttgaacgaaatccattcggctcccgaaatgatttcagccgtccacggcgtccccgtatctccggtcacgagcagcacggcagcgccctcctgatcgggatgcacggtcttggcagggtcccactccaccgagttggcgcccccgcctcccttattgtcggaatccttaccgcaccccgtaaaggcgacagctatcagcaccatcgccgcaaggaaagcggcaaacatccgcgaactatatttatatatcaacgtcattcaattaaaaactaagtgcgaaaatacgcattttaagacaaccttcccccggcaggatttcctgccgggagagggaatgtcgatattcggttattcgtacgacaattcgactttaacgagctgcgtattcttattcgaagaattgatacggtacgaaactccggcggcaggattcgtaagattaaaggtatattcggtattcttgtcgccgacagcctgttccggagatgcaatgttattcgaagtatccttaatagttacctttgccgaagcactgatgccgttgctggtcgtaatcttgatcgtcttcagagtcgatccgggaacggcgggagtcgccaaataaccattggtgccgttaatcataaggtatcccgcattctgtttcgcattgagcaatccccagacataaccgtctatagtaaccgtagcttcggttgaaggcgctgtagccgggaaaccggaatcagcagtagtcggagtaatcgtaatcgtgagttttgtccctgagctggcgccattctgggtcaaagtaaccgtagctgtgttgccgccattagccgtaattgtcagagtctctttaagctcggcatcactcgtattaacggctttaggcgaaatctttacggtagtcccctcgacagacgcattgaaggaagtcagcgaagacaacgtaaatccattgaagttaacaccttcgatcgtcacggtcttttcacttgtgtcgtttgcagtccatactaatgaagagggagttacctccgtaatggtcggaacagttaccttgaatgcttccacatcgttcaaattacgcggagcgatctggccctttccgccatacatggtcacaatacccgtgatattgcctgtagcagctgcatacggaatatcctgaaataccgtagcacgcttatttacgtttacagtaaagttcgtaccgccagaggtaaacgtgtgatttccattgcttgatgccgtacaccagactcctgctttagccgtgctggcttgctgtaccgtggcaggcatcgagacaaacgaggccaaatcggcaggagctacgttgatcggggtaacggtcgccgtaccggatttctcaacatgataagtcgttacacccgtaatctgcttgacgccgttatactcatccatcatcgcgacgttggcctgaagtgtaatcttcaatctatcaccaagtgcataatccgcaacattgaagtccgccgacttattgttgtaaatcacaataccgttgcctccctcggtcgccccctccgtcatcacatagagtgttccgaacgagaagttattgccggtcgggtctccgcagaccacagccgtcagcactttgtcctgactttccgagattacacttcctttggcaatctgcaacaattcagggatagtgatcgcggtcacgctgccaccgcctgtggtaatgaacgtcttatgatcgccgtaaagaatatcgccggtgttcggagtcgcgtaggcgcggaaagcgtactgcgtctccttcgtcaggccggtaacgtctacggtccatgtcgcagccttcgttgcggccggaactttcacggagccggtccaatcgggcgtatttcccgtggcgaagaccacatactccacgccgacggccgaatagtcggccagatcggcattggcgatcgagccgcccagcgtcaccgtcgtctcggctacattcgaagcgttggccgtcgtaaccgcaggcgtagcggcaccgccgttgaatgcggccagatcagcggcgttgcggggtgcaatctgccccttgccgtcgaatatcgtagcgatacccgaaatcgtaccggtcgtcgcaacataggcgaaatcgaatccggtagccatcttattgaagttcacgacgaaatccgttcctgccgaagaaaccgtaacgttgctgagggtttcgggaacaggctgccatacaccgcccgtagaggtcgtggtattctccaccgtcacgggcataccgaagtaattctgtatagccgtaggagcaacctttacaggtgtaatcgcattattctgcgaaagaacttcgatatcggcttccgtcacaccggaaatctgatataccgaattgctgtaaagctgactcttcgcagtaccggctttcagcgtcaccttgatcttatcgccggtctcgaatttaccgtcgagatcgaagttgtaaagaacgataccgttcttaggatccgaagagccgggagtcatcaggtagttatatccgttgggatagttatggaacgtcttgtcgccgcagacaactgcttcgaacgtacggttcttgtcgttgtcgatcacggtagccgttccggtcatggcattgacgatttcgggaatcgtaatcggctcggtaaccacgccgctcgtcggaagatcgacctcctgaccgcctgcgcctgtcgttacgctcaggtcatcgacgcgcgttccgacgctgctggcaatgcggagcgacagttcggacacggcagtcttcagcgtaaagttgcagattacccatttgtatttggactctccggcaatcgattcgagttcataggtaaccgtcttccacgatccgccgtcgttgccgctcaacgaaagcgtgatatcgctcgcacctacggcggcattcgacgccatagcggcaaacttgatctggagtttcgtctcgccggattccagtttgagcttgttcacatcgaaatagccgttcgaagcgacccaaagggcgttcggaccggaaatagcatcggtgtcgggcgctccggtcttacggatacttgccttattccccgtataggtagtctgagcggttacacccgaaccatcgcggagataatcgttgaactgagccacatccgtattttcactaacgggattcgtaccgaagttttcgaagagaatatcgctcgacgcaatcttttgttttacagtgacggtcttcgtattcgttccgtcggttacggtcagcgtaccgagggtaacctcggcattcgtctcattggccttcgacgccgtaatcgtcacggtgccgttctgcgaacccttgtcgggatcgaacgtaaagccgtcgcccgaagctttggcaaccgtccaatcgccgttgctggtgactgcgaacgttccggtggaaccggctgccgcgttaagactgacggtttcgggatcaacggataggatgggatcgttcgaaacgaaagcggccacatccgacggtttggtcggaatcagctggatattgttgaaattctgttcggcggtaccgagcatcggaccggtagcagccttaatatacagcattccgaaatcgggagcgtcggtggctgtggccatgtagctctggaccgtcgtcgaagagggaccgtcgagtacgactttgcgcttggcaccggtagcccaagcctcgccgacataggccgactgcggcgtaaggtcgttcacacgcacgtactggccctgataattacccgaattgaacgttgcggcggaaagcgacgggataacaagctcgaccggatcatcgtccgatacggttaccgtcacgcccttcaactcacgcagattcccgaagggagcgtattcggcgccggacagttcgagcgtgactttcttgcctacgggatagtttacgctgttagccttggtgaactccttcgtatcgtaaaggacgatagccgagttgggcagcgagatgttatcgccgacatagagtttaccgaaattattgccatactcgttattggccagaatgaccgcttcgatggatgccttgctgtatcccagaggaacggtgttgccgctctccacgcctgcatgggtatccttgatgaaagcgaccagttcgctgactgcgccggccacgggagcctcaccctgctggatggtaaccgtcttggtgaaataggcgccgtaggagttcttgagctggaaactcagcgttgccgtacggctctcgttgcttgcggggatcgagaattcgacctcggtcgtaccggcttttccatcggtcgcggaaggcgtcacccagtctgcgcccgattcgaaagcgagcgtccacggacgattgcttttcaccgtaacggcagacgcaccttcggccacgccctcggcggaaaaggtcaatgcttcgggagcaacctcaagataaggcatcccgtcgtcatcgttatcatccacacacgatgtaaacgccgtcgcggcgatcaggaacatcgcaccgaacaataacctcaaaaggtttaactttttcatagaagagttgtttaaaattgattaaaaacttttattttatttctaaaaaaacttacgattccttacataatggtaatattatgcctcaaatttaaaattattttccggaccggcaaaagcataaacgccttttttatattacgattaggttaattagcggacatcggcgtccaatgcggacaccatcggagacaaaagccccggaatacgcacgtttctgcatattccggggctaatagtctttcgggatcaacggatgcggtcggcagcgcgcaccatcagttcgtcacggaaaaccgcacgtgcggcgaggtatgcgaaaagcaggcaaaccagcggcagcacgacggcaggtttcagcacctgcgtatggaacgtctgttccgcaaacacccggtaactgagaaagtagtacacgccttccataacggcggagccgacgagcagcaccatttccaccacgcagagccggagctggagcaggcggcgcttgaacaggaaaatcgtaataaacggcagcacgcaggccagcgccagcacgacgcccatataaaccgtcggctgcacggcttcgccggcagcggttttcaaagaaaaggcatacagcccgaactcgccggcctcgccggcgaaccacgcaagcggagcgaaaagcgtaacggccataagcgccgtgacaatcagcatgtaaagcgtttggattcgttgtatcatagggtcataaagttttatcgatcaaatatttgttcctgtcggaggagccgcggttgataagctcgcccaaaaatcccgccaaaaacagctggactccgaggataatcgccagaatcgccaaatagaaaagcggctgatcggtaaccgccctcagcggcagttcgtggacctgcttccagattttggcggcgatgatccagactgtcgtgccgccgccgataaggaacatcagcgttcccagactgccgaagaaatacatcggcgaacggccgaagtgcgacatgaagagtacggaaatcaggtcgagataacctttcagcatacgttcgagaccgaatttcgaacgaccgtatttgcgggcgcgatgctccaccggcttctcgccgatgcggcggaaaccggcttgcttggcaagtatcggaatgaaacgatgcatctcaccgtagacttcgatcgccttgacgaccttgcggcggtaggctttcaagccgcagttgaagtcgtgaagcccgattcccgacacggtgcgggccgtccagttgaaaaacttgctgggccagcgtttgccgatcggatcgtagcgcttcttcttccagcccgaaaccagatcgtatccctcttcgagaatcatcctgcgcaattcgggaatctcgtcgggcgaatcctgcaggtcggcgtccatcgtgatgacgacctccccttccgcagccgcgaaaccgcagtacaaggctgcggatttgccgtagttgcgggcgaacccgatgccccgcaccgccggatactgctttttgagggattcgacgacgctccacgaatcgtcggacgaaccgtcgtccaccaagataacttcgtaggcgtagccgtgctccgccgccacgcggtcgatccatgcgaccagttcgggcagcgattccgcctcgttgtagagcggcactacaaccgatatgtcgagtttattcatcttctgctttacagttcttactcaccggcctgcgtatcgaacggccgcggagcgcgcgaaagcacacctgcaatgataaggccgaaaacagcgccgaagagcaggcttacccagataccgccccagacggtcgcaagcaccgagggggcaggcgcggtctgaatctgctccagcgactgggccatcaccgactccatcgacgccggtacgccgccgcccaacgccatcatgtcggtcagcgcttcgaccagccgggaggtgtaattcgaatagcccatgatcaggtgcaggtagatatattgcacacctccgacgatgacgcccgcaaaggccgacaccgccagcacgaagagatatccctgtccgaaggagaatccctcctcggccgaatagagtttcgaacggtttcgcgtgaagcggtgcagcaggtaatagtgcaggacgacgactccgatccattcgaccgtcatcagggcatagtacttcatgctgcccgaaagcgtcatcatcgtctccaagatcatcgacacggccagtatggccccgataatcgcgccgcatttcgcagcatcgttccagaaattttgtttttccattatatcattccgaattatcagttcccaatcattgcagttcgcccttgccctcgcgcaggatttcgggttcgtcgcccgtgagatccacgaccgtcgtcggcacattgtcgccgacgccgccgtcgatcaccagcgccacgtcgcggccgtagcgctcgtggataagttcgggatcggtggtgtattcgaccacttcgtcgtcgtccttcaccgaggtggtgatcagcggacatcccagcgccgcgacgatggcccgcggaacggcattgccgggaatacggattccgatcgtacgccgtttttcgagcgccttgtcgggcatgcccgacgatgccgtcaatacgaacgtgaaaggccccggcaggttgcgcttcaggatacggaacgccgcattgtccacccggcagtactcggccgcctgagccagattttcgaaaaccaccgtaaaagcctctgcgtccttgcccttcatgcggcgcaaccgctcgatggccttgggcgaacgcagcgagcagccgaaagcatagacgctgtcggtcggatagatgatgattccgccgtcctccaacgcatcgaccaccttccgcaactccctttcggaggggttctgttcgtatattttcgtcagcatgaatacaaatgtacgaaaaattatttaatcttgcgccggttcagctccctgctgtacgcctgagcattggcgttgtgctcgcgcagggtcttcgcaaaattgtggtagccgtcgaacgtctcccgtgcgcagaagaaaatatagtcgtgtttttcgtaattcagcaccgcgtcgatggcattgatgcccggcatgcagataggcgacggcggcaggcccttgttcagataggtgttatacggagattcgtatttcagatgcttgtacaggatgcggcgcaggccgaaatcctgcatcgcgtatttgatcgtcgggtcggcctgcaggggcattccctttttcagccggttgacgtatacgccggcgatgcggggcatctcgtcggtcttgcgcgtctcctcatagacgatcgacgcaagggtcatgacttcgaaccggctcaggccgctgcgtttgcgcagcgcgtcccgctccggtgtccagaaacggtcgtattcgcgtttcatccgctccacgaactcttcgggcgtcaccgtccagtagaattcataggtgttgggaatgaacatcgaaaaaagggtcaggctgtcgaaacccgcttttcgggccacttcgccggaagtcagcgcctgcatgatcgcggcggaatcggcgtcgatctgaccggcgagtttctgcgccagctgggcgggaatccgcacgttgttgatcgtcacccgcacgggggtctgcatgcccagtttgagcatccgggccacccggatgacgctcataccccgttcaaggagatagtgtccgggcttgaaggtctcggccagattgatgcgccgggcatagaccccgaacgcccaatggtgtttcaactccggcagcagggaatcgacgagcgcacggtaatcggcccggctgctgacaaagagttcgcgttccgtcttcacggcattgccgtagaactgctgacgaaggacgaatcccgcgatcagcagaacagacaggcccgcaaaaaagatatagagaaaagtttttttacgcatctggtcgaaaatttttgcaaagatataaaaaattcctacttttgtgccgggtgagtcttatacgaccagctcctacagaatcccccaggcgaggaatcgagcaagggtatgtggttgtagcggtgcgatataatcagctcacccaaccatatatggcgctgtaaattccggtttgcagctccatatttttttatggccgtccatcgtcggaccgaaacgaaaaacggaacccggcaggggttccgcatagcgtcggacggcactccgtcctatttggtgtattcgatcagcaattgattgaccacactcacgaagacatagcagatcacaaaaacgacgatgctcttccatcctttcatattggccgaaacgaggtaggcgaaacagccccagaccatcgaccagaccatcgaaaccgacaggacgatcacgatcagattgtaggctgcctgcttcaagacctcgcaggcgctgcggggttcgcagacaatgctccccagccacatggaacaaagactcagcactcccagaataacgatcgtcggcagcatcgcgaacagattggtggcaaagatatccacggcccggatgcgggagggcgagagcaccagcgccatcacgtacagcagcagcgagaggggcagccacaacagcagattcgacgacagaatcgtgataatcttggaaacgtcgccctcgacgggccaactcaccgcggtcagcaggcagatggaaaagagcgttcccgcgaggccccaaccgagcgctttccctgtagacaggtattcgaacgggttaagaatcttgttcatcgctttcgaatttatttagttgagagataatatcgtccagtctgttgcgtacggtcggataactcaatcccaacttgtgagccatctccttcagcgagccgctgctcttcacgaaatcgagtacgaactgctggtcaggggctgacaactgcatcatcacgggaaagctgtagttgccttcgatatgtgtttggcaaccgttgcaatgcatcgcgtgcacgctcaaacgtttaccgcaggagggacatattttggggaggttcttcagtgtagccataaatattattaaagaaatactgcatttaaattagtttatgattgacaaaattaatattatttcccaaaaatagcaaatttacctccatgaatactccccgcaggcaaatcgcatgcgccaaaccggcatggagggaagtcttctaaaagttcgccttcacccctaccgtaaagttagccccgtattcggggtagaacggatattcgtacaggcggcggttgatcaggttgcgcccttcggcgaagagcgtcacgcggcccgaaactttccagtcgaaattgacgcgcagatcgacggcgaagggggcttcgaaagtatcgtacagcatcgtaacacgctgctcggtgtctccgggcgcagtttccgtctccgtattttcgtaaaccacactccacttacgggcactctgcaagtagactcccgcgccgaacgaaatcttgcggccgtcgtagtgcgccgacagactgccgtcgaaggacggcgcgccgttgtgcaatttggtttcgtcgtcgttgtagatatatccgtgtacgcccaattccgtccggaaactgctcaccggacgccacgtcacttcgccgttgaacgaaaacagggtctgacgggccagtgccgggcgcatggcggctccagcgacggccgttttttccccgtcaatcgcataattgtcggaaacataccaatagggatggttgtcccggaccgaaaatccggcatataccctgtagtcgaacttcccgcgccagatgctgccgccgataccgaaacgaccgttgtaatcgaccgaactcttggtctgccagaacgctgcggcgacgtaaggattctgccgggtcagcgagcggaagccgttgtcgtccacactgccgtccatctcgaaaaagggacaaagtccgtccgttccgaggttcagattcagccggacgaacggaatgatgtaattttccgcttcgaggctcttgaccttgtcatgataatagtcggctcccgcttcgaggcgcactaccccgccttcgacaccgtaacgcagggcggcacggatcagctgctgattataaaagtcgatcgctttctgcccggccagccgcatatagccgatctcggccgcaagccggtggcggccgaatccgcgggcgatcttcgcatgggtctccagcgtggtctgacgcgccttgtcgttataatccggccactcggagtggtcgaaaaacagcccgccgcggatcgcgatttcgaaattcacacggctcaggtcctgaaaatcgtcgccgaaacgcaccgcgatattcgcatcgccgtaatcggccattgcgccgggggccatgtccgacgtgacgcccggcgcgacatacatcccgtaacggtgatacatccggttttcataggaaaggtcaccctccagaatgtgtttgccgaaatacttgccggccgcggcgccgatgcggttgagcatccgcgtcgagttgtttctgatgccgaagtcgtttttgatcttcgcatagcggccctcgtggttcacgtaccccacgacataacccgtaccggggttctggctcgaagcgtagaaatccagcaccgaattgagcggatagcccgccccggccttcaggtagaacggcagcggacggttgaattcccaataggtcaccgtcgccggacggatcggccgcgtggcgagtgtcgtctgcagcgacagcggcgtgatcgtatagtcgatttcgggccgcatcttcaccgtgtcggtcatatcgggcacgacggccagcttcgcggcgctttcgacgctcggaacataggctttggtcacttcgacccgtttttccacctgcgcgctcacgctgcagggaagcgccgccagcagcgcggcggcaaacaatatgcgtttcatcatcagttcagttttgcgatccgttctttcgcttcggccacaatgccgtcgtcggcaggcgaatagccgtcggcaacgctctgataggtcgccctagcttggaaattgtcgcccttgcggacatagacgtcgcccagcaggataaaggccttggctaaccagtacgcctgcggctcacgctccgaataggcgaatatcgccttctcggccttgtccatatcgccgcccgcgaaaacatcttcgagtacgtaataggcggccgcagagccttccttcgtgcggacgtcggacgccagttccttatacagtttcacggcatcggcgcggcggtcctgccgacgcagcagctcggcccatgcgaatttcgactcgcgcagcgcgacggccccggcgtcgggatgcgccgcgacatcggcggccatcgcttcgatcttcgccgcatcgcccccggccagcgtcgcacgcacatagcccttcatagcgtcctcacgcccggcgaccgtcgtcgtaacgtcgtacaactggcggtaagcggcggcagcttcgtcgtaacgcttgtcctcgaaggtcatatccgagagtttttcgagcaccgtgaccgtatattggttcgtaccctgcccggccagcgtcgtcagggtttcgatggcgtcgtcgcgctgatcggagcggaggtagcagtcgctcaggaaatagagcgcatcgttcacgtaatagcccttgggatagctcttgacgtaactgcgcagcgatttggcggcggcatcggtctggcccgcaaggtaaagtttctgcgcggaggcgaacgacagcgaatcgcgcgacacggcggtcagatcgctctccagccccgccttctgcgcatagtcgaagtagtcgtccacccggccctccgaaacgtaaatctcgcggatgccttccatcgcgcccttggcttcggacgactgcggagccgtctcgacgaccatgtcgtaatagcggagcgatttctccttgtcgcccagattgaggtatgcgaggcccagatcggaaagggcctgcgcccggcgcggcgacgagggatagtcggcgacgaatttctccagctgcgcggcgccttcggcgtactgttcctgcgcgatgtgggagcgtcccagttcataggaggcctcgtcggcataatcgccctcccccgcggcgatgatctgccgcagcgcctgctgtttctgctccgtgcggcccaaaatgccgagcgtcacggcgcgcttgtactgcgcataatacttttcgggaccgcccaaggccgcagcccggtcgtactcggccaccgccgcttcgaactcccggtcggagtagcggatgtcgcccagacggttgcaggcgtcggcgcggtaccggtcacgtgcgggatagacggcgaggaatttctcgaacgagccgcgcgcctgtgccatgtccatacgcgagaaggcgcagtagccgaggttatacagcgccatggcatactccttttcgctgcggggcgcacgtttcagataggcgttgtatttggccgccgcgaccgtatattcgccctgcgcaaaggcgatttcaccctgccagaaggagttgagggccgaatatttggggctgacgttgatcgccgcagactcggccagatagcgctgcgccgcacgcatgtcgccggcattgtaggcttccagtccgcggaaataggtgattttctgcaacgcggcgcggatgtcggcgtcctgcgtcgggaaggatttgatggcccggtaggccgcgtcgtaatcgttcgaattgtagtaggcggcgatcagcagcgtacgggcttcgcctacgcgcggcgacgcgggatactgctccacatagcgcgtcagcacgttgatcgcgccgttgaaggctccgccgcccagctcatactgcagtttgccgtaattaaacagcgcatcctcggcaatcgtcgcgtcgaagcggtcgtccgcggccatggcgaaagcgtgcatggcggcccgcttgtcgcccgcccgcaggtaacagtcggccagatgatacgaggcattctgcgtcagcgcgtcctcggcgccgcacgccctgcgcaggtattccgccgcttcgggatagcgcgccgtgcggtagagcgaaaagcccatcaggtaactgccgtcacggtccagctcgccgccggccgcggtgaaagcgtccagatgttcgatcgtcctgttgaaatcgcccagccggaaccacgactcggcgatgacgcgctccaactccctgcgccgttcgggaacggcccgctgcaccagtttgccgccgttctcgacgacatagcggtagttgccctcgtgaaattcgatctgcagcaggtagtacggcaccacgtcgcggtaggcgtcgctgcgctgcaaagccgtgaaaccctgcttggcacggccgtaacggccttcggcatagtcgatataggatttgtaataaagcgcgtggtcggcatattcgctctgcgggccgatccggtcgaaatagccgaacgccttgtcgtaatcgccgtcggtgaattcgacatagcccatgcgaacgtcgtactgctccttgcgcgcccggccgagggctttgtaatcggtcttttcgaaagcctcgcgggcgcgtttcatatcgccctcggcgcaatagtaggagcctagcgagaaccgcacgtcgttggcatagaccgatccggggtaacgcgcttcgaatcggcggagcgcggcctcggcgtcgcggctgcccaactcgacggcgcaggccgccagatagaagtcgaccgtctgcgccgcctcgcggtcggcgggcgaaagcgtctcccgcgcctgcaggaactcatgccgggcgtcggtccagcgaccgaagtcgaacagcgacctgccgcggtcgataaaggcagcagattcgggggttccggcttgcgctccgggcacgcacaacgcacacacggcaaaggccagcaataaattcagatttttccgcatacgacacttagattcttacaaagggcaaatatacgaaaatttaccttttttccatatagggaaacgaaatatatgccgcggccggattctccgcaaaccgccgcttttgcatctgtcgaaaattatccctaccttgcggcgtcactgattcgctaaacctccactcgatgaaatcgcgtctttttcatcacaaggacccgcgcgcagcctcccgcaccggcgcccagtccgagacagacacgctgagcatgctgtccgtcggcgccgtcacgctcactccggaaggggaaattacggaaatcaacgcacgggcatgcgacgaactccgcatccgcgggggggggattttgcacatccgctgaacatctccgacatcctctcggtctgtcatgaccggcaggaccttctgcccggcattctcgcccggctcagggagcggcaccgctacggagacctgccgccatggagctatatccggcttcgggactccaacctgaaattccacatcgaaggccgtttcgtcggccgctacgaccggcggcggcagctgcgccggatcgtctttctgttccgcaacaccgaggaggagatcacccgcaaattcatcctcggcatggccctgtcccagacgaagatattcccgtggtttttcgacctcggccacaacagaatggtcatcgacgagcgctggttcgcccacttgggacttccggcgggcgacggcacgatcggcgccgaagatttcttcaggctcgtgcatcccgaagaccgaggcaggctggccgacgccttcgcaaaacaactcgcaggagagctgaatcccgacacgttcacctaccggctccggcgcggagacggcacgtgggagtggttcgaggagcagtccgtatacctcggacagaccggcgacggatcgccctgccgcatcgtggggatatgccagagcatccacgcccacaagatctccgaagacgggctgcgcgcagcccgcgacaaggcgcgggagagcgaccgtctgaaaagcgcgtttctggccaacatgagccacgagatacgcacgcccctcaacgccatcatcggcttcgccaacctgctcaccagcgaagacatcccgttcagcgaggcggaaaagcaggagtacagccggctcataacgagcaacggagaccagctgctgcgtctgatttcggacatcctcgacctctcgaagatcgaatcgaacaccatggaattccatttcggggagcactcgctgcacgccctgctgacggatatctatcagacccagcggctctgcatgccggaaggcgtccttctgcggctcgacatgccgcaggcggacacaccgataatcaccgacgcgtcgcggctcaagcaggtcgtcaacaacctcatcaacaacgccgcgaaattcacggacgaaggcagcatcaccttcggcttccgctccccgcaggggtgcgaacaggtcgaactgttcgtccacgacaccggaaagggcatcgcgcaggagcatctggaccggattttcgaacgattctacaaggccgactcgttcgtcaaaggcgtcggactcggactgtcgatctgccgcacgatcaccgagtatctgggcggcgccatttcggtcgagtccgaatccggcaaaggcacccggttcacgattcagcatccgctgagcaggcccgaagcggctccgcggcgggagcctgcggagacggccggaatgcggcagtaaggtacgattcttgcccgaagagcgttgttcaataaaaattcagccatatgattgaaaaagtaacgttgcagctgaccggggattcgaaacttgtgcccgaaaacggtcccgactgcggggagatgaatcccaagaccctgctgctctatgccgcggccaaatgttcggggatgacggccctgatgatcatggagaaggagcgcctgcgtcccaagcgcttcgagatcagcgtatcgggcgaactttcgaccgaagaggtccggtccgaaagcgtattcaagtcgttccacgtcgtctacaacatcgaatgcgacaccgaagacgatcaggccaaggtgagccgcgcggcgacgctgacgcacgagaaatactgcggcatcatgcgcatgttccgcatgatcgccccggtatctcacgaaatcgcggtggtcagcaccgaaccggcgaaagcctgacaccgcaatccggcgaagaaatcggagggtccgacggaccctccgatttcttatttccgggctactgctgcgccgtaatccgccggtaatccgacaccgccacggcgtaattgtaatgcgccttgatggcgttggtatagagctgaatccagctcagctgcgcctgcagcacatcgagaatcgtcgccagcccctcgccgtaggaataggtgctgatgtcgaggttctcgccggcgatgcgcaggctctgctccatggcttcgacctgcgcacggctgttcaccagcgccgtccatccgttcatctcgtcgcgtaggatatcgtcgtagagttgcgcggcgtcccattcgctctgccgctgtacggcacgggcgacgcccgtcgcgcggcggcgttcgccccagtggaatatcggcagcgagagtttcacgaacgccgagccgtccaccgtcgtagcgcccgtgcggttgggataatagggctgccacgatcccccgacgccgacgctcagctgcggattgaaggccgcacgggctgcgcggatgccggcttcggcccggtcgctgcgcagctgcgcggcagcatagtcgggtctgaatgccgccgcttcggcggcgggcacccgcacgggctgcggaagcgaatcgcggatgccctgcgccagcgttacgccgagcgcaggatcggcgccccgcaggatgttgaaattgtgcagcgccacagtgtaattccgctcggcggagatcagttcgtactgcgcttcgctcaggcgcgtgtcgatcatcagcacgtcgcccttggcgatgtacccctcggcaaaccggcggtccaccacctccttgagcgaacggatgatgccgacatactggcgcatcgaagcggcatagagggccatggccgaaaggttccagtaggtatactcggccgtatagcggacgtcgagccgggtgaactcctcgtcgcagagggcgatgtcgtatcccagttcggcctgccggtaagccgcacgcacggctccgccgccgtagacgacctgcaccagctggggcagaacgctgaagttccaacgttcgacgccgtcgtaatgatggacggtggccgtgaagttcccgtcgagtgacagccgcggcaggtagcccgtccgcgcctgccccacggcttcggcggcggcatcgcttccggcggcggcgactttcagccggcggctgtattcggtcacgtcgcggcggtaatcgtcgagcgtggtctgggcatgcgaaggcagacaaaacaacaggataactgacagcagaaacggtttcatgattcacggatattatagaaaatggcgtagacgaccggcaggacgcagacggtcagcagcgtggcgaccagcagtccccccatgatcgtcgcggccatcgccccgaacatcgagtcgaacagcaggggcagcatgccgaggatcgtggttcccgaagccatcgcaacgggcacgatacggctgcgcgtggcggagaccagcgcatcgtaagggcctttgccctcggcccgcaggacgccgatctgctcgacaagcaccacggcgttcttgatattcattcccacaagccccagcagtcccagcagcgaaaagaagttgaacaccttgcccgtaacggccagccccagcaccacgccgataaagatcagggggatcatcagcaggatgatgaccggttcgcggtagttgcggaagagcaggagcaggacgatgaagatcaggaccatcgtcaggggcatgtactcggccagcgccgaattggactcctgctggctctcctgctcgccgaaaaccttcatcgaatagccttcgggcagcggcacggcacgggtcaccgaatcgcgcagggcggcgaacagctccatcgtattgactccgcgcgccggatcgcactgcgccttcatcacccgctggcggttgtaacgcttcaccaccccgccgcggtattcgaagcggaacccgtcggtcgcctgttcgatggagtagaccttgcccgcaggcgtgaagatcggcagcgcctgcaggttggtcaggttgtaggcgtcgatattctcgtccttgagcaggatcggcatgaactggtcgccctcgcggtactcgccgagccggtagccctgcgtggcgatggtaatgccctgcgccatctgactgcgggtgacgccgatgcgctggcccttcatctgcgagtagagcggcagccacgtcggaacgcggttgccccagctgttgcggatattcgccgtgccgggcgtacgccacatgatctcctcggccgcctgcgtcagccggcggagcgtgtcgatatcgtcgccgatgaacccgaattcgatcgcggcgtcgggcacgggcgagagcttgaaaagcgacgagcgcagccacacgtcgggacagttcgccacgacgtaggcgttgaaacggttttcgacctcctcggtctgtttccggtcgtgcagttcgatcaggatattgccgaaattggggcgcagcgaaatgctgctgctggccagatagtaacgcggcggcgtggagcccatcgtcaccgatacggtcttcacttcgggctgcgcatggagccactcctccatcagacgcaggttgcgctccgtatcgcggatgttatacccttcgggcagtagcacgtcggcccggaaatagggcttgtccagcgacgggaagaaattctgcggcatgagacccattactgccagcgaaagggcgaagagcgcgacgacgcccgcaacgacgccccaccgccagcgcagcagcccggccagcagacggtcgaatttccagtagaacttcgtatcgtagggatcgtgcgccgcaggtttgacgcggagcatgaaatcgccgaaaagcggcgtctgcgtaagggccagcccccagctcagcagcagcgaaagccccagcacgacaaacagcggcttgacgatctcggcaacggacgaaggggccagataaagcggcaggaacgagaaaatggcgatcagcgtcgcccccagcaggccccagcgcggagcattggccccgtcgatgacggcctgccgccgcgcgacgccccgcagcatggcctgctgcgcattgtcggtcaccacgatggcgttgtccaccaacatgcccatcgcgatgatgaaccccgccagcgaggtgcggttgagaccttcgcccagaaactgcatcagcagaagcgtaccgccgatggagaacagcagcgaactgccgatcagcaccccggcgcggaatcccatgacgagcatgatgataaggatgacgatcgccaccgattcggcgaggttcaggataaaggtggaattcgcctcgcgggcaatgcggtcttcaggataaagcaccgtgagatccatgcccacgggcatctggcgcgtaaggccgccgagcacccggccgatcttctccccggccttcaccacgtccacgtcggcctcggtcgaaatgccgatgcccaccgcccggcggccgttcacgcgcatcagcgtctgcggcggatcggcgtatccccgctccacgcgggcgatgtcgcccagccggtactgcttgcccgaagaggagatgagcagctggttggagatgtcgccgaggtccttataggccccgtcctccaaaatctgtatttcgagcgccccggcctgcttctcgccgctgttgacgatcgtgttctgctggccgatggtcctcacgatcgattcggggcggatcgagaagttggcgagcgccgcaaggctgacatagacgttcaccacgggcgtctgctcgccgaagagcgtcaccttctgcacgccgtccacggtcaccagcgccgtcttgatccgctgcgcccactcgcgcagttcggaccatgtgaatccgccgtcgaccgaaaggccgtaatagatgccgtacacgtcgccgaaatcgtcggccacggtaacgggcgaagccccggccggcagccggggctggatgttgagcaccttgcgccgcagctcgtcccacaactgcggaatctccgcggcaccggtcgcaggatcgagttcgaccatgatcttcgaaagtccgtaataggactcggaggtgattttatgcaccagccgcatcgactgcacctcgcgttcgatcggctcggaaatgagctgttcgacctccagcggcgtggctccgggataggtgcagaccagcgacgcacttttgatgacgaacgtcgaatcctcctttttacccagcgtgacgaagccgagggcgccgccagcaagcaggacgaaaaggaaaaaccagacgacttttttatttttcagcgaatattcgggcagactcatgaccgtatcactttaggattcgcacccgctcgccctgccgcagctgataaacgcccgccgtgacgacgcgctcgcccggctccacgccgctgtccaccacgacgcggtcgcggccatacagctcgcccagcgtcacctcgcggcgcacgacatggccgtcgccggtcacgatccagacgtaggtgccgccctcggccggagcgaagatcgccgacacgggcagcgacacggcgtcgggaatcgggtcggcgctctgcatggtaatcgtacacgacatgcccggagagacgggataacgccccggatcggtattggtcaggcgaagcgatacgggaaatcccgacgcgtcggacgaagtcttggcgtaatctttcagcacggccggaaatttcacgccccggtagttgtcgaattccacctcgaagcgcgtggattgggaggccagcagcggcagagcgctttcgggcagggtgaactgcacctgcgtcgtcacgggattcacgacgcgcacgatggtctgtccggcctgcacccgttcgtaattatcgacgtatttgcgctcgacgacgctggcgaaaggcgcccggagcttggtctccttgagcatgtcgagggagttgtcataagcagagcgggcctgcgcatagcgggttcgggaagcttcgaattcctgctgcgagacggcttcgtgctccagcagccgctgcatgcgctgcaactgcgagcgggcctcttcgtatgcggagcggtcggcggaaacctgcagctggatgtcgcgggggtcaagctcggccagcagcgcccccttcttcacgctctcgccctgcgacaccggaacgtccagcacctgtccgggaagcttgaacgccagattcacggcgtcgtcgggcgtagccatgcccgcgaaatccttgtcgatgaccccggcgcccgacgccgtgacgaccttcaccgggcggaccgtctcaggcgccggctgacggcggccgcagccgcacagcgcgagaagaatgaataaagtttggaaagttcgcataataagaaagttgactccgtttccggggtcaactttcataccactcgccgcaaaaagtccctatggacgaatatcgcgacaattctttttagcgcggatcacgccctcttcgagcagcaccatgccgttgttggcgcgaagcatggtcttcatggtcgaagcgtctatgttatagcagcgtacctcgcccgatccgaaatcgtgataggcgacgccgtacaacggctggggcgtgagacagacgacgcgcgcgccttcgctctgcgcacgccgtatgagagcggcgaaccgcttggcgcaggcgcgcggcaggcggtcgaacgaggtgacgcaaagcatatacacgcgtccgggggcggtcagtatctcctccgtggcgtccccctcggcatcgcgcagggcgaattcgctcataagcgggcgtatggcgggcatctcctcggtggtccgggtatcgacccactcccacttcccggcgtcctgccatgcggtgtcttcgagcgaaaattcgtgcagtttgcccgtttcgagattgcggtaaacgagcacggtctccgtctcgccgggttcgacggccggagcgtgcatgccctcccagatattgaccccgaccttgtagggcaggaagtcgatcagcggcagatggcggtaacagtagtaccccagatacatcgaaaggaagaagaaggtgaccgtcagcacgatttccagcgcgttgaaggcgaaaatcttgtcgggacggtagcgccaccagaccacgaaggccatgggcagcagggccagattcttgaagaaagtctgccacggcgtcagtttcagcgcctcgccgaaacagccgcagtcctcgacgggaatcagcgtggcgctcagcaatgtcagtgccgtgaagaacagcatcgacagcacggcgaagatcgaaatcaaacggatgcggaccttgaacagcagcatgcaccccatcatcagctcggcgccgcacaaccagatcgaaaaagccatgctcgcaggctgcagcgactcgacgccgtagatcgagaggtactcgttgaccttcatcgccgtgccccacgggtcgataaccttcgtgaaacccgaaaggatgaacgtgcaggcgaggatcagccggcagatattggctatcagtttgaatacccgtgttttacgcatctgctccaagtattgggattagttccgcacggattttggcgaagatgccttcgggcgactccatcgcgcccgaagcgtcgctgcagtcgacgacccgcagcgccgggtctttggccgccgaggcgaggtagacgctgcgcacgtcccgctgcagctgcaacgacgcctcgtggatatcctgtccgccctgcaggtagtcgcggtcgtcgccttcgcgcgcctcggagagcttgcgctcggtgaaggcgaacggtacgtcgaggaacagcgagaggtcgggacggggaagcgcgttatgaccgaattcgaggttcacgatccagtcggccagccggtcgcgctcctcgccggcgggaagtttggcgcactgaaaacccacgttcgagtagacgtaacggtccagcaccactgcttttccttcggcgagccactgccgtatctgcggcgcggcgtcggcgcggtcgcccgcgaaaatcagcgccacgaggtagggatcgacctcctgcacgccgccgaattcgccgcgcagaaaccgggcgatcagctggccgtatacgggcgaatcgaagcgcgggaaatgcacatactcgctctcgacgcccctgtcggcaaacagctggcgcagcatgcgtatctgggtcgatttgcccgctccgtccaatccttcgagtacaatgaacataggttgcctgttttatttccgtttgtggtagttatggtagtttcctcttctcagcgcagcatccgcacggcccgttcgaccccgtcggccaacgcgtcggcttcggcctgcgtgttgtaaagcgcgaacgaagcgcggcacatgcccgtcgtcgcgtaatggtccatcaccggctcggcgcagtgctgtccggtacggacggcgatgccgagcttgtcgagaatcatccccatatcgtaaggatgcacgccctcgacgttgaacgatacgatggcgcatttgccgggcgccgtgccgtaaatccgcaggccgtcgatcgccgcgagacgttcggtcgcgcggcgcagcagcgcctgctcgtgccgctcgacctcttcgggatcgaagcgctggacgaatttcaccgcttcgccgagcgcgatggcgcccgaaaaattggccgttcccgcctcgaacttgagcggaacgggcgcataggtcgtctttgcgaacgtcaccgtatcgaccatgtccccgccgcccagaaacggcggcatctcctccagcagcgcgcgtttgccgtacagcacgccgatacccgtcggagcgaagagcttatgtccggaaaatgcgtagaaatcgcaatccagctcctgcatgtccgcgcccccgtgcacgacaccctgacatccgtccacgacggcgatcgcccccacggcatgcgccgcgtcgataatcccgcgcagttcgggccgtgtgccgagcgtattcgacgcctgcgtcacggcgacggcgcgcgtacgcccgtcgagcagcgacggcagcagttcggtgcgcagacgcccttcgtcgtcgaagggcagcacccggatttcggcccctttgcgttcgcacagcatctgccacggaacgatattggagtggtgctccatttcgctgacgacgatgttgtcgcccgcacggacgaatttctcgccccacgcataggccaccgtattgagcgaagccgtcgcgccggccgtgaaaatcacctcttccttctccgccgccccgataaaggcgcggatccgctcgcgcgacgcttcgtagagcgtcgtggcctcctccgaaaggtaatgcaccccgcggtggatattggcgttgagctcccggttgaggtaatcgatcgtctcgatcaccgcgagcggcttctgggccgtggccccgttgtcgaggtagaccagcggcttgccgtaaacctcgcgtccgagaatcgggaactccccgcgtattttttcaacgtcgaacatggtcacaatttttccattttggccctaacggcctccatcatcgtctcgcacaacggctccacgccgcagcggcgtacgacgtcgcccacgaaaccttcgatctgcagccggcgggcctgcacctcgctcaggccgcgctggcgcatatacagcacggcttccgagtccatctgccccaccgtcgcgccgtgcgaacacttcacgtcgtcggcatatatctccagctggggttgggtggcgatatgcgccgtctcgctcagcaggatgttgcggttctgctgctgcgcgtcggtatgctgcgcatcgggcgccacatagaccagtccgcagaactcgccgcgggccgaaccgccggcaacgcctttaatataggaattgctgcggcagtcgggcacgttgtggttcgtgcgcagtttgacgacgcagtgttcttcaccgccggcaaggaacaccccgcccagcatgttctcggcatcgcggccgtcgagatcgatcgtataggaggcgttggcgctcgtaagctgcacggccgtcaggcggcacaggctgcgtgcggactgcttcaccgcaacctccgcgaaagcttcggcgaggaacacctccgttatttcgagacgggcgtcctccgccgcaacgatctccagcgacgacatgtcgggcgcggtatgcaccaccacgatgcgtcccgacgcgcccgcggcggcctcgatgcgcatgcgccggggatcgaccgccgcataaggcccgtcctgcgtcccttcgatccggaacacttcgccctgcgccgtgcggaaatcacggattatatcgagtatcgccgtcattccctgtaatcgttaatcagccagtcgtagccctccttttcgagtttgagagccagcgtcttgtcgcccgtatggataatgcgtccccggtagagcacatgcaccacgtcgggcacgatgtaatccagcaatcgctggtaatgcgtaatgaccaccgtcgcgttttcgggcgtatgcagtttcgtaacgcccgtggcgacgatgcgcagggcgtcgatgtcgagtcccgaatcggtctcgtccagaatggccagcttcggatcgagcatcgccatctggaaaatctcgttcttcttcttctcaccgcccgaaaagccttcgttcacggcgcgcgaggtgagtttcgaatccagctccacgacggcgctcttctcgcgcatcagtttcaggaattcggcggccgtcagcggctcctcgccgcggaacttgcgctgctcgttcacggccagcttcatgaagttggccatcgtgacgcccggaatctcgaccggatactgaaaacccagaaacagccccagacgcgcccggtcctcgatcggcatctccagcaggtcccgtccgaggaacgtggccgagccttcggtcaccgtgaatttctcattgcccgcgagcaccgccgcgagcgtcgatttgccagagccgttaggccccatgatggcatgcacctcgccggctttcacttcgaggtcgatgccccgcagaatctctttgccgtcgaccgacgcatgcagattttttacacttaacatatctttcttgccagttttttacatttttcaatctctctgtccgtcagcctgccgttcttgcggcagccgcttttggccgcggtgccgacgatgcggtaaccgctccaccggagtatctcgcgcagggcgcggaacaccccgcgggtctggttgaacaacacgctgaacggatatatcgtgttgcacgtcgccaccagcacggcccgctgtcccttgtgcagcgccaccggcattccgctctccttctcccccatcatcacatggaccgaccggtcgaacagcactttcaaggccccgttcatattgccccaatagcagggcgaacctataaccagcgcatccgccgtgcggatcgcctccgcgacgcggtgcgcatcgtcttcggggagcgcgcagcggagcttcgagcggcagctcatacaccccgtgcagggtcttacggtcaggtcgcggacgaaaatacgctcgacgtcgcacgtctccggcaaactgccggcaatatgttccagcatctgcgagaccagaccgttgcgccgcggactgccgttgagcaccagcactttcatctttcccgcccgttatccgaccgaaccttcgaggctgatcgaaagcagtttctgcgcctcaacggcgaattccatcggcagtttggccagcacctcgcgggcatagccgttcacgatcagtcccacggcgtcctcggtcgaaaggccccgctggttgcagtagaagagctggtcgtccgaaatcttcgaggtcgtggcttcgtgttcgaccacagccgtgcggttgcggctgtcgatcacggggaaggtatgcgccccgcatttgtcgccgatcagcagcgaatcacactgcgaatagttgcgggcgttctcagcccccttcgccatgcggaccagaccgcggtaggagttttcgctccgcccggccgaaatgcctttcgacacgatgcggctgcgggtgttgcgcccgatgtggatcatcttcgtaccggtatcggcctgctggaaattgttggtcatggccaccgagtagaactcgcccaccgaattgtcgccggcgagaatgcagctcggatatttccacgtgatcgccgacccggtctcgacctgcgtccatgacagacgggcgttctcgcggcagataccgcgcttggtgacgaaattatagatgccgccccggccctccctgtcgcccggataccagttctgcaccgtcgaatatttgacctcggcgtctttctcgacgatgatctccaccacggcggcatgcagctggttttcgtcgcggcgaggagccgtacacccctccagatagctcacgtaagccccttcgtcggccacgatcagcgtacgttcgaactgccccgtccccgcggcgttgatgcggaaataggtcgaaagctccatcggacagcggacgcccttcggaatgtagcagaacgaaccgtcggaaaagaccgcggcgttgagcgcggcgtagaaattgtcggtatagggcacgacgctgccgagatacttcttcacgagatccgggtagtcgcgcagcgcttcggaaatcgaacagaagatgatgcctttctcggccagcacctccttgaaggtagtcttgaccgacaccgagtccatcacggcatcgaccgccacgcccgccagcgccatctgctcttcgaggggaatgcccagtttgtcgaacgtccgcttgagttcggggtcgacctcgtccatcgaatcgagttttttctgctgcttgggggcggcataatagatgatgtcctgaaaatctatttcgggaatcgtcaggtgggcccacgtcggcggttccatcgtcagccagtggcggtaggccgccacgcgccgctcggtcatccatgcgggttcgcccttcttggcggagatcagccgcacgacatcctcgctcagtcctttgccgatggtttcggtctcgatatccgaggtgaagccgtacttgtattcctgctctccgatattctccagtatgtctttatctttctctgccattatgcgcgaaatatcgtacaaaggtacaaaatcaattcacattttcataacacagcagagcaaatctgggtccagagcgggcaaaacggcaaaaaagcgggatgaacggggagcgggaaatgacaacgggcgtttccgcgccaatggattttcgatatcttcgacttgtcatccccattttcaggactaaaaaaaataaagacggccgtaaggtcgtctttatttcaggctgtcggcacgacaccctttctcggcggagagagaggctccagaacttacgaaatcatagaaaatcataaaatttcaattcgttgtaatttaagcgtttataaaattattaaattcattgaaaatcatagggtgcattttgatatatgaaaaattgggtgtaattttgggtgtaacttttaaaacattaatagaaatgaaaatatcaaacgcatcaaaagaggctatagttcctttcataattggagacaataatgagctatgggctgcaagaactggtaatgacctcgttagattatttcaaacctatggttttagagatgatgtttataatggtgcattgcctaagttaaataattcaaatcttaatacatctaagaccaactatataaaagatcgtctttataagattacggacataaatctaaaacaattgattgaacagctcatcggcgaatctgccaatgtgcataatgcgatttcacaactcaatagtattcttgcacatgacaacattaagttgtcatttaacgatggatccattgtttgggaaggaatcaaaatagatcctaaaatcgaaaacgaagcgatatttaaggataatgaaaagaaggtcattgataatataaatagtgctaaagtatcaattttagttgcaatggcttggtttactaatgaaaaaataaaggaagctttagtaaggaagcgtcaagaaggtttaagaatagaattagttatttacaaagatggggtaaatgctgctcatggagtcgatttgactgattttgattataaagagattagagggaccagaggtggatttatgcataacaagttttgtgttattgataaccaaaaggttttaacaggtagttataactggacaacaaatgctgaggctagaaatgatgaaaatgttttagtgactactgataatgcgacagctacaaattactctgtagaatttagaagactaaagccattgatttaaaatgaacattaaaagaaacatcatttttgccttggagagccgtaagaaaaacggtgttcccgtcattgagaacgtccccatccgaatgagagttatttttgcgagccatcgtatcgagtttacgacaggctatcgcattgatgctgctaaatgggatgcagacaaacaacgagtgaagaacggctgtacaaacaaactcaagcagagtgcttcggatatcaataccgatctgcttcgttactataccataatgcaggaggtattcaaggagtatgaggtaaaggatattatgcctactccacaagaaatcaaagattcgtttaacaataaggtaaacccaaccgaggaggtgcaggaggagcagaaaggtttttgggagatattcaatgagtttgtttccgaatgtggcaagcagaataattggactgattcgacatacgaaaagtttgcagccgttaaaaaccatatcaaggagttcaaggcagaacctacctttgtctattttgatgaagagggcttgaacaactatgttgattttctccgcaaaacaaaggatatgcgaaacagcaccattggcaagcagttgggatttctcaaatggtttatccgttgggcgttcaaaaagggctatcatcagaatattgcattcgaaacattcaaacccaaattgaagaatactccgaagaaagtaatcttcctcacttgggatgagttgaacaaattaaaggcttgcaatattccacagaataagcaatatcttgaacgagtgcgtgatgtgttcttgttctgctgctttacgggattaaggtattccgatgtctataatcttcgcacaagcgatgttaaggctgaccacatagagattaccaccgtcaagactgccgatagtttggttattgagttgaataaccatagcaaggcaatcctcgaaaagtacaaggatgtacattttgaggggaacaaggtgctgccagttatcagtaatcagaagatgaacgattacctgaaagagttgggcgaattggcagagataaatgagccgatacgagagacctattacaagggtaatcaacgcattgatgaggttacacctaaatatgctttgctcggtacacacgcagggcgacgcacatttatatgtaatgccttggccctcggtattcctgcacaggtggtaatgaaatggacgggacacagcgactacaaagcgatgaaaccctacattgatattgccgatgacattaaggctaatgcaatgagcaggtttaatcagttgtaagcctgatattttatttatcctgaatacaatttttcagccgattgtgaattatatttgtaccgaacagacaataatagaaagcctatggcccaaataacagacttcataccgcagtatcaagaggtaaatgttatcttctctcattttcttgaatctgaaaagttcggctttgaggagcagaaaaacattacccacttctacaaccgatataaggatgtaaaactctttgagaagatgatcttcgatattatcttctcaaaggatagccgtagggagaagatgctactatcaagcatcaagtttgagattgaccgcaatatcaccatatatgaaacaggcagacgctacttcgatgaaattgagatggagaatgtcaatgacgatgcagccgttaagtaccttgaagaaattgaagcacaagtgcgagtaaccaatcaatgtggagcagagttcttggaggttgctgctttatgggagaactgttttaatctccacggtatagaccacgatgcctgggagaaatacgattctcttttggaaaagcatcatacagaaatagagaaactgaacgagctgtaccgtaaacataaggcggtaatggaggaggcgaaagagtatgaggagaatatgttcagaccaatctatgagctgagcaaaatattcctctccattattcaaaagtatatgcccgtagagagcgagcaaccgcaatcaacaaatgttgctgcaacgccctattttgacatggctcttgtttcggctatttatggcgtgtgcaacggtgaacagtttgaggatattcccgaattggagttctacaacaacctgaatctgctttcctcttcggacagattgagaatccgaccaaaagagaaagcgagggtgtgctaccttgtttatctgttgagtgaacgcctacctaagaccacacgagagagctggcgtagtgctatgctcgaaacattgggtatagatgcagcctattataagtcaaaatacaaggagccagaatcggattttccgagtgacagcaaccagcgatttgccaaagaaatgggcgaaatattcaaataaaagctcatagcgtttgatattccacgatacgaccactttaaccaccgaagtaattttcggtggttttttattacccattgattttcaacggcatattgtgatattctattttcgtttgccacatccataccactcatagccgcacctaattttgcagtgttcgaacaagataacagcctctgcgcagggctacattgttaaacgcaaaattagataaaaatgaatatcaacgaattattgctcaaacccgtttggcagatgacaggcgaagagtttctgcacctgcaccgccacgcatcacaaggcgaagaggtaaagcaacaaccaaactccgagcaaccgaaacgctatgtatatggcatactcggtatatcgaggctctttggttgtagtctgcctactgccaaccgtataaagaaaagcggtaagatagataaagctatcacacagattggtcgtaaaataattgtagatgccgaacttgcccttgaacttgcagggcgtaagacaggaggacgcagataaccacagagctatggagaactataaatcaaccgtaccaaaacctccgatggcagatgaagagtttgctgctatctggcgaagtgttcatctgaaagttaccgacacatacgatacgccacccgaaatactctgggtgaatggctcaaccattgggacactgggtaatttcagtgcatcgacaggcaaagccaagagcaaaaagactttcaatatctcggctatcgtggctgcagcattacgaaatagtgaggtgttgcaatactcggcatatctgccacaggagaaacgcaagattctctatgttgataccgagcagagcttctaccattgccataaggtgctcaaacgcataatgcggttggcagggtgcgacattgagcagaacagcaaggatttccttttcattgttctgcgtgagcatactcccgagaggcgtagagagattattggcgaaaccttacgaagagtaaagggcatcgggcttgttattattgatggcataagggatttgatgtatgatataaactccccaagtgaatcggcagagattatcaatctgcttatgcgttggtcgagcgagtataatctacatatccatacggtgctacacctgaacaaaggcgatgacaacacccgagggcatatcggaacagaactcaacaataaggcagaaacggtgctgcaagtaaccaagagtacgcaggatgccaatatcagcgaggtcaaggctatgcacattcgagatagggatttcttcccgtttgctttccgcatcaatgacgatgctctgcccgaattggttagggattacacctttgaccagccacgcaaagatcgcacattcctattgattgagcttagcgagcaggagcaccgccaagcattggagactgctttcggtaacaatgtgatactgggctacccaaatatcattgcagcactgaaaacgggctatgcgagtatcggttatgaacgaggtcgcaataagcttgtggatttgagaaaattcctcgaaaataaacgaatgatcatttccgagggcaaagggtggcgatacaatcccgacttcgtattctgagataggtttagtttagttcgggcatatatgattcgtacttataaacctaaatacagaaaactaaaatccgattgagtgactgcacaacagcactcaatcggtatatcaaccaatcaataaacttataaaaacgaaacaatatgaacatcaacgaaataaagaaaattaagttggcagactatctgcaaagtttgggttatacgcctattaagcaacaaggcaggagcctatggtataaatcaccactgaggaacgaaacagatgcttcgttcaaggtaaataccgagttaaatcaatggtatgacttcggtatcggcaagggtggcaatatcattgcattggcagcggaactctaccatagcgagaatgtagcctatctattggaacgcatagcggagcgaacaccctacattcgcccggcatcattctcttttggtgagcagaaagcacataacagcagctttcaaggcgtacaggttggcgagttagcttctcctgccctcatcgactatctgcgaggacgaggcataaacatcgaactcgccaaaagagagtgtaaggagttgcgatttgagcataacggcaaaccatatttcgctatcggtttcccgaatatctctggtggctatgagcttcgtaaccgttacttcaaagggtgtcttgctccaaaggatattacccatatccgacagcagggcgagcagcgagatgtgtgctatctcttcgagggctttatggattatctctcgttccttacaatccgagtgaacaacaatcccgaagagccacgcacaggcgaacaagattatatggtgctgaactctgttacaaacctctcaaaagccgagcaacttctacgcccatacacgcgaataggtagttttcttgataacgaccaagcagggcaaagagcgtatgagaatctgaaaaagatattcggaaacaggattcaagatatgtcgcatcactacgcagtacataaggatttgaatgactatctatgccaccgaaaccaagcaaaacaggctgtaaagaaatcgcaagtccaatccgcaaggcggatgccacaactgcagccgaagaagaaacgaggcttcaggttatagcccactataactacacgcttcgcttaaagtagttgtgggctctaccgagggtgcagagtgacctctctgcactccgcttatgggcttcgcccctaaggaccccgacagcggaagcaagtgaccaaatgaccaacagacattagtgcaaccaataaaatcagaataactatggcagtaaaaagcagcatacatatcaagccttgcaacatatcatcgagcgaggcacacaacctcagaactcccgaatatatgcgtaacatcggagagtctaaaatctatctcatcccccaacttgttgccgacaatgagtattggataaattcgcacctcggcgactatgacttacagacgcattacaataacatcaagcagatggtaaaagcgaagacaggacgggcgatgcaggagaaagagcgagaacgcaaaaccaagagtggcaagattatcaaggtggcaggatgctcacccattcgtgagggtgtattgctcatcaagcccgacactacattagaggatgttcgcagatttggcgaggagtgccaacagcgttggggtatcacaccacttcaaatattcctacacaaagacgaggggcattggctcggtggagagccagccccagacgataaggagagttttcaaattggcggtcgttggttcaagcccaactaccacgcccatatcgtatttgattggatggaccacaatacgggcaaaagtcgaaaacttaacgatgatgatatgatgcagatgcagacattggcatccgagattctatcaatggagcgaggacaatccaaaaccgagacgggcaaggagcatttggagcgtaacgactttatcatcgagaagcagcgtgcagagcttgaacgcatagaggcagagcgacagcacaaggaacaccagatagatcttgccgagcaagaactaaaacaggtgaaatcggagatacgcaccgacaaactcaaaagcgtagccaccgatgcagccacagcccttgcaagcggagtaagttctcttttcggcagcggtaagatgaagtcgttagaacgaaagaacgaggatttacgggacgagatagctatccgagatgaaacaatcgagcaactgcaaaccaatatcaagcaaatggaggtagaacatagcagggcaatgatgaataaggataacgagcatcgcaaggctcttgaagcaaaggaggccgaacataaggaggagaccaacatccttaattcgataatcaatactgcccatcgttggtatcccgattttgctaatcttctaagattggaacgccttgccaagcaaatcggactttcggctatggagtttgccgagctaattaagggtaagattgtgaactttacagggcgactattctcctcggagcataaccgatggtttgctacggataatacccccttgcagattctgcgagataacgacaagcggcttaccttaaccgcaaatcgaatacctctcagccaatggttcagtgaacaatacgacaaacttcgacaatcagtccgacaacctattcagccaaagaaaagcagaggaatgaaattgtaacaataatggcgaccactttattgcggtcgccattgtgagttttagttaatccgatattttcgttctctcttttcaaaggcaaatttaccaccctccaatatttgacaaacctcattattgatatcgggatcttctaacgaacctgatttatatttcagctgaccatcttcgttctgagcaatgattacctgttcggaatctgaattgacgaccaagtttgcattgtgagacactataataatctgcctatattgctttatagttttgaaaatagatataagttcgctagtaataaaactattatctaagtcatcctctggttggtcatatatgatagtctcactaaacatatttgccgcaatttgtaatcgtaagtatatagtaccctgttggccaaatgatagtttggttatgggttttcctgcaagagttacatttatatcgtgcgatatgaactgtgtatacctcttgaaaaaaagttctaatagcctacctctcaaatcatctttaattgtaggactaaaaatattatggtcagttgtttgtgaaataaaaccgtaaaaatcatctaatgtttcaatattaagaatcttcttgattttttcctcgttataacttctgccatcaagcttttctaataataagttatacatcttgtatgaatcaaaatgtatatcaacagatacatttaaatcctcttgaagaatcaaatctagcaattctttctttttggggtcaatctctacataatgtcccttaaattcattccacttctgctcaattaaacgagtatacgattctatatcactttttatttcaacacccagacttttaaatacatcacttgttatagcttgatatttagtctcttctattccaatagcttctatttgctttgctaattcagaaactttattttgatacactgaaacatttgacaataaagttgccaaatctcccttatagtctttaaactcatcctttgtatcagctatatctttttgaattctttgttgtgcaactataagacgaggaataagattatctctgatataccctcttgtgttggaggtatcaattgaagggatatctactttttgagatttaaacaactcattccatgtagatatagtctcatttgtttcaattgtaaacctatcaatgtttgttgccaattgttgaagcgaatctatccaagaattaaattggtttaatttgccaaccttatttttatagttctctaatttcttcttattctgttcagaggttatatttgtaataaaatcactatacttttttatttctctgccaattatttctcgcttttcttggggtgttgtattatttgcgttaatgatcttaataattctaaagtattcatttattgcaagttccgctctagatgagaaatcggatgatatgcgatactcatctgtgaccccaatcgtttcacgtatatttcttgaaaatttatctttattttgtaccaaatctttaatttgactttgagcaatatacatgaacggaacattaggattgtcagagaccttaaaatcttttgcttcttcagttatagaagcttgacgactaataacaatatcagaattaagattaaagttgtctgattgtgtttgcttatgaaaagcagctgcaatatagtttattaaaacgcttttaccagttcctctaccaccaataatagacactagattactattcaatgggagctcttgaggggcaaaagaaatatctgtttcatttacaaatacatttgtatttgtcggtatcaatattcgtgtaaatggacatttttctatattataggttggattctctttttgaatacaaacacgcccttccggttcataaataatctgcttcaaaccctcaaatgtaggatctgctttaatccatgtaattcgatcatctggaaacacattaacattttcaagagagtgtgcatcactacctgttacacaaggtttaatactgccataagtatccactatcgcttttgcatctaatccaccttgccctaagaaaaagcgaacatcgtttggatttccagaaaatatcatatctgacatccgataaatctccaatctaattgcttccatggaggaatgttgaatgccactattaccgtctctactactattggaaactgcaacaataatatgattcctcaaaataggtttttgaagaatacgatataggtcttgaaaatttatgttaaattgtccgatgccgacttttcttgcagactcatcatcaagtgaattgtcattacggaacgctttacccaacgctatcaggtctcttcgtataaaagagtattcagaccctccataattaaattttagacaaccaataaactctcgttctatgaaatctattgataattcaggattgaaaataacatgaatatttattggcgtttcttgtttagttactggggttattcttaattcaacgttgggaagtatagttttcccttgcaaacgaccctctgcttgcttctgctttaaaaacaaatagttttcaatcgagaaataatcggttatacctaagactgcaacatctgtattttcttccagtttagcaatatatgcttcccaaacagcttcatcattgccgtattggtcattctttgctgtacctggtgtatggatatgcaagtcccatatacgccattctgaacctttaggatatttagccattgttatgctgcattataaatttgaatcaattttgatttaatatcactgaatgacaagtttgtacttatgtctgttaatagtcctgtatttataacatagacaaaagactctttacgataatatttctcaccaaatacctgtagagacttatcaatcgtgtcagctttagctaacaaacaagtaagttgataatccctgtctattatttgggtcttattatcagggtgagccttggtaaaatgttgcgtggccgtaagcttaattaagttttcaatataatgagcaatttgtggatattgtgattttgggaaaatgtgatgaatctgcgttgcttcaccatttccccattgatcgtgtacctcgctttcttcttgtatcctacgaagcagattcattgctttctgaacatagtactgattgtatgcttcttgttgttcaatatcctgcttttgctgtgcttcttggcgggttattgatttgtctttattaagatctctccagttcttgcgattatacatcaaatcagagaatgtaaatgcatatttagacatatgtcctttctctgttccattgataccattctcaacggcatatatgtttaagatttttgggaacattctttttacctcgacatctccattaaccttggtgtgtccaataataaatcttatgtaacgctctttcagttctgaaaaatcagatttcgtaatagtacccaaagtacatttacttttgtattcctcaaaatacttccacataccactatctttcagtactttttcaaaatagcaatataagaagttataagcatttctttctcttcgagcaatataatcaagtatatcaaggtttacaatcctgtaataatttgttcctccagctttagtaacctcaagcacatgagcatatcccaacatacgcaatggttgttgtatgaatttatcatactcatgacgcgctgttttattggtaggcaatggtttgttaaatacggctttcgcatttttaataaaatattgagactcccatatgtcatttacagtgaatgtcttttcaatatcaacaattgtgttaatcacgctatccgcaataaagcagactacatctggagtgcatttctgatccatgaatcgcgcgtcatttgacttgcgtacatccaaatcaaattggctaagatattcgttgattacatttctcatatcctttgctgtttgagtttcccaaaaaagaaaacagagttattgtctatgttaagtgagcgagtgcctaaattacgggcgatcgcataaaatttcgtaaaactatcagtagcgtaaaatgccaaatcctcgtttgttacgatgtcatcgtcttttgccaatgttaggattgcaacagagccgtcagcaatacatcctttaggcaagaagcatgcacgaggattatacgttagattagggagcaatacacaatttgcctgattaaggtattttgcaacatccaatccctcaatgctatcaatgtaacaatcataatcagggatattgacaatctcattattgccaatatttcgagattttagcaccctaattttgccattatcctttgtaatagctttggtgataactctgtctctatatgctttgaatacattaaactccattttatctgccacctcatcaaaagcctcattgcgataaattatccaataagggaatctatcgtctgttaggtatgcttgctgatgacatttaacctcatcagtaatatatgactctacaaatgtattctgaggcttcttttgggtgtcaagaataaaacagatggtttctatctttactcccttgaatcctttttctccgaagtcaattatgcgagagatatttttctctttcataagtgtacgtgttgcatcaaactcaggagcatttattaggctcttggggactatcaatgatacaacattgccaattctcattgctttctcaatgaagaatgagaagatattattagtatccttgttggatgcctcaatcttgtattttgccagcaactgtttctcttttgttagcttcttgtatggagggtttccgacaacaatatcatacttcttgtcgaagttatgcaacaagaaatctgcattgatgtaattgatgtggatattgttaggcacatcaatctttgcaaccagctctttcaatatttctaaactgtttgcatcaatatctactacgtcaatattaacagactgcacgccagcatacttcaagacaagggcaggcaagaaattacccacaccaattgatggctctaaaatatttagctccgtatagttctttgcatcaggcaaactcttgacaatggtgtagcatatatcctgccttgtataataagccgcattgtcttctctttgagcatttgccaactccgcaattttagacaattcagcaaagtcataatggctattgcttctaatatagtccaccaaacaagaatgtgtagccaatttctttttgtcaatcaacacctttatatcctgttcagacaaagttggcttgcataatattttacgaaccttagctgcaatctgtttgaatataacggtaggtaccgcctcgcccaaattttggcgtatgttcatttcctctttctttagaaatgcttctttctcttttaatgacattctgtttaactcatcaaaaggaatgtcgctccagttaaaagatgaaggaacagacatcataagcataacctccctaatactgaacactctgttatcaacaggatgaacagtattctgactagccataatatcattacgagtgtgaatacaaggtgctactttatcccaatactgacgagtatatttgtcgccattcttacgggcgttgtacacaataacaccattctttacactatgcggtatctttgtaatatcggtattgtcaaatgccgattgtccctccttaatatctgcaatccaagattccatacgaggcgaatatttcctaaagttatgataaatatcatcttcggaaatttcacccatcttctttaacgatggcaaatgaccaataatttgtcttagtgttctctcaagctgcttgtcagggaaaatatcatatggggtaatctctttcaaatctttacgaacgccaataactaatgttcttgttcgacttgatgggttaccataatctttgaagtttacgacttgatagagaatattgtatgctcccgacaagttagcctcaatagcatctttaattgacttgtcttgaccatcaacatcggtacatacagatgtaaggaaagctctaacattctcaaatataaagaacttaggcttaatctgttgtgtcatctttatagactcaacaaccaacgagttgcgttttaactcatctttcttcttgtggttagcaacagacatgccctgacaaggaggcgttgcaatcaacacatccagatctgttagattaaaacctctttcccacattgctaactccgcaaaaactttatctttcgtttcttgcgtagtcatatcgccacaaatatatccgctgttataaacgcatttctgattgaatttctgaattttcaatctgcgttccaacaactctactgtagcgacacaataaaagccctcttccttgaagccatagcaaccaactcctgcactactgaataggctgacataagtcctcaatccatatgcagaacgccgatctgctaatagcatttcggggacttctaactctgggtataatttcactttagccatattaacctattcttcttaaattttcagcggccattgacagagcttccgatgcaacaatatgttcatcagataccacatcagttaccttgtcggcaagccacaatgtaaggaggtctgtcatttctacatgaaacatctccgacaatattgcgacttgttctttcttggctctgcgttcacctttttctatcttacaatatgttgcagtgtctatatcaagagcagccgcaatctgcctttgtggcatctgattttgaatgcgtagctcttttattttctccgtaaacagcatattacttatttttgtcttgacattatttggcaaagatagcgaattaaatccatattcacaccttatattatataaaaaattaaggtgatgtaagattgcactttctgtatcgttgttttagaatctataatttcgccagccgacggctgacgataacaaggtttagtttacttcattggctatatacccaaagcggactaaacttattttcgcgttggcagcactcaaaaaagatgctgacgaaaagaaaaagaggcatattcttcttttttcgccagcataaatacacacatttattaattataaactgatagaacttaatattgtattgaacttctataacttttacacattcaaataagagaggtattcatcaagacttataatgtgtttcccaaaaggccctgagattgtagatacagaagctggataagctttatctactgctgaaatcattcctttgtctgatgtaacaagaatgataggctcaccgcatatttgacgattaactaaatggagaatttgctcgtcccatatttgatttaatcgttcctttttggacggattaaaattggacatatcaagttttgatataagatttgatctcatctctatcggagcaggatatcttttcaaatattcttccgctttttcaatgatgatgcttggaacagttgttttattaccatctactctaatatctttgcttggaattatatctaaatcaatagctaatgcacagatatatgcagtggctgtttcctttttaaaattttctgaagccgcatatacactaaaagtcatatcattgggtaatttaatattttttaatttagtaagcatcccttctaattcgcattctgcttcattgttatgacttttgattctttctatatttgataaataaggctccaaattctctatagtgggatttatgaagacgttaaaaactatttcagtgaccgccttttgctgttcttcggctttcgtattatgtgtgccaaataactccattgataattgagtttcaggaagcggaactagattatatgttttaacatccccacagtgtccatacattgcacgaatagctttagtacaatctccagtttcatcaaatacgccattgtcgaataggtggcaaatcaactctctagcaacggttgttgacattaaagaaattatacccaattcttcctgtcttctaacgattttatggattgtttcatcaatctcttcatttgtttttccaaaaataaaattacgataagcgtttgtgtcgagaactatgtacatgtgcgcttggtataaagattatcttaaaaattcaaaaaaatacacccaaccttggtttttgggtgtaaaaaagggtgtaaatctcgtaactacttgatttacaccctttgctgcggagagtgggggattcgaacccccggtacagtaatcccgtacgtcagtttagcaaactggtggtttcagccactcacccaactctccggtcgccgttccgggcctttatcctgaaacgggtgtgcaaatatagaatctttttgacgaaatacaaagaaatgcagtcaaaatttcatttttccatcgcaccggattcgccttcgcgttgataatctgcgccctgccccattgccgcgccgagacggcgtgcaaccgggagccgaccggtcccaaggtctgcatgcgccggacacgcagggccggcacccgttcgttctattgcgccgggacatgcaccgcgcccctgttacggaccgcagcggccgtatttttatttcgctataagataaaacattgaacctgaccggaaaaagttcatccatttctggcagatcatttgcacgcatatgctacgacggcgccttttcagggtgccattcttttcaaggtgaaaccgggtcgcaacacctttacccggtcgctttcgggacaataaaagatgagaaaatgaataaggtttatttcatgctggcactcctgctggcgtcggtaaatacatcccatgctcagaaatgggctgtcaagagcaacctgctctacgatgccacggctacgatcaacttgggcgtcgaagcggcgctcggccgccgcgtgacgctggacgtatcgggcaattacaacccgtggaaattcggcgacgcccggtggaaacactggctcgtacaacccgaagtgcgctactggctctgcgagagtttcaacggccatttcttcggacttcacgcccactacgccgaatacaatgcgggaggaatcgatttcagcaccgccttccgccacaaccgttatcaggggcacctctacggcgcgggattgtcctacgggtatcagtggctgatcgggaaacgctggaatctcgaagccacggtcggcgtcgggtatgcccgtctatgggatcggaaatatccgatcgccgaatgcggcgaggtgatccgcacccggtcgcgcaactatttcggaccgacaaaaatcggcctgacactcatcttcatcatcaaataaagcagcaagatatgaaacgccatacgctacaccgcataaccggcctgctggccgcatgtctgatcactgccgcaacggcttacggccgcgaaggcaagcccgccgcttacagagacggcgaccggctctgcataaagctgccgatcgccgccggcatggacctcccggccaacggacaattgaccgtcacgccggtcgtcaccgacggcgaacaccgcatgcagctggctcccgtcgttttcacgggacgcatccgggagaaagtcaacgaacgccgggagcggctttacggcacgccggccgcctccgagaatgttttcagcaacacggtcatccggtacggccggaaaaacacgtcggggaatgcggttctcttcgaaggcgagataccctaccagccgtggatggcgggcgggcgcgtcgtcctttaccgcgatctggaggggtgcgccgggcgcaggaccgccctgccgccgctgatcgccgcagaaatcgcggctcccgtacaacctcggctgtcgttcctcgtccccgcggacgcgcccaaacggcgcagcgaacggatcaccgccgtcgtgcatttcccgcagggccgttcggtactgctgcgcggattcgccgacaacggccgccagctggcgcgcattgacagccttacggcctgcctgacggggaacgacacgctccgggtcgagaacatctacctgaaaggatatgcctcacccgaagatacatacgcattcaacacccgtctttcagcaaaccgggtacggtcgatccgcaattacctgcaggagaacttcggactggaggaggccgagttcaccaccgcgaccgaaccggaggactgggacagcctgcggcgctgggtcgtcctctccgacctgcccgcaagagacgaggttctggccgtaatcgacacggtcgcggatcccgacgcccgcgatgccggcatctggaaaacggacggcggcaaaacttatctcatgctgctgcacgaagtttatccgcagctgcggcgcgtggattaccgcatcggatatacgctgcccccgttcaccgtggagcagtgccgcgaactgatcggctcgcaccccgaatggctgagcctcggcgaaatgtgccggctggccgaaagctacggcgtcgattcgcccgaaagggcctatgtctgcgcggtcgcactggagttttaccccgacgatccctgcgcctgcagcaacatggcagcgctggccctgcgacgcggcgatgtccagacggcccgccaatgtctggcccgctgcgacggagcttcctgcgcatggaacaacctcggcattctgtgcctgatcgacggcgatacgcagaaggcgcagcattgcttctcgctcgccgcggagcaaggttcggacgatgcggcatacaatctggcccatttcgcagaactgagctgcgattggtaacacccggtttcggattccaaatcacctaaaaaaataagacatgaaaaaaatttacaatctgttcgtatttgcggctttcgccgttgccgccgcatgctccgacgagggagaaaaaacgggagttaccgatccggcggccggcaacctgcaattcgtcacccgaacgccgcaggcggcgtcggggcgcggcccggtttacgacaccggcggattccgcattctggcgttcagaaacaccggctcggactatgtctacatgcaggacgtcccgctcggcgcgatgagcttcgacggttcggcgctctccggcacggtacagtttcccgccggcgactacaagttcctgccctcctacggactggcggcgccgggcaactacacgtggccggccctcacggacgccgtgctttccgacgcgctctgcgtaacacatacccaagagagttttccggcggccttcatgctcaacgcaccgctcgatgcggttccgtcctgcaccgtatcgctcgacggcccgaaacaaaccgtgagcgccacgctccgccgcgccgtttcgcgcgtggacgtgctcttcatccgggcggagaaggacgcggcgacaggcgtctataccgaaaaaccgggcgacgacatcttcggccccgaaaaactggccgaggtgaagctctcgtacaccggggccaacagccggctgggcctttcgggcgagaaggccgaggggcttttcgacgtgtcgcacaccattgccgttcctgcggacgcggtaacgacgggtacgggcgtctcgacggtcgtcggagcagacaaatacgatttcgagaacgtacagcccgccgacatcatctccggttcggcgcacctgaaaggcacatacctgatccccaaccccgacaatactcccgccaccggattctcgatgctgctcacctcaggcaagggatcgacgcgcaccatagccctgacggacaaaattccggtcgagcgcaacaaagcgacattgatccggatctacgtactgggcgacaatgtctttaccacgggtgtcgatttcgacgtcgaggtcgatacggtctgggacggatcgaacttcgtggacggagagatagactgacgaaaacagactcaccatgaaacactgcaaactaacggcgctcattctggcggcagccgtctgcgctgcctgttcggagccggagagggcggacggaggtccgaatccgcaaacgacgcgcgtcacgctgcggcgcgaaggagccgcggacgttgcggtctatgccttccgccggcagggcgaccggttcctcttcgacacgctcttccgcgaaggatggacctccgacggcaggatgtcggtgcgcatgccgaacggacagtacaaattcctcttcgcaagcggagcggccgaccggctcgtcctcgcacccgaaccgctcacacggcagacggcatgggaggaggtgcacttcgccctgcgcgagaatgcggaggcgcccggcacctgctgtccggccgacgagctgttcctgcaatacccggcctcggacgccgacgcgatccatacggtcggcggtgcggacctgaccgtcgcggcaacgctccgacgcgccgtctgccggatcgaagtctcggtcaagcgcggataccatgacggcacgcagtacgtggaggttccctatgcggaaccgcaatcggtactcggcgagatcgaccgcatcgaactttcggccggagccgcgggactgcgggtaaccccggccggaagcagcgggacggccaccgtggcggcgacactcgcggcgacggattatgcggagctgaccgacggcggattcatccggctcgaagggcctttcatcattccgcccgccgatggcggagaggtaggtctcgacatttcggtcgttcccgccgcgggggccgccctgcaaccggcgcgactgcatctgacgggccgggcggaacgcaacaaacggctcgacgtcacgctctggatcacctccggatatcccgccgtcggggtcgaaataaaaaccgccccgatcgaacgggaacaggacggagatacgggcatttgggaataaaaagcaatcgtgatgaaaagaaatatcctatacagaatctgcggaacgctgttttcgctctcggcgctggcggcctgcgggctggaaccgcaggaggagtgtctcccctgcaacggcaaactccgctacaccgaagtgcatatggaaggcgcgccttcggcagcgggattcgcaaccccgctctacgttttccgccgggcggcgggaacgcaggacggatacctcttcgaccgcagttacacttcggtcgccgacggcgaaacgctcaggctaccgctcaccgagctgagaagttccgactaccgttttctgatgatcgcccagcccgacggcggggagtggctcacgctgaacgcggcggccggcaccacgctcgtcaccggagcggcttgggaagacctgcggctggaatgcgccgccggtgcagcggcgccggacgggtacggcggctttaccgacctgagcggcgaagccattctgcgcgacggaagcatccgtctcacgctgacgcgtatcgccggacaggtgcttttcgacatcttccgtacgggcggctcgctgtcacagcccgaaagcatcgtttcgcccgacacggagtcggtgatcgaccgggtatcccggatcgaaatcacctatgagaatccgacgacggcgctgcgtttcgacgaaaacgggacgctggttcctgcggcatatgccgcggaaccgctgacacggagcatcgagcctcaagcaaccgacttcagggtcgcgcttccccaagcggacagaggactcggcgtatacgatgccggtctgcgcggcagtctgcgcatggaaggggcattcctgctgccgtccgactcgcacctccgcatcaaactgctcttcacctactacgacacgacgcccgtctgcggcaacggccacgcggacgcccacaccccggcatgtttccagcagcgtcaggtaacgctcgcccttccggcggccgaggccggcacgggacttccggtggctgcggactgctatacggtcaaccgggtgggactgcgctgcgaccggatcatcgacgttccggtcggaggaggtgtcgaaacgaatttcgactggctgtaaaacggaaaatcgtacggttatgaaaaaatttccattcttgatgatatgtacggcgctgctgacgggcgggtgttcggacaccgcccccgcaggaggaccgtcggcggacgaagagccacgtgtcgaagtcggcttccggctggaagcccccgacacggacacatcgctcgaacccatgacgcgggcctcctcctacaaggagtggttcggcaacgcctgccgcctgctgatcctgaaaaagaccggagcacgctggatcgtggatgcgacgcaaaccgttctgctggatgccgattcgggtccgtgggccgaactgaaactcgcggacgccctgccgccgtgctcgttcggctgcgaactgcggcccggcgattaccggatcgttgccgcgatcaactggcagtcgtgcgactggaatacggagcttgtccccggaaaagtggtcgccgacgacgccgacgatgcgctgctcacgccgccgctgattacctatccgatttcgacacactggatgaacagcggctaccggcagctgacccgcgaggttttcattgccgtcgccgacttcacggtgcccaaaagcggcgatctccactcggccggcatgccggcagtgacgctgcgggccgagcggcgcgtggcgaaattccgcgtcctgctcaaggacaagccttcgcccgtcaacgcattcacgttcgaaacgacggcccataccgttcaggcgctcttcacgtcgcaaacgaagccctttgccgaaggaatcgatgcgctcggaaatatgtactacggcgcttccggaatatacgagctgccgtggtgcatgtcgacgatgggagatttccacacatcgggagcgggcagatatcaaatgtgtcagaccaattcgacggtcttttcgcccttccttttcgccggaccggaagccggagagatcccggtgaagataacggacatccggatttcgggcaaaagcggcggattcagctacaaaacggatgaagtctacacccgcagtctggcctgcagcacgatcgccggcatcgttttcgaagccactgacatctacgacgacacctcgtcgcagctcctgatagacgtggtcgaggctgcggacgacgcaggcacccccgaaaacgcggtaacgctcttcgatccgttctacgagtggaacgccatgtcctattaaaaacacgaagccatgaaaaatttatcctgcataccgttcgtattttcgtgcctgctgctgtcggcatcgtgcatcgaggagaagctcgacgcctgcccgccccaaggcggaaacgttgcggtgacactccgggtcgaaagattccagacccggccgccctatcgtccgtcggacttggagccggaattcgccgaacgcatccattcgctcgactacctgctctatgccgaagggaggctgatcggacagggccgggcggacgacatacgggccgccgacggaaacagctacctcttccgtctcgacacgcttccgttcgggaactaccggctggcgttcgccgccaacgccgcaccgcgcatgatggccggaaccaccgatgcaccggagctgcgttacatcgtctatcagggggaaaagggcgccgacgaccatttccgggcggatctccccttcgaggtgacatgcccctgccgcaacgagttcgaagccgtgcttcggcgcgtatacggcgtgacacgtttccgcttcgaaaacctgcctgcagagatcgcatccgtggaggtttcgctcgacaacgtaggcgagcgcatgccgctctgcggcgatcccgaccgcccgtgcgaggtagccagacgcattcccgtgaccgacatgggcacacgcgccgacggcacatatacgctcggaacgttctgcaccctgccgggcatgaagaccgcgtggcggctgaagctctacagcgacaacggcccatcgcccgtttacgaccggatggtaacggatacgctgaacatcgaatgcaaccagctgaccgaacttacggcgcgtttcaaggagggcggtcttcgggaagagatcgaattttcagtcgatgtcgacacgacgtgggacggctcgaacgaaggcggcggggaagttgtgctgaaataaccttccgacacaataccgctacattgtttcattatatattaaaagaccgtaatactccaagccgtcgccgccgaaattgattgccggctgcttagtgcaaaacgaaccctccgcatcaagatgcggagggttcgttttgcgttgcaggagtttagaaaataaacttctccagtttcatttcgcccaactgatgcagacgcggcaccagcgtcgtgaaatgcgacgcctgttcgtgtgcggccagcgccttggcgtcgctccacgtctcgcagatcatcagcacgtccggccgcgtcgcactctcgaaaatatcgtacgcaatgcaaccttcgtccttgagtgaagcggtcaccagttcttttgccacggagagtatttccgcacgattggattcggtcgtgcggataaaaacattcagtcttatcatgatcgtatctatttaggtcggttagttagctttcacggcttcgacggccttgtcgtagtcaggctcctcggtaatctccggcaccagctcggtgtacaccaccctgcccgccttgtcgatcaccacgacggcacgcgccagcaggccggccagcggtccgtcggccatcagcacgccgtaggccccgtcgaaccccgacgcacggaaatccgatgcgggcacgacgttctcgatgccctcggtcgtgcagaaacgggcatgcgcgaaaggcaggtccttcgacacggccacaacgacggtatcgggcagcgaagcggcaagtttgttgaatttgcgcaccgaagtcgcgcatacgctcgtatcgagacttggaaagatgttcagcacgacgcgcttgcctttcaggtcgctcaagcgcaggggcgaaaggtcgctcttaaccagttcgaaagcgggagcttcggcgcccgccgttatgaattcgccggcgacaagcacgggcgaacctttgaattttgtctttgacatgactgtttactttaacggttccattattaaacgtccccggccggggtttattgtttttcggccggacggccgggagtcctccgaatcagtccgatcccccgtccgctccagcaaatttaattcctttccggcaggattccaaagtctgtttcatattcttttcaggtttacatgccaactttgcagcaaattaaccgggaaggcgcatattttttgtagttttgcggggaaccggacgaacgaaaacaaacagacaagacagaaatgaaaaaaacactcctcctgctcctgctgaccggctgctgctcgctcgccgcagcacaagagcgctcgccgctcaggcacaccgaagtcattaccgccgattcgctcgacaacgacgccgaactgctggaacgtctgcgcaacatgcccaacctcgaagtgggcaagggcatcacgttccgtcccaaaagcaactggttttcgctgaccatgcgcttccgcatgcagaacatggtgggactgtcgttcgacaaggattttacgctcaccaaaaccgacgcgcaggtaaaacgtctgcgactgcgtttcgacggacacatctactccccgaaactggtttactccatacagctgggcttcacctcctacgataccgaaccgctgcccaacggcaacatgaacatcgtccgcgacgccatcgtctactatgtgcccagtcccaaatggaacatcgggttcggccagaccaagatcaaggccaaccgggcgcgcaccaactcgtcgagcgccctgcagttcgtcgaccggagcatcgtcaacagcgaattcaacctcgaccgcgacttcggattcttcggcgaatacaacatgcgtcagggcgacggattcaacctctcggccaaaggctccgtaacgctgggcgaaggccgcaactggggcagttcgtcgaacggaggactggcctacacggggcgtctggaactctatccgctggggcggttcaaatcgaagggcgacgtgctcgaaggcgacttcgaaggcgaagaacgggtcaggatcctgctggcgggagcctactcctacaaccacaaggcttcgcgcctgaagggccagcgcggcgccgtcatgcccgacgacgcgacccgcaatctgggcgcctacttcgccgacttcatcctcaaataccggggattcgcattctataccgacttcatgggccgcagctgcgacgaaccgctgttcgatccccggagcaacgccttcgtatacagcgggcagggtctcaacgtgcagaccagctacctgttcgacaagaaatgggagatcgccctgcgcaactcgacgctcttcccccagagcgaagtgcagcctttcgccggatacaaacgctggaaccagacaaccttcggcgtcacccgctacatcatcggacacagcctgaaagtgcaggccgacatgtcctacaaccaccgcagcgagtcgatcgaccccaattacaaccgctgggagatccggttccagctggaactgggactctgatacgaaatactccctttcaaatggaatgcaccccaaagcgagataactttggggtgcatttcaatagaaccgtatgcttttacaggattttgagcgcgatccgggcgcaggcttcggcatcggccaaagcgtggtgatggttcgccaagtcgaaaccgcaggcggccgaaacggtatgcagctgatgattgggcagccgcgtgccgaacgtccgccgcgaagcccggcaggtacagtagaaccgataaccgggataaggcatgccgtaaagttcgaagacggcgcgcaggcacccttcgtcgaagggcgaattatgggccacgagcggcagaccctcgatgcgcggggcgatctgtttccacaccgtttcgaaatcgggcgcttcggccgtatcgtcataggtcaggccgtggatggccgtggtgaagcggctgtaaaaattgggccgagggcggatcaggctgtaaaacgaatcggtcacctcgccgccgcgtacgaccaccacgcccaccgagcagacgctcgtgcgcttgccgttggccgtttcgaaatctatcgctgcaaaatctttcatatcgtttctccggggcttatcgccgccgcaaatataggcatttttccgcggcggccgtaccctgcaaacgcaaaaaaatcccgttcattgcgaacgggagggatgaagttttcaggaccggtcaatagattcgccggcggcgggaatccggagagcggttttctttcgacaccgcaaaactacgctccccctgtttcgccgtcgcgacaccccgatgacaatacgaagaacggaacgtttcaaatccgttgcaacgctccggcggccgacgccgggaaccgccggcatatcgcccgcctgacaatcagaacgcccgcaaccatacggccgcggcggtccccgtccggaaaaattttatccgaacgaatatcgtccgaccataattatactatctttgtattcctgaataccaaaaacaacccgacctattatgaaacacccacacctgcttctgctgctcggcggcctgcttctcgcaacggcggcccgttccgcagaccccgtccgctacgtggacgccgcgacgctgaccgtcatcggcaaggcgcttcccaccgaacagccctacaaccgcatcgacaccacccgcttccgggtgcccgcaaagacacccggctactgctaccacccgacgggactggccgtcgtgttccgcacggacagccgcacgatccgcgcccgctgggagacatcgggcaaaaatccgagcgacaacatggccgccgtcgcacaaaaagggctggacctctacatccgcagcaacggagagtgggtcttcgcgggagtcggcagaccgaagatcaacggcaagaacgacctccacgacgccgcaataatcagcaatatggcggagggcgaaaaagagtgcctgctctatctgccgctttacgaccagctgaagaagctcgaaatcggcgtcgatgaaaagagcgtcatcgccccgatggaaaatccgttccgccacaagatcgtcgtccacggttcgagcattacgcacggaatcgcggccggacgcgcaggcatggcctattcgtctcgtctcggacgcgacacgggactttactgcatcaatctgggattcagcggacagtgcaccatgcagcccgaattcgcatcgtatctgtcccgcgtcgaagccgacgccttcgtcttcgactgtttctcgaatcccagcgccgaggtcatcaacgaacgtttcgacgctttcgtcgataccatccgccgcacgcatcccaccacgccgctgattttcctgcaaaccatccggcgcgaaacccgcaacttcagcacccggatcgagaaattcgaacgcgagaaacaggccgccgccgaagcgcaggtccgcgaccgcatgaagaccgacaaaaacatctatttcgtcgatccgggcgatctgctgggcagcgaccatatcgccacggccgacggaacgcatccgaccgatctcggatttacctacatgctcgaccgtatcgagccgcagatccgcaagatactcggcaaatacggcatacgctaaccgccccgccgcagggcgaaagcagcgccgccggagttctcactccggcggcgctgccgttttataacgaaaaatccgctctcccgttacgtatcgggcacgtctgaagtgttctatcaatagtgcggtgctgccgcatgcacccgcttaaacagataaaccaaaactaccgacttcagccaatgaatttccttacccgtttttaccgcatctcttcaccggttccccgccggcagctcgatcccgcacaagagcagaaactatacaaacggctccggctgcaggcattcatcgccgcaacgctcggatacagtctctattacgtgtgcaggacgtcgctcaacgtcatgaagaaacccatcctcgacagcggcacgctcgacgccacgcaggtcggggtgatcagttcggcccttctgttcgcatacgccgtcgggaagttcgtgaacggattcatcgccgactactgcaacatcaagcgtttcatggccaccggactgatcgtatcggccgtggcgaacatgctcatgggagcgctcggcgtcgcgcactcggtgattccgacagccgtcatcttcatttcattcgccgtgatgtggggcctgaacgggtgggcgcagtccatgggtgcgccgcccgcaatcatctccctctcgcgctggtatccgctcaaggagcggggaacctattacggttttttctcggcaagccacaacctcggcgagttcttctccttcatcttcgtgggcagcatcgtttcgatagccggctggcaggccggattcttcgggtctgcgattgcaggcgccatcggagtcgtcatcgtgctgctgatgctccacgacacgcccgaatcgaagggactgccgcccgtggagacgctggcgcacgaagaaccggcgaccgggcaggagttatccgtaaaagagattcagaagcaggtattgcggacgcctgcggtgtggattctcgcggccgcgagcgcattcatgtacatatcccgctatgccatcaacggatggggcgtgttgttcctgcaggaggcaaaaggcttctccgatgcgcaggccatatccatcgtatcgataaacgccctgctgggaatcatcggaaccgtattgtccggatggttttccgacaagctgttcaagggggaccggcatatgcccgccctgatattcggcgtactgaattccgtggcgctgattctgttcatatacggcggcgacgcattatgggtgaacgtcctcagcatggtgctgttcggcattgcgatcggcgtgctgatctgtttcctcggcgggctgatggccgtagacatcgtgccgcggaaggcgacgggtgccgcgctgggagtggtaggcgtggccagctacatcgcggcgggactgcaggacgtggcgagcggatggctcatagacgcaaacattacggtggcggagaacggcgagaagatatacgacttctcgcaggcggcgatcttctggatcgcggcatccgtgatttcgttcctcctcccgctcctcaacagaaagaaaaagcaggccgcataacaattccgaataaccggaacctatagacaggccgaaaaacagcccaaaagacaagccgcccggttctcgaatgaaccgggcggctttatcgtcagggcatttcacctccgatcagggtattcacccttcacaggcccctactcccactcgatcgttgcgggcggtttcgaggagatgtcgtagactacgcggttcacccccttgaccttgttgatgatatcgttcgacacattggcgagaaactcgtagggcaggtgcacccagtcggcggtcatgccgtccgtcgaagtcacggcgcgcagcgcgacgcagctttcgtaggtacgctcgtcgcccatgactcccacgctcttcacgggcagcagaatcgcgcccgcctgccacaccttgtcgtaaagacccgcatcgcgcatggcgtcgatataaatcttgtccacattctgcaggatttcgaccttttcgggcgtaatgtcgcccagaatccggatcgcaagaccgggtccggggaagggatgacggccgatcagctgctcggaaataccgagcgaacgtcccacgcggcgcacttcgtccttgaagagcaggcgcagcggctcgacgatccgcaggttcatcttctcaggcaggccgccgacgttgtggtgcgacttgatcgtagccgagggaccgttcaccgacaccgattcgatcacgtcgggatagatcgtcccctgcgccagccagcgcacgtccttgatctggacagcctcttcgttgaacacttcgacgaagtcgcggccgatgatcttgcgtttggtttcgggatcgctgacgcccgccagatcgccgaggaacttcgcaccggctttgacacccttgacgttcaggcccatgttcttgtaggattcgagcacgtcctcgaactcgttcttgcgcagcaggcccgaatccacgaaaatacaatagaggttcttgccgatggccttgtgcagcagcacggccgccaccgaagaatcgacgccgcccgaaagtccgagcacgaccttgtcgtcgcccagcttttcgcgcagttcgcgcacggtggcttccacgaaactctccgatgtccactcctgcttgcagccgcagatgcctgcgacgaagtttttcagcagctgcgtgccgtcggtcgaatggtacacttcggggtggaactggatgccccacgtctgctcgccctcgacgtggaacgccgcgacgcgcacgtcttccgtgctggcgacgatcttatagttcgccggaaccgacgtgatcgtatcgccgtgcgacatccatacctgcgtggttttgggcaggccgcgcatcagcgcgtcgtcagcatcgcccaccgtgagcatggcgcggccgtattcgcggctgggggcgggctgcacctcgccgccgaaggccgatgcgaggaactgcgcgccgtagcagacgcccagcaggggcagtttgcccttaatggccgaaagatcgggtgtcggagcgttctcgtcccgtacggagaaggggctgcccgacagaatcacaccccgcaccgaagcgtcgagcgccggaatcttgttgaaggggtggatttcgcaatagacgctcaactcgcgcacacgccgcgcgatgagctgcgtgtactgcgaaccgaagtcgagaatcaggattttttccataatataacgtaagtccgacgaatctgggttcatcaatttcggaaggtttacaagccatgaaactcgtcggactcacgttacggcgtctcagacgccggtttcatgcttaaaatccctcttgatctccctttgtcaaggaagacttcgaatcctttaattactatttctttaccggacggttgtagcttcccgaaagacgcatttccgcggcgaaagcctcctgccccacttcgcggatacgttcgacgcatccccggcggtcggaacggaaaacgacctgaaagaccttggcgataaagttgtcgaactttttgcaggtctgaggcggcatcagcgtacattcggcgcagctctgccagccgtgttcgatgcagcatgcccgcaccttgcaccacgacgccttttcgttcgggcggcaccccggacagcttcctttgccgaatttgcggcagttcccgcaaaaaagcccgcaggccgcgatttcgggattcataactaacgttcgctgctgtagttgggcgcttcgctggtaatggccacatcgtgcggatggctctcgtgcatacccgaagaggtgatgcggacgaagcgcgcgcgctgcagggtctcgatgtccttcgcgccgcagtagaacatgccggcgcgaacgccgccgaccaactgatagaccgtctcgctcagcgttcccttgaacggcacacgggccgcaatgccttcgggaacgagtttgctgaagttgttttcgcaccctttctggaaataacggtcggccgatccggccttcatggcgtcgatcgaccccatgccgcggtaggatttgaatttacggccgttgtagatgatcgtttcgcccggagcctcctccgtgccggcgaacatagagccgatcatcacgcagtcgccgcccgcagccagtgccttcaccagatcgcccgaatagcgcagaccgccgtcggcgatgacgggcacgccggttccggccgccgccgaagccgcgtcgaagatcgcggaaagctggggaacgcccacgcccgcgatgatgcgcgtcgtgcagatcgaacccggcccgatgccgaccttcacgccgtcggccccgttttcgatcagaaaccgggccgcttcggccgtagccacgttgcctgcgatcacctccagcgaaggataaacctccttgatctcccgcagcttgcgcaccatggcgatcgaatgcccgtgcgcagagtcgagcaccacggcatcgacgtcttcggcgaccagcgccttgacacgctccagcgcatcgggcgtaatgcccacgccggcggccacgcgcaggcggcccttggcgtccttgcaggcattgggatggtcctgcaccttggtaatgtccttataagtaataagccccaccagatggcccttgtcgtccaccacggggagcttttcgatcttgctgttgagcagcacctccgacgcgtgcgacaattcggtgctatgggtcgtaatcagccggtcgcccggagtcatcacctcttcgatgcggcgcatcatgtcgcgctggaaccgcaggtcgcggttggtgacgatgccgatcaggatgttgttgccgtccacgaccgggatgccgccgatcttgttctcacgcatcaggttcagggcgtcgccgacggtattctccttggagatggtcaccggatcgtagatcatgccgttctcggcgcgtttcacccggcggacctgcgcagcctgctcggcgatcgacatattcttgtgaatcacgccgattccgccttcacgggccagcgcgatagccagcggcgcttccgtaacggtgtccatggcggcggacacaatggggatgttgagtttgatatttcgcgagaaacgggtctgaatattgacctctcgcggcaacacttccgaataggcgggtacgagcagcacatcgtcgaacgtaagtccttcgggctgaaccctttcattgataaaagacataatgaacgtggatttttgttgcatgcaaaagtaatcattttttttgaaacggcctaaattccgggccttcccttcgatttttttatcaacaatttatgataaacgcaacagcctgccgtatctcaacgcgatacggaccgcaggcatcgccaccgcctttgcggtcggactgcgggcaacagcccggcgctccgccgctgcaaaaaaaacgggacgccgttccgcgccccgcaattcacttcaaattattgtcgtcctctcctaatactgctctttctcgctgggaaagtcgcactccttcacatccttgatatattgctgtacggcccccgtcatcaactcgtgcagatcggcgtagcggcgcaggaaacggggcgaaaatcccttgttgatgcccagcatgtcgtgaattaccagcacctgaccgtcgcaggcaccgccggcgccgatgccgatcgtcggggtgggaatctcacccgtcacgcgggcggccagcgcggcgggaatcttttcgagcacgatgccgaaacagcccgcttcgctcagcaggtgggcgtcgcgcaccagcttctcggcctcggcctcctctttcgcacgcacattgtaagtgccgaacttgtggatcgactgcggcgtaagtccgaggtgccccatcaccggaataccggccgagaggatgcggttgaccgattcgagaatctcctcgccgccctcgatcttcacggcgtcggcttcggtctccttcatgatgcggacggccgaatcgagcgccaccttcgaattgccctgataggtgccgaacggcagatcgacgaccaccagcgcgcgattgacggcgcgcacgaccgagcaggcgtgatagatcatcatatcgagggtgatgggaagcgtcgtttcataaccggccatcacattggccgccgaatcgccgacaagaatcacgtcgatacccgcggcatcgacgatcttcgccatcgaatagtcgtacgaggtcagcatggcgatcttttcgccgcgctgtttcatctccgtcagccggtaggtcgtaacggccctgacagtactttctacagacatagttcattacgaatccgatggagcattctacatttcactcgttcgcaaggttccgacatggaatccatcggattcgcattacggcgcaaaaacgcctattccatatcgacaatccctcccgaacctccctttggaaaaggaagacttactgtaatccctgtaaatcggggcaaatatagcgcaagccgggcgcaatgccaaatttatttgaaaccggccgtccgccggccattctcccggcccggtcagcgtcccggcccgatccggcagaaaaaactccacaaaacgacgccgcccgaaaccgcgacgttgatcgaatgcttggtcccggcctgcgggatttcgaccgcgccgtcgcaccggtccacggccgcctgccccacgcccatcacttcgttgccgaagaccagcgcatacttcacgccgggcgcggcgcggaaggcatcgagcatcacggcgccctcgacctgctcgacggccagcacctcgtagccgtcggcgtgcaggcggtcgatacacgcttcggtggtctcgtaatagctccacggcacggtcagctccgcgcccagcgccgttttatggatgtcgcggttgggcggcacggccgtaatcccgcacagggcgatatgctccacggcgaaagcgtcccccgtgcggaagaacgcccccacgttctgcagcgaacggacgttgtcgagcacgaccgtaacgggcatcttctccatcgcggcgaactctccggccgtgggacgccccagctcctcgttggtgatttttcgcataacgtgttcaaataaatgatttcagggtcaaaagtagtcaaataaaaaatattttacctatttttggggtcctaatcaacacaacactatgtctctgaaaaaagtcttgacattcgcgctcgccctcttcattacgggggggggtctccaagcgcagaagctgatcgtcggcgccgacttcacgacccgtttcgacaaccgggagtacgccaacaacgatttcaacgaatcgcagacgctcttcagcgcccggctcacaccccggatcggcgtggaatggatggacaaaaaccggctgatcgtcggcgtggacctcttgcagaacttcggcgacgacaccaaattcctgagcaaggcgcgccccttggcctactaccagttcaacagcaggaacgtgcaggccaacgccggaatcttcgaccgcaaagagctgctgggcgactactcgctggctttcttcggggattcgacggcgttctaccacaaccgcctttcgggttttctggggcactacaaatccacggaacgcaggaacacctatgtggaaatggccatcgactgggagggcatgtactccgaggagtcgcgcgaaatgttccgcatcatctcggcgggccgctacacgctcgacaagggattctacttcggctacgccttctcgatgttccatttcgccgggaagatcggcaacgagaacgtgacggacaacctgctggtcaatccctatgcgggctgggagttcaacgcctacttcgacttcgacatcaaggcgggctttctgttcgccccccagcgggcgcgcagcatcgagtcgggatggaaaaaacagaagggcgcccagatcgacttcgtcatgaccaaatggggcgtgaaactcgaaaacaacctctatctgggtgaaaacctgcagtcgttccggtacgcctacgtcggagagccgctctatgccggcgaacagttctactcgaccaccgaccatatctacaaccgcacgtggatcggttacgaccgccggttcttcaagggaacgatgggcgtcgaggcgggcatggtcttccattacgacggctcaggcatgggcacgcagcagatggtcaagctctcggtagacatccagaagctgttcaacatcggccccaaggctaaaaaataaaaatacaacaagcgaaacatatggcaagcgaaacaaacgaaacacgggagaagtcgctgaacttcctcgaagagatcatcgaagagtcgatcgccaagggcgaaacgcgcgtacaaacccgtttcccgcccgaaccgaacggctacctgcatatcggacacgccaagagcatctgcatcaacttcggactggcgaagaaatacggcggcaagtgcaacctgcgcttcgacgacacgaaccccgtcaaggaggacgtcgaatacgtcgattcgatcaagcgcgacatccattggctcggcttcgactgggccgtagagcgctatgcgtcggactatttcgaccagctctacgactgggccgtggtcctcatcaaaaaggggctggcctacgtggacgaccagacgcaggagcagatccgcgaaaaccgcggcacggtatccgttccgggtacaccgtcaccgtggcgcgaccgctccgtcgaggagaacctcgacctgttcgagcgcatgaagaagggcgaattcgccgacggcgaaaaggtcctgcgcgccaagatcgacatggcccaccccaacatgctgttccgcgacccgatcatgtaccgcatcatccacgccgagcatcaccgcacgggcaacaagtggtgcatctatccgatgtacgactacgcccacggccagagcgactcgatcgagcagatcacccactcgatctgcacgctcgaattcgacgtacaccgtccgctctacgactggttcatccaagcgttggagatcttcccttcgcatcagtacgaattcgcacgtctgaacctcacctatacgatgatgtcgaagcgcaaactgctcaaattggtgcaggaaggcgccgtgatgggctgggacgacccccgcatgccgaccatctgcgccctgcgccgcaagggttacaccccggcttcggtgcgcaacttcgctgaaatggtaggcgttgccaaacgcgacaacgtcatcgacctcggcaagctggaatactgcgtccgcgaagacctgaacaaggtcgcccagcgtcgcatggccgtactcaacccgctgaaagtggtcatcaccaactacgacgagaacaagacagaactcttcacggcgatcaacaatcctgaggacgaagcagccggaacacgtcaggttcccttctcgaaggtgatctacatcgaacgcgacgatttcatggaggagcctcccaagaagttcttccgcctttcgccgggcggcgaagtgcgtctgcgctactcgtacctcatcaaatgcgaggaggtggtcaaggatgccgaaggcaacgtcaccgaactgcgctgcacctacgacccgatgtcgggccaaggctcgtcgagcgacggccgccgcgtaaaaggcgtcatccactgggtggcggccaaagacgccgtcgaagccgaaatccgtctgttcaacccgctcttcaccaaggagaatcccgacgacgtcgaggagggacagacttgggaggacaatctcaaccccgaatcgatggtccgaatcaaaggctatctcgaaccgtcgctgcgcgacgttccggtcggtcaggccgttcagttcgagcgcgtgggctacttctgccccgacaccgactcgacgcccgaacacctcgtgttcaaccgcacggtgacgctcaaggattcatgggcgaagatcaacaagtaaaggcgatcgactgaaaatcgagttgcgataccgaacggggacacgctccccgcgaaaagcggcccgctgagcgggccgctttttcgtacgacggaccaaccacgcctgtcaggcggtcggttcatgcatccggaccggtttccagtccggaccgacttctatttcaacggaatataaatctccgttttcagcttttccgccggcacccggtcgggattattgcggtagcgttcaaaaccggggctgtcacgcagttcgcagccgcttcggggcagccactcccgaaagattttgtgataggcgccgcccaatccggcataaggacccgtatggacgaacatcgcatagcggcctccggcgatcgtcttgacgcccacggggccgacggccaccggacctttgggaatcgtcaggcatacgtcgcaccgcaggtcgccggatttcgaaatgtcgggatcgttgtggtaaacgacgatggactcgatccccgccgagaagagtttctgctcttcgacgtattgccagagacgggcgaaacagtcgccgtaatcgacttcgccgtaatccccctgagcgcggagataggccacggtcttttcggaaatttccagcattttgggtttcgacagccggattccggcgtcggaatgcatgcattttgtcatggacggaaggtttttagcggttcggtactcttttggcgagatgccgaaaaaccgtccgaaagccttggtcagcgacgacggggcgtcgtaccccacgcggtaggcgatctctgcgaccgtaagatcggagtaaagcagcaggcgtgccgccgtctcgatgcgcgtgcgggcgatgaactcccccggcggctcgcccagaaaggccgaaacgatgcggtggaaatggcagggcgaaaacgacgacacctcggccagcgtacgcaggtcgagcgtttcgtccagatgggtccggatgtattcgacgacggtgttgatccgccgctgataatcggctgtcgtggctggtttgttcttcatctcggcgacaaaggtattctccgccggggaaacggacttttccgattttgcgaatttgccttacatcatccgcccgaaagtcctccggccgaaaaggtaacgcagcaccaccgaacctcggtaaatattctcttccgcagaccctttgcggttctgccggatggtcttccgcttgcgggacagatcgcggtgccaccgcaggaagtcgcggtaggcgcggaacaccgcccggaaattgtcgctccgcccctgcaccagataggacaaggccgccagcaagtcgagcgcaggacgcacgacggcaaccgtgacccgctgcacggacgaagagcacttgtagagcatcgccagattattgcggtggttgtagaagactttggtcggcgaatcggtcgtgagcgtaccgccgccgaggtggtagaccctgctttgcggcacgacccgcacccggtaaccggccagctgcatgcgccagcagaggtcgatctcctccatgtgggcgaaaaagtcggcgtcgaagccgcccagcgcatggaacacatcggcccggcagcagaatgcggcgccgctgacccagaaaacgtcgcgggcgtcgtcgtactggccctcgtcggcctcgacctgtttcaggatgcggccccggcagaacggatagccgagaaagtcgataaatccgcccgaagcgcctgcatattcgaatttcgtgcggtcggtccatgagatcagtttcggagagacgacggctacgtcgggttcgcgttccagcacgtcgaggatcggagcgagccacccttcgggcgtctctatgtcggaattgagcagcaggtaatagtccgcccggacctgctccaaagcccggttataccctccggcaaacccataattggcatcgagacgcaacaccccgacggaggggaattccgtcgccagcaccctcagcgaatcgtccgtcgagccgttgtcggcgaccacgacctccacgccggcaggggccgcagcgacgacactgggcaggaaacggcgcaggtgttccgcgccgttccagttgagtatgactatcttagcgaccgacatttgtacgtttgtgtttccagcggcggtgcgaccacatccagagttccgggtgttcgctgatcatcgcttccagcttcctaacgtaacgttccgtaatttcgtattcggcgacctgctcttcaccgtcgtaaatcggctcgaacgacatctggtagcggccccgccgcagacggtccatcctgacgaaatagaccggcagtttgcagcgcagcgccagcttctccccgccgtcgaaaaaaatcgtatcctgattgaggaagcggaaccagtggctgtcgggacggcgcggcggattctggtcggcgataagccccatgacgaggtttttgccgtccacgccgcattcccggttgcgcaggtagaagcgcagcgaatccttcatggccacggtcatcgaattttcatagttgcgcaaacgctggtaaagccgctccatgaccttgctgcgcaggggatgatacaccgccaccaacatctgcgagcgttcgtaaagcccccagtaggaacaatactcccaacagccgaaatgggccgtcatagcgatccagtcgcggccgtgcacggccttgtaatgttcgtcgaatcccttcaccgtcagcaccgtgcgggccttttcttcgcccatatgggccatattgaccgtatcgacgaatatctcggccagcgtccggtagaaattgcggcggatgacggccagctccccgacgctcttttccgggaacgaattgcgcaggttttcgttcacgaccttcatgcggtaacgcaggcagtagtagagtatgaaaaagagcaggttctcgacgacgtaatatttgaaccagtacggcagcacggcaaagaaacgggcaccgagccacaaagactccagccataccttctgcgcaaaattcagctcagctcgtttcatccggcaaggcgttagggttcgacaaaaagtttcacgttatccaccttggtgcgtatcctcagccagctggccagcgtcgtccggtcgatcgaatcggcgggcgccttgggcgtaacgacgcaaacgagggtcgtatcgagcggcgtacccgcgacatcgaacgtaatgcccttcatcagcgatatggccttgatattctccatcatgacgcccacttcgcgcgaaatgtcgtccacttcgacgttcgtaacccggtagcgtttcagctgagccgtcatttcgccgatgcgccggttcttctcctccagcagttcgaggtagctctgctgcagcgacgccacgtttatctcgtccgtcttgttggcctgacgcaccaccagttcggccttctccagtccgaagttgcgcatctgcgcacgggcattctcgataatttcatcgccgatgggttctcccacgagcagcagttcgatctgcgaggggtctttgccgtgcgcataatgcttgttgcactcgatcacgcgcgtatgcggaaacttgaagacctgcgcgacgtatttgtcggccacggcttcgaacagcgagacgcggaccatatggaaaccgatgacgacgctcggaatgaaagtcacgagcgtaataaccatcatcagccgcttgacgttgcgttcgcgcaccttgtcgataaaggcgttcttctcgtacttcaggaaacggaccatgaggtaagtcgccagcgcgatgaagaccgagttgatgaaaaagaggtaaaaggccccgacgaagaattttatctgccccgtcgccagaccgaagcccgccgtgcagaggggcggtatcagcgccgtggcgatcgccacaccggggataacggtcgaggtgcggtcctgccgcgtctgcgccacgataccggccagaccgccgaacagggcgatcagcacgtcgtaggtcgtcggcaccgtgcgggccagcagctcgctgctgttcgacgagaggggcgacacgaggaaatagaccgtcgaggtgataatcgccacgatgaacatcagcgcatagttgcgcagcgcctttttgagcagctcgaaatcgttgatgcccagcgaaaggccgatgcccataataggacccatgatcggcgaaatgagcatggcgccgataattacggccgccgaattgacgttcaggccgagcgacgcgatcatcgtcgcaaaaatcagcacccaaaggttcaccccgcggaacaccacgcccttgctgatggccgccacgacctcgtcgcgctgcgccttgtcttcgtcgaggctgaagcgcccccgcaggaattcacgcatctccccgatccagagcgagaaagagcgttttacattatgcgtatcgttcgtattttccatttcaacatgcactatctttcatttattcctcttcgtccgccgccgtctcccgcttcggtttgggtttcccggccagcacgatcacgaactcccccttggggtccgtcgtgcggaagtgttccagcacctcggcgaccgtaccgcgaacggtctgttcgaatttcttggtcagctcgcgcgacaccgaaaccctgcgttccggcccgaacacctcggcaaactgttcgagacacttcaccacgcggtagggagactcgtagaatatcatcgtacgctcctccgcggcaagcgactgcaactgtttggcccggcccttcttctggggcaggaaaccctcgaaacagaaccggtcgcacggaaatccgctctgcaccagcgccggaatcagcgccgtagcgccgggcagggtctcgacctcgatccccgcttcgacgcaggtccgcaccagcagaaaaccgggatcggagatgccgggcgtgcccgcatccgacaccagcgccgcattgcgtccggccgcgatcgactcggcgaccatcttcaccgtggcgtgttcgttgaatttatgatgggaatagagtttcttctcgatgccgagatgtttcagcaggaacgaagtcgtccgcgtatcctcggcgagtatgaaatccacgtcgcgcaggacattgaccgcacgcagcgtaatgtcgtcgagattgccgatcggggtgggaacgatataaagctttgccatgcagctatgcgaatttacgttccagcagttccatcaggaatttggccccgtcggaattggcgttccacgcataattctcggcgatataaatcatgcactcgtcgaaatcgtcgaaaccgttgagcgttccgatcgccgcctcgtaagccgctgcatcgccgccgaacaagtcgcggatcatcaggaacttgtcgttgatgccgatggcgcggcgcaggtcggtaacgtgttcgctgcgacgcagttcggacgccacgtcgcgcggcggcgcgatcgtgtcggccagtgtctgcacattgtggttgatcacctcgcccaatacggcgccggaggtgtttttcgcttcgagcgtgatctcttcgaaatcaggctcgtcgtcatccccggcactgtcgggcgcagtggtttcggccgctttcggctgcggagcggcaaccggagtccgcgatgccacaacgtccggtccgggtgcaaaggttgtcgcggagccgagagagcttgtcgcagagccgacggaagttgtcgcggatgctgcgggttccgtcacgggcgccgtaaatggagttgcagaaagggcggacccggcagttgcgtcggcggaaacggagactccggcggcggcagttccggccgatacaaaatcggacgctgcggaaccggatgacgcggaaccggccaccgccggttgtgcgaacgacgcttcggccgcaggtttccctcccgcaacaggttttgcggtaggctcaggggccggaacggatgcgggcttcggggcaggcgcaggcttcggggcaggcgcaggcttcggggcaggcgccgcaggctccgtattatatagcgacatgatgacgcgctgtttatgacggtgacggacagtctcctcttccagttcgaacagtgtcggagctatgggttgagttcccggcgcggaatgcgcttcggctttggcaggagcttcctgcgccggagtctgttccgcatcgacggacggcgcaggtgagacggctgatgcggcggcaggctctgcaaccgactcggaatgtgccccgacgacggactcggcagcggattctgagacggactccgcaacggattcggaaagcgactctgcgaaagattcggtcgctgattcgacgacgggttcagcaatgaattcgggcttttcggacgcttcctccggttctcggacagtttccgccagcggcactgactgctcggcggcaggttccgcggcatttccggcaacgggttcggacggagtcgtctcctcaatggaaaactcggattcaggctcagaagcgaccggtccggattcggtcacgggttcagcggcagagatttccggttctgaaatcgggttcgtcccgccgtcggaatcggactgcgcaacaaatgcttcggcagaatcggcaacaacttcaggttcgcccgccggctcttcggcaggttcggaatgtcgtgcgaaatttacgcccggttccacggtctgttcggacccgaactcaggcttcgattccggcaccgtctccggttccggctcggaaacggattccgactcggagaccgcgccagcttcggcgactgactccgactcaaaggccgtccccacctcggcaaaagattcagactcaaaatccgcacccgcttcgccaacagcgtcccgtttggcggcagcatccggttcgaaggctgaaaccggtccggcctgcgcctcaaccgcgaacgggtcgagcggaagtatttcgccgaggtcgatgctgaccggaatttcggtcggagcaggctccgccgcggcctcttccgccgcatcttcgcggacagccgcaaagtccgcatccgcgccgaaacgcacggcatcgtataacttccgcagtttttcgagcaccagatcccgttcgagggccgcggtctcctgccgggtgttccaactgtctatgatttcagagagcttctgcaattcgctccgcacgtatttcaaatccatgatccgtacactttttgccctcaaagataggaaaaatttacgaactgcccagcggaatcgcccatataatatcgcagcccctccccactgccgccgggaaacggaaaaggggacggcatacgcatcgtcccccctattccgtctgcggaaaacatgtcactttccgaagatatgtttcgcataattatatccgcaggcgtcgtaaatcttcgccagccggcgtacgcggcgcaggtagtcgccgtaatccttccggtcgagactccaccccacttcggccagcgcgctcaggcgcggcaggagcatgtattcggcatggggccacgtagcgatgtactcggtccagaggttggcctgcacgcccagtatacagcgctgttcgtcagccgtcagcatctcgtaaggatcgagcgaatagaccttctccacaggcagataaccgccgatggcgagcggttctccggccgtatcgcgcgtctggtaatagtccagatagcagtgcgtcgtcggagccatgatggcgtggttgcccatcttcgcagccttgatgccgccttcggcgccccgccacgacatgatcgtagccgtcggcgtcacgtcgccctcaagaatctcgtcccagccgatcagcctgcgtccgtgggcgttgaggaatttctcgacgcgggccgtggcatagttctgcaaccggcgcggccgcttcagccgctcggccttcatgcgcgctttgcaatgcgggcatttcttccacatcaccgtcgggcactcgtcgccgccgatatggatatactccgagggaaacagctccaacacctcttcgagcacgccctcgatgaattcgaacgtcgtctccttgccgatacagaaaacccggtcgtcgatgtcccacgtctggcgcacttcgtactgctcgcccgtacagcccagccacggataggaggccagcgccccgacggcatgccccggaaattcgatttcgggaatcaccgtgatgaaacgctccgcagcgtaattcaccacgtcgcggatctcatcctgcgtatagtaaccgccgtaaggcgtttcgtcgaatttgcagttctcgtcgtacgtgccgcccggatcacggccgatcagcgtacggctgcgtacggaacctatttcggtgagtttcggatatttcctgatttcgatgcgccacccctgatcgtcggtcagatgccagtggaagacgttgagtttgtgcagggccatgatgtcgagcgcctccttcacctcatcgaccgtgaagaagtgacggccgacatcgagcatcatgccccggtagcccagacacggtttgtcctcgatcgtgacgacgggcagttcgacggcccgcacgtcgtcggcttcgtacgctgccgccggaagcagctggcgcagtgtctgcacggcatagaacgccccctgcgctcctccggcgacgatgtcgatccggcagggagttacgaaaaggcggtaggcctccgcaggcatcgtctcgtcgcgggtgacgttcaccgcatggtccgcagccttgtcggcatgccttacccgcgggccgcggccgaacagcggcatcagcacctcgttcagcgcggcagtcacgccggccagacgctcgtcgtcgaacagcaggaccacctcggcgtcggaggtcaggcggaaggtgccctgcccctccacgatatgctccgggagcggcacgacggccacttcgccgtcggtcggaatcaccctgccgcaactgcaacagccgcacaatacggcgaacaatgccaaaacaggtaaaagtctcttcatatcggatcgttttcgtgggtttcggtgcaacttacccggtaaatataacgaaaaaacggatttcgccaaagcaccgcgtcatttattcgcaggccgaagctcccagcagtcctacgtggtcgatattcgaacagcagatatgcagtccctcgacggtcttggcataggggaaccgtttcagctgttcgtacatcgcttcacggaaaaagccgaacgcatgggcgatgctgccgccgaagacgatcgcttcggggtcatacgtatagagcaccagcatcaccagctggccgacatgccccccgaactcgcgccaaagcgccaacgcttcgggatcgcccgccgcggcgcgctcgtaagcctccttacccgtcgtgccgcggcccacgaagaagcggctgctgcaatagtattcgtaatcccggtccagatacgggatgcttccgatctcccccgccccggtgtcccggccgcaatagagcttcccgccgatcacgacgcccgcgccgacgcccgtgccgagcgccacgcacaccacgtcgctgaacgcgctcgcctcgccgaagcggcagacgcccagcgcaaaacagttgcagtcgttgttgacatgcaccggcacgctgaaacgtttttcgagcaggtccttgaggtaaacctcgcgccacgaagggatgcccaccacattatatacgattccccgcgcggcgtccaccaccgacggcacgccgataccgatccgcgaaacctcaggttgcataagctccccgataagcgatgcgatatgatccaccacctccccttcgggacggtcggctttgcagggttcggaaagcagccgcacgatatgtccgtctttcacaaggccggcgcgcacgttcgtgccgcccaaatccacgcctattctcatctcttgtctgttaattgctgttcttgactttgctgatcctgccgtcgcggaactccacgtgatcgacgatccgtccgtcgcgctcgtgaatccacgtctcgaagccccgctcgccctcggtcagcaccagcagacgcacgccggggcgcaggttgttgtaggtcgtatcgtcgcccgaaaaacgtccgtatccgagcgctatacccttctcggcaacgacgtagtcgatgtcgtggtcatgccccacgaacacccccgtcacgtcgccgctctcgaccatcgccgcgaacatgccgggattcagctcgcccggacactcgtcctcggcggcgcggccgatatgcgtattgccgggattgcgccacgccgcgacgtattcgggcagggcgatatggaaaaaggccagcgccggcagcggtttcccgccgttggccgcggtataggcggcgctccggtcgcggtaccagcgtatctggtcctgcgtgaaccagccgtagccgtcgatgccttcgacagtcgaatagtcgtgcgaatcgaggcagtaaagcaacgccgcaggcgatttcttcccggcgatctccagcaccacgtcggccagttcgccgtcggcgttcagcgtgttgagcgtcccggcatacgaagtgacgatgcggccgattccggcgcgcggaatatcctgttcggcgtcgtggttgcccagcaccacgcagaacggcaggttacgctccgcaacgggcgccagcacgcgcttccacccttcggcggcgggtttccccgtcaccacgtcgcccgtgaagacgaccagatcgggccgctccgcatcgaggatataacgcatctgagcgatcgtcttctccgcctgagcctgccggtagggattccccagatcgaggtgcacgtcggtgaactgcgcgatcttgaatttcccctccccgttgaattccagagcgggcctctgcgcctgcgccgaacaccacaaggcaacggcgcacataagtgtcgttatctttttcataagcaggttgggttgctcagttcagtttcacgctgccgcccttctccacgcggaccgtacggctccggccgtcgccccacgtcaccgtcaggtcgaagggcacgttggtctcaacgctcacggagggcgtctcgccggccgaagcgcgccgtttgaccttcagccccacgacgccgtccggcccgtagggatagcgttcgatgccgtgggcctcggtatggtcgatgtcccacacgatgcggccttcggagtaatccgacttcacgccgaggatatactcgatgaagacggcgatgggcggaagtccggtccagcccacgaagtccttgcgtgccatgaatccgggttcgatcttctccggggcgtagtactcccagaaggtgccggtattcttccacacctcgaagactgcagcgtaatggttcgcggcgatctcccgcgcaaggtcgtgatagcccttgcgataaaggccgtcgatggtcatgtaattcgtaccgggccacacgccgccctgccagtagcggcccagcggattgtatttcggatggtcggccgaaagcgacggcacgcggtgcggacggtcgaactcggtcgtatcgctcagatgcgccaccatgggggcgagccgctcccgatccagcgcatcggcctgcaaagcccagaatgcgccgattcccttggtcgtgcagagcgttccgtcgccgtagcggtcgtacaggaaagccgtccgctcgtcccagagatgttcgttcacataggcgcgcagccgcttcatctcgtcctccatatcctcgatctcctgccagcgctcgatataaaaaccgatgttaagcagcgactcgtcgaccagcatctgctgcaggttggtgtcgagccagaccatatgtccgtgcgaaaagatcgggttgtattcgggcttcacgcggggcatgttgtccatgcccgttccccagccgctcgaccagtaggtgccgtcgggccacgtgcggttgagccgccaccatttggcgtaggcgcacagcgcggggaagaccttgtgcaagcggtcgatgtcgccgaactggcggtagtacgtcagttcgacccacggcaacaggttcgggccggtcgaagtcggatcgtaacgctcgaaacagtcggaaccgtcggcccggatttcgcggcagatgaagccgtcgggatgctgcttcgcatagaaattgtccagcgaacgctggaacgggaagaagcggtagccgtagcgggcgaacatcatcatgaacgaggcgtcccacatgaaaatattgccgttgtaggcgatatccagatacggcgagacgaatcccgatccctcctgcggctggcggatgttgcccacggcgatccgccaagcatgccagtacatctcgatctctttgtcgtgcccctcccacacgggtgcgggcaggatcttgcgggcctcggcgaacgaacggggcttgatggtttcgggcttggcggtccggaattcgttttcggccacgaagacctcctttacataggtattcttgtaaggcagctcgtaaggacccgatttaaggccctgcgctccggccgctcccgctgcgaagaccagcggcagaagcgccgcgatttgtttgcgtagcgtcataatatgcggtttattttatcagcgatttgatcctgcgggcgatctccgtattcatatacgtaccgcagaacttgtcggctccgggaccgtatgcgaatacgggaagcatcgcgggggtatggtcgtcggagacatagacgcccatcacgcggcccgtccgctcgtcgccgtccaccagcaccagcccgcccgtctcgtggtcggcggtgaccacgacgagcgtctcgccgtttcggtcggcgaatttcagcgcttcggccacggcgaggtcgaagctcagcatctcgataatcgagccgggcaggcagcgcgaatggccggcatagtcgatcttggcgccctcgaccatcaggaagaaacctttgccgccccgctcctgcagtttggcgatcgaagccttcgtggcgtcggcctgcagggtgaggttggcctgctcggcggcatcgtccatcgtctcgtcgatgcagatcaccttgcctttccgggcgttgatctcgtcgaccgaacgcacgaaatcgtactgttttttcagctcgccgatcaggtccacgccgtcgctgcggcgggtgaattcgcggatgccgctgccgcaaagcagatccacgcggccgtccatcaggcagcgggtcagctcgtcggcgttgtcgcgttcgaccgaatgtccgtagaaggccgtcggcgtggcgtcggcgacattgccgagcgtcagcacgcccaccggcatccccctgtcatggaaaaagtcgctcagcgaaggatacggctcgccttcggaactcatcgaaatatggcggttgtcgtgacgttcgcccgtcgccagcgcactgccgcccgcggccgagtcggtcgtgaaggcatccagcgcattgttctgctgcaggcccatatacttcatctgcagcgtcgtaaggcccttgttggcataaaatgcggccacgatctgcgaaaggcccatgccgtcgccgatcaggtagatcacgtttttgacttttcccttgccgccgtcgtttcgataggtcggcgtgtagacatcgataccctcggtgagctgcagtttatcgttctgaaatcccctgaaatcgcgcgtggtcttgtccagacgcttcgtgccggtcacgccaccgacggccgtacggcgctggccgatctggaaattcttgttgccgaaatcgtcgaagaatccggcgcagacctccggacgatcggtgttgatgtagtcgatccccatgtcgtaaaacgtatagtaaactgtcgtaccctcaggagcgccccagaaacgcacgggcttgccccagccgtgggcgcggtcgatgatcttttccagcttcacacgctcggcgggaatgatcgaacctttaccgttccactgcgaatagttcctgaagtttacgcttacgagggcgatgcgctccagctggtccggggtgtaatcggtctcccaattaccgtcgaaacggacataggcgggatatttgccgaaatcctcaggcgcgggaacccgtcccgtaacggcgatacgcacggcttcgggattcacggccgggtcgaagacttcgggataacggcccagcagcgccgtaacggcctgcagcgtcggttcggtcgccgatttgagttcgaccatcagttgcagacgttcgtccgaatctttccatgcgcggccgccgttgcgcccaaaaagcgtcacgatcggctcgacgtagagcgactcgaaagtcatgtcgggcgaaaggtcctcgacatcgtgccccacgagcagccggccgtcgtgcaggaacacgtcggcttcgatcgagtagaccccctgcgcataagcctgccagaagggagcgcggcggcaatagtcgttatgcgaatggatcagcatggggcgttcggccgcagccgttacgcagaagcacaatgccgcagccagcagccagcttttcagtatctttttcatcgtaggagtcatttagcgattttgacaacggccatcaccggagcgtggtcggaaacatagccgccgtcgaaggtgtcgggcagcacttcatagcggacggcttcgatgtcgccgctcacgaagatataatccagcaggggacgctcggcttcgggaatctgtccgaaatcggagaagctccagtcggttcccgaccgctgcgccgcgatcgccttcgcgtcgcgtagcacgccgtccttctgcacatgggccaccaccgacgatccgggttccgagttgaagtcgcccgtcaggatcacgggacgtcctccgctcagggtttcgatgcgtttcatcagcaggctcacgccctcgtcgcgcgccacctgcccgacatggtcgagatgggtgtcgatgaagaagagttcccggccgtccctgtcgcgcagcacgacccatgtggcgattcgctcgcaggcgccgtcccatcccagcgaacccaccacttcgggggtctcgctcagccagaacgtccccgaatcgagcagcgtgaagcggtccttcctgaagaacacggcgcagtattcgcccgactcggcgccgtccagccgtccgacgcccactccttgatacccggtcagcagaccgctaagatcattgaactggttggaaagcagctcctgcgtgcccagcacgtcgacctcctgcgccttaatcaccccggcgatccgttcgcggcggaaacgccagttgttctgcccgtcttcgggattgtcgtaacgcatgttgaaggtcatcacgctgagcgaagtcgccgagccgcaggcggtgaacgcaaccgctgcgagaagatagatcaatcgtttcattgtcccctattttttatgttaaatacaatatttccgtcaattcgtcagccgcagattcgcttcggggatcgcttcgaagccctccgctccgggcgctttccagccccacgagagatcctgcccctcgtaatcctcgaaatagagcagcgtatagggatgcagtcccgcttcgagcgccacgcgcccggtcgccatgaccgaagcgtgggacccgtcgttgtccaccaccttgcggtcgccgatcgtcagcacgctgccgtcgtcgctcttggtcatgaactcccagacgccccgttccggaatgaggatcaatcccgtaaagacataggcgaagtggtcctcctgcggagcttgggcgatcgaaggcgcaggcatcgtgccggacgacacgtattttcccttccggatgtcgttcacacacgagaaaacgccttcgtaatagctgtaagcgacaccgggacgcgtggcggtctcccctgcgggtgcgcctttgcggaacaccgccttctcggcttcgagcgtcagcgtacggctgggcgcggcgccgggtttgaatcctttggccttgagcgtcagcgaacggtccaccggcacgggagcggcatagagcgccgacgtttcggtgggttccgagccgtcgagcgtatagcggatttccgctccggaggtcgtcgtcgccagagcggcggcgatcggctcggtgaacaggctcacgttctgcgtggtatagggaatcgaaaccacctcgccgcgggtcagcgaatggggcgcggccgcatcgtccgtcccgcgttcgtaatcggggcgcggccggagcgcaaagtgcagctcgccgccctgcatcagttcgtcgtaggtgatgtaattccggtcgatcggcttcccgtcgagcgtcaccgaagcgatatagacgctgcggcgcggattgtcggccgtaacggtcaacgtacggccgttggccagccgcacgacggctttcgggaactggggcgcggtcagcgcgaattcgttcgagccgggacatacgggatagaaacccagactggagaagacgtaccacgccgacatctggccgcagtcctcgttgccgatgatgccttcgggcgtcggggcgtacatctcgtgcagcaggcggcgcgtcagctcctgcgtcttccacggctgtcccacataattataaaggtaagccatatggtggctcggctcgttgccgtgggcgtactgccccatcaggcccgtcacgtcgctcacgtcgagctgcatttcatccgattcgagcgtgaagagccggtccatttcgcggatgaacgcttcgcggctgccgaagagctggatcaggccgttcacgtcgtgcggcacgaagaagcggtagtgccacggcgtggcctcggtatagtcgcggcccgtggcgaactcttcgaacggcgcggaccagttgccgtcggactgacggccgcgaaaaaagcaggtcgagccgtcgaaaacatttacatagttgagcgcccgccgcgcatattccccgaatacgtcgtcgcggcccatggcctgcgccatgcgggcgatcgcccagtcgtcgtaggcgtattccagcgtacaggagaccgattcgcgcttgatattggagggaatatacccctgcaccgtataataatccgaacctttcttattgatgttcgacgaacggatcatcgcctccagcgccttgtcggcgtcatagccgcgaattcccttcagataggcgtcggcgatgaccgacacagcgtggtagccgatcatcgtgcccgtctcgcccgaagccagcggccagatcgggagttcgcccgttgaatcgtacatgtcgagcatgctgcggatcatgtcgttcaccagcgcggtatcgaccagcgtctggagcgggttccacgcccggaaagtatcccacagcgagaacgtcgagtagtaggactccccttcgggcatccgcgcgacggtctggtcgtggcggcggtactcgccgttcacgtcgctcatcaggttgggcgtcagtttcgtatggtactgcgccgtatagaagttggtcatctcgtcgcacgagccgccttcgacgacgatgtcgcccagcgctttgcgccactgcccgacggcgcgggcatgcacggcgtcgaaatccagttcgggaacctccgcaagcgaattcatacgggcgttttcgacgctgacggacgacaatcccacggcgatcgtgagcgtccgcacgtcgggcgcgaaggtcagcacggcctgcttgtcccccaacagctgcacgtcggcgaacggctccgagaagcgggccgcgaagaatacatactgatcgggcacccacccctgcgtgcggcgcatgccggccagctcaccgggagccgtccggcggagttcgcacaggtcgatcttctcctcggtgaccgtatgcagcagatcgacgatcacctgccggggacctttgcccgtaaaggtatagcggtgtacgcccgtacggggtgcggcggtcagttcgaccccgatattcacgtcgggcagcgtcacggcgtagtagccgcacgaagcccgctcgtcgtcatgcgaaaagaaatagggctgcaaaacgcactcgccgtcgtggatcacgatttcgcgcgtggtcggatggaacaggatatccgcaaggtcggcgcatcccgtaccgctcaggtgcgtatgcgaaaagccgtcgatcgtcgtgtcgctgtaatggtagccggcgcaggcgtcccagttgccggcgcgggtgtcgggactcagctgcaccatgccgaaaggcgtggtggcacccggataggtatgaccgtggaatccggtgccgatgaacgggttcacataatcgacgggatcggcggaccgcggcgaacagccaagggccgcgagggccagcagcagaagggtaagttttttggtcataacagtagtcggtagtgcgaaccgtccggaaaatacaaatcaaaggtacggattccggagcgatattgcaactccgcgcccttctctcttcgtctgtccgaagccggtcgcagtttaggtcatacaaatatagagaagcgattgcgccctgccgtggctatttgcgcttttacttcctcaaatcgcgcagaaccgtcatttcccgcccggcgcccccgaaacgccccgatccgccgccgaaaaatcgcagaaaccgcccggatttccgaaaaaaaagctacctttaccgtcgaacggacactacccgaacgatggcacgcgtaattttcctgaccgacttttccgaagcgtacgcacgagaactgctcctcggcatggcgcgctatgcgcacgacacggcgcaggcgtggagcctgtgccgcctgccgctctcgatacgcgacaaattcggcatcgaagccgtcgtggagtgggccgtacgcatgaaggccgacgccgtgatcggccagttctacaacaccgacaacgtcgaactgttccgcaaaaacgggatcatagccatcgcacaggacttcaagaaacgcttcaccaccatccccaacatcaccggaccgcactattcggcgggcaggatggccgccgagtattttctgcaaaaaggcttccgcaacttcgccttctacggcacgcggggaatcgacttctcggacgaacgctgtcagggcttccgcgagacgatcgaggcggcgaatcccgaattcaccttttcgtcgctgcgcagcagcgcccagaacgatttgtggtactacgactcgacgcagctcatcacgtggctgcagtcgctgcccaagccggtggcgatcatggcgtgcgacgacaaccaagcatatcatatcaccgaggcgtgcctgcagatcgaggggggggg

SEQ ID NO: 12070 - DNA, 32314 bp, Unknown
  gut microbiota DNA sequence
gctctccacccccaacctttcgtcgctcaatcagggcgtcgagcagggcggctacgacgtggcgcgcctgatcgaccggctgatccgcaaccccgaagcggagtgggaggacgtcatggtgatgccgacccacatcgtcacgcggcaatcgaccgacatttacgccaacaacgacccgcacatcgccgaagtgctgcgctacatccatgagaacatcagccagaaaatcacggtcaacgaactcgtgaagctggtccccctgtcgcgccgcctgctcgaaacccgtttcaagaagagcatgggcacctccatctacgactatatcatacaggtccgcatcgaaaagatgatgcagctgctttgcgaaggccagagcgtctccgaagcggccgccgagctggggttctccgacatcaagaacgtctcgcgcactttccgccagctcaagggcatcaccccctcggaataccgcgaacagttcgcgcccaaaagacggtgatccgcccggcgggccgttcccaatatccgggcgcccgaattcccaatacctcccctcctgtcttttccgccggtttcattaattatacggccaactgtcatacacgacaaccaatccgcaaatccatgcacaaaaaaagcagcgacccctcaaaggccgccgcttagtcccgttcgaccgtcctgcggtcagagcgtcacaccgccccgcaggcggatatcctcgcacgacgatcccacgaagatgttgaagtcgcccggctcggtcacgaacccgtgcgagaagatgtcgtagaagcggaaggcttcgtcggtcagcgtcacttcgacgcgcttttgttcgcctttcttcaggaagattttctcataacctttcaactccttggcaggacgcggcacgctggcttcgacgtcacccacatagacctgcgccacctcggctgcgtccataccacccgtgttcttcacagcgaacgacacgactaccccgccgtcgcgcttctcgaccttcaggtccgaatactcgaacgtcgaatagctcagtccgtagccgaaaggatagagcggcttcaccccgctgcgctcgtaaccgcggtagccgacgaacacgccttcattataagtaacgcgcttctgcaaggtgttcttgcggtgggtgcgcgccacattctcgtaatagctgcccagcgtcggattgtcctcggcgcggcgctcgacggagatcggcaggcggccgctgggcgagatccgccccgtcacgatctcggcgatcgcctgaccgccctgctgtccgggataccacgccatcagaatcgctttggccttgtcgccgaacgtcgaaaaatcgacaccgccgccgctgttgacgaccacgatcagattttcgttgagcgcggagagccgggcgatctcttcggactgtccttcgggcagcgtaaaggtccggtcggaattctccttttcgttggtgttgtcgaatccagcgcagtagatcacggcgtcggcccggacgatccgggcatcctcggcgcggggatcggcggtcatatagccgaacgacacctcggcggacgaggcgttgtcgaaatattccaaccgcagcgcgtatttccggccggctttcatttcgacgctccccttgcgggtcgtcgcgttgtggttgccccagtcggcgagcacctcttcgccgtccacgaagagccggtaaccgtcgtcgccgcgcatgacaaacgaagccgtgcagtcggattcgggaacgaacacgccggtccagcggatcgagaagccgtcggcgggaagtccttcggccggcgccttatccttccagttgaagccgattttcgtatcgacgcgcgtcagcgcgggagttccctcgaaacgtttgttggcgaagtactcgcccctgagtcccggcgttttgcagtcggccgaggtgtagaccatgccctgagcggccatatcgctcgccgaagggagattgcccaaaaccgtcaccctgtatttcttgcccatcatctgcatgccctcgccgaccgaaaccgtcgagaagggatgcacgaaaccgctgccgccgcccgtcgggatattgcccgaattgggtcccagtaccacgatatcgcgctgtttggtcagcggcaggaaagccccgtcgttcttgagcagcaccacacccccgcgcgccacgtcgagcgccgcggcgtccgagaagggattgtgttcgggaatagcgggatcgagctgttggcggtccaaaaatccgaacgcaatgagcgtctggaggatatgctgacatttcaggtcgatcgtgcgttccgacaccacgcccgattcgatgagcggacgcaggttgcgggcgttcataaaccgggcgctcggcatctccagatcgagtccccggttggcggcgccctcggccgaataggtggcgttccagtcggacatgaagattccttcgaagccccacatcccgcgcagaatatcgaccgcaagctgctcgttctcggtcgcatgctggccgttgacgaggttgtaactcgacatcacggcgcccacgccggcctgctcgaccgccttgcggaaggccgggagataaatttcgtggagcgtacgctcgtcgatatcggaactcacctgatgacggtcccactcctgattgttgcccgcaaagtgtttgatcgtcgccataaccccttcggactgcatgccctcgatatactgcacggcggtctccgacgccagataggggtcctcgccgaagtactcgaagttacggccgcacaggggcgaacggtagatattgacgccgggtcccagcatgatatgcacaccgcgggcgcgggcgtcctgccccagaccgcgtcccatatcgcgcaccagcgcccggtcccaagtcgccgcggcggccacgccgcaggggaacatcgtactgcgggtattgttgcgtacgccctgcggaccgtcggccatccggatttcgggaatgcccagacgcggaacggccctgatatagaattcgttgtaaccgccgatataatcgattttttcatcgagggtcatctgtccgaccagttcggcggcgcgctctttggcctgcggcgggatcggctgtgcggcggcggacgacacgaatgcgaacgccagcacggcaacaagagtttttttcatcgggttgaagttttaatggtttatgcaaagaaaataaaaatattccgaaaagcatcggatcggaaacaaaaacttccgaaccgaaacctccgtccggccgcacggctcaccataattacacgcccgcgccaccggaaaccccgaaccggagcaatatttttcatcatcggatagcgagccaatacatatatgaaaagaaattagtatctttgcgcttcggcctgcaggagagttcccgccggatgctgccgggcagcatcgccgacgtccgcgcaggacgcgcagcggatgctgaacgcacgcaaacctccgtccgcacacgcttaatgcgcaggacacgcagcaaccgtcgcccgcaccgcctgcggtgcaggatgcgcggaagatgccggacacgcgacaaccgccgtccgtacggaacgctccgggccgcagacaaccgattcgaaacaaacaagataattcaatggctttacagtgtggcatcgtgggtcttccgaacgtcggcaaatcgacccttttcaactgcctgtccaacgcgaaggcgcaggcggcgaactttcccttttgcaccatcgaacccaacgtgggcgtaatcaccgtccccgaccggcggctcgtccggctggccgagatcgacaaacccaagcgggtgattccgaccaccatcgaaatcgtcgatatcgccggactggtcaaaggcgcgtcgaaaggcgaaggactgggcaacaagttcctcgccaacatccgcaacacgcacgccatcatccacgtactgcgctgcttcgacaacggcaacatcacccatgtggacggctcgatcgaccccgtgcgcgacaagggcatcatcgacaccgagctgcagctcaaggacctcgaaacgatcgaaaaccggctgggcaagacccagaagcaggcggccgtgggcggcgacaagaacgccaaacgtcaggtcgaactgctgctgcaatacaaatcggtgctggaacagggccgcagcgcccgcacggtcgaactggagaaggaggaccgcaaactggtcgccgacctcaacctgctgaccgacaaaccggtgctgtacgtctgcaacgtcgatgagaagagcgccgccacgggcaacgcctacaccgaggcggtccgtgcggccatcgccgacgaaaaagccgaaatgctcatcgtcgccgccgccaccgaagccgacatcgccgagctggagagctacgaggagcggcagatgttcctcgaagacctcggcctcgaagagtcgggcgtcgagcgcctgatcaaatcggcctacaaactgctcaacctcgaaacgttcttcaccaccggcgccgacgagtcgcgcgcatggacctacgtccgcggcatgaaggccccgcagacggccggcgtcatccacaccgatttcgagaagggattcatccgcgccgaagtgatcaaatacgacgactacgtgacgctgggttcggaaaaagcctgccgcgacgcgggcaagatcggcgtcgaaggcaaggagtacgtcgtgcaggacggcgacatcatgcacttcctgttcaacgtctgacccgaagagagaccaaacacggaacaatacacaaacaacatatcattatgtccagacctgtaagagtgcgctttgcacccagccccacggggccgctccacatcggcggcgtccgcacggccctctacaactaccttttcgcccgtcagcacggcggtgtgatgatcctccgcatcgaggacaccgactcgcagcgtttcgtgccgggcgccgaagagtatatcctcgaatcgctcaaatggtgcggcatcgagatcgacgaaggcgtcggcgcgggaggtccccacgccccctaccgccagagcgaacgccgcgaaatctacctcaaatacgccctccagctcgtcgatgcgggctgggcctactacgctttcgacaccgccgaagagctggacgccctgcgccgcgaagccgaggagcgcggcgaagcgttcgcctacaattatgccgtgcgcgaaaagctggccacgtcgctggcgctgccggccgacgaagtgaaagcccgcatcgaacgcggcgaccagtgggtgatccgcttccggatgcccgaaaaccagaccgtcgaaatggacgacctgatccgcggccatgtagaggtgaacacctcgacgctcgacgacaaggtgctttacaaatcggccgacgcactgcccacctaccacctcgccaacatcgtggacgactatctgatggaagtctcgcacgtcatccgcggcgaggagtggctgccttcgctgccgctgcactacctgctctaccgggccttcggctggcaggagcgtcagccccgcttcgcccacctgcccctgctcctcaaacccacgggcggcggcaaactctcgaagcgcgacggcgacaagatgggcttccccgtattcccgctcttctggacctccccgacgggcgaaacggcccgcggctaccgcgaggacggctatttccccgaagcgttcatcaacatgctggcgctgctgggctggaaccccggcaccgagcaggagatcttctcgatgcaggagctgatcgacagcttctcgctggagcgcgtctcgaaatcgggcgcacgcttccagcccgacaaagccaaatggttcaacgcccagtacatgcaccacaagagcgacgccgagctggctgcgctgttccagcccatcctgcgcgaccacggcatcgaagtcgcggacgaggtcgcaggccgggccgcaggcatcatgaaggagcgcgccacgttcatcaccgacctctgggacctcacgtcgttcttcttcacggcgccggccgaatacgaggagaaacagacccggaagtactggaagggccaaaaccccgaaatcctgcgcgagctgcgcggcgtactggcctcgatcgacgacttctcgaaagagaacaccgaacaaatcgtccacggctggatcgaagagaagggatacggcatggggcaggtgatgaatacgctgcggctggcgctcgtaggcgcgggcaaaggtcccggcatgtacgacgtcacggcgttcatcggccgcgaggagaccttgcgccgcatcgaccatatcctcgcaaccttaaaacccgcagaataatggtacagatcgaacaacacgtatggggcatgacgccggagggcgaagccatcatcctctacacgatgcgcaacgacaagggcgccgaagtgaaaattacgaatttcggcgcggcgatcgtctccgtcacgatgcccgaccgcgagggccgcatggccgacgtggtgctgggttacaagcatcccgaaggctacttcttcgacggagccgcgtcgggcaaaagcgtgggccgctgcgccaaccgcatcgctttcggccgcatgaccgtcgagggaaaggagtacgcgctcgaagtgaacaacggccccaaccacctgcacggcggcacgaagaacttcgccaaccgcatctgggagagccgtgtggagaccaaccgcgtggtcatgtcgctcctctcggaggacggcgaccagaattaccccggcgaactgaacgtcgaggccgtgttcgatttcgacgatgagaatgcgctcgaaataacctatctggcccggacggacaaaacgacggtggtgaacctcaccaaccacgtctatttcaacctcgcgggcgaaggcagcgggtcggtcctcgaccaccagctgcgcctgaacagctcgcaggtgctcgaaatgaacgacaagcagatccccacgggccggctgctggacgcagcgggcacgccgcaggacttccgcgaattccgtccgttccgccccggcatcgactcggagttcaaccacatccgcgatttcaagggatacgaccacccgttcgtcatcgacggctggaagcccaacattctgggcgaggtcggctgtctgcgcgaacagacttcgggccgctgcgtgacggtgctttcgtcgcagcccagcgtgatgatctacaccggcaactggctcgcaggcggatgccccgaaaccaagtcgggcggccgttacaacgactacgacggcgtggcgatcgaatgtcagaactaccccgacgccgtcaaccaccccgaattcccgtcgccgctgctcagacccggcgaaacctactgccagaaaatcgtattccggttcgggactttcgcataggcggcggagaaccgcggcgcaaccaaaacaaactcccggcaccggccggacacgggcagatacgctgctcggcaataacgcagtaacgcgggcgtatgcccgcgttactgcgttatccgcgttacttacgatccgccgcgcagccggaaatgacttagcgtaaaaaagcgactattgtccgacgcccgtaatcggacgctcaccgggccgaggggcgcatacgcgccgaacagttagcgtaaaaacggctgtaagtttgtttttcatccgccgaatggataattttacgtctgcaacctaaaaccagccccatgtccatccagatgaaccaatcgctgtcggtagactgcgccgtgttcggtttcaacggcaagtcgctcaaagtgctgctgatcgagcggcgctactatgcccccgacacccgtctcgacaagctcaaactgccgggcgccatgattctcgacaacgagacgctgccgcaggccgcctaccgtgtgctcgaagaggccaccggactgcgggacgtatacctcaaacagatggatatattctccgatcccaaccgggtgagcggcgaggagctggaatggatcaaccgctatcacggcatacggaccgaacgcgtggtgacggtgggatattacgcgctggtgaagctcgacacccgtaccgtcgcctacaccacggccaagggcgcgcaatgggtcgatgtcgattcgatccagcggctggcgatggaccacaagcagatactttcggcggcgctggcggttctctgccgcgagatgctgcaatcgcccgtggctttcgaactgctgccccgcaaattcaccatccgcgcgctccagaacctctacagcgcagtgctgggcatcgaaatcgacaaccgcaacttccgcaagaagatactcgcgtcggggtttctgaccccgaccgcagaacgggaacagggcgtagcccacaagccggcgcaatattatacctttaataaaaacgcctacaaaaaggcgctcaaagcgaagctgaagctgggattcatcaacaactggaggtattgatccataacaacagataacatatgaaaagtttaggcatagacataggctcttcgtcggtcaaggtatcgctgctggacatcgcgtcgggcgagtgcgcggcctcgtccgccaaccccgcaaccgaaatgcccatcggatcgccgcaaagcggctgggccgagcaggaccccgaaatgtggtggcattacgtctgcgaaggcattcgggccattgcggcgcagggcttcgcgatgagcgacgtggtgtcggtgggcatcacctaccagatgcacggactggtctgtctcgacaagcagggccgtccgctgcgcccctcgatcatctggtgcgactcgcgcgccgtagagatcggggccgaagcgctggaaggcatcggacgggagttctgtctcgcgcacaccctcaattcaccgggcaacttcaccgcgtcgaaactggcgtgggtaaggcgcaacgaacccggcgtattcgcgcagatatacaaattcatgctccccggcgactacatcgcctaccgcctttcgggacgcatgtccacctccgtcagcggcctttcggagcagatactctgggacttcgaagaggagcggcgggccgatttcgtggccggatggtacggcattccacaggagacgatccccgaagccggcgtctcgatcggcacggaggcccgcacggacgaagcggccgaacggctgctgggcatccccgcaggcactccgatctcctaccgcgccggggaccagcccaacaacgccttttcgctcaacgtcatggaggcgggcgaagtcgccgcgacgggcggcacgagcggcgtggtatacggcgtcacggacaaacgccaagccgacccgcagtcgcgcgtgaataccttcgtccacgtcaatcacacggccagcaatccccgttacggcattctgctctgcatcaacggcacgggcatcatgaactcgtggatacgccgcaacgtcacgcaggagaggctcgactacgcggagatgaaccagctggccgcaagcgtgccggcaggctccgaaggagtgctggtcgtacctttcggcaacggagccgaacggatgctctgcaaccgctgtcccggagccggaatcatcgggctggacctcaaccgccacaccacggcgcacatcctgcgcgccgcgcaggagggcatcgcctactccttccgctacggcatcgacatcatgcgcgagctgggagtgcgccccgacgtcatccgcgcaggcgcagcaaacttgttcctctcgccgcttttccggcagacgctctcgacgctcacgggcgcccgcatcgaactgttcaataccgacggcgcgctgggcgcagcccgcggcgcggcgctgggcgccggctactacaagacgcgcggcgaagcgttcgccgcattgcgcaggctggaggtcgtggaacccgccgaagctgatagagagacgctggaagaaggttaccgggcatgggtccgggaagtagagaaaagaatggaataacaacctgaaaatcattcaatatcatggcatcaaaacagtatttccccaccgtgggacagatcgaattcgaaggcccggagtcgaagaacccgatggctttccgttactacgaccccgaaaaagtcgtgaaaggccgcaagatgaaggattggttccgtttctcgatggcgtggtggcacaccctctgcgccgaaggcggcgaccagttcggcggcggcaccaaaaccttcccgtggaacgagtccgcatgtccgatcgagcgcgcgaaagccaagatggacgcgggtttcgaattcatgcggaagatcggcatcgagtactattgtttccacgacgtagacctcgtggacgaagccgcgacgcccgaagagtacgaaaagaacctccgggagatcgtagcctacgccaagcagaaacaggccgaaaccggcatcaaactgttatggggcacggccaatgtcttcggccacgcccgctacatgaacggcgcatcgaccaaccccgacttcgacgccgcggcccgcgccatgctgcagatcaagaacgccatcgacgccacgatcgaactgggcggcgagaactacgtcttctggggcggccgcgaaggctacatgtcgctgctcaacaccgacatgaagcgtgaaaaggagcacatggccaccatgctgcgcatggcccgcgactacgcccgttcgaaggggttcaagggcaacttcctgatcgaacccaaaccgatggagccgatgaagcaccagtacgacgccgacacggagaccgtgatcggattcctgcgggcgcacgggctggacaaggatttcaaggtcaatatcgaggtcaatcacgccacgctggccggccatacattcgagcatgaactgcagtgcgccgtcgatgccggcatgctcggttcgatcgacgccaaccgcggcgactaccagaacggctgggacaccgaccagttcccgatcgacctctacgaaatggtgcaggccatgctggtcatcgtccgcggcggcggcctgcagggcggcggcacgaacttcgacgccaagacccgccgcaactcgaccgaccccgaagacatcttcatcgcccacatcgccgcgatggacgtcatggcccgcgcgctgctcatcgccgccgacattctcgacgactcgccctacgaaaagatgctcgccgaacgttacgcctcctacgactcaggcgaaggccggctcttcgaagagggcaagctcacgctggagcaggtcgccgactacgctcgccggcacgaacccgtccagcgcagcggcaaacaggagctgttcgaagcgatcgtgaacatgtatatctgaccttatgactaaaacccaagaaaccggaagccgcgcctacctcttttcgatcgtgctggtggccatcatcggcggcctgctgttcggttacgacacggccgtggtgtcgggagccgagcaggccctcgaccagttcttccgcagtgcggcggacttcacctacacgccgtggatgcacggcttcaccgcatcgagcgcgctggtgggctgcgtcatcggcggtgcgctgtcgggcctgcttgcctcgcgtctgggacgcaaacgctcgctcgtcgcggcagccgtgctcttcttcgtctcggccgtcggctcatggcggcccgaaagcggcatcctgccctacggcgaagcgtcgctgccgctgctggcgtcgttcaacatctaccgcattctgggcggtatcggcgtgggacttgcctcggccgtgtgtccgatgtacattgccgaaatctcgcccgcgaagatccgcggcacgctcgtctcgtgcaaccagttcgccatcatcttcggcatgctggtcgtctacttcgtgaactatctgatccgcaaccagctgggcgacacgggcgaagccattcaggccgccatggtctccgtcggctggcgcaggatgttcctcagcgaagcgttccccgcggcgacatttctgctgctgatcctcttcgtgcccgaaaccccgcgttacctgaccctcaccggacacgatcagaaggcattgcaggtactcacgcgcatcaacggcgcggccgaggcccgcacgattcacaccgaaatccgccggacggtacacgccaagaccgagcggctcttcgcctacggcgcagcggtgatcctgatcggcatcctgctctcgtttttccagcaggccatcggcatcaacgtcgtgctctactacgccccgcgcatcttcgccggaatgggcgcgtcgggcgacgcttcgatgctccagaccgtggtgatgggcgtggtcaacatcctctttacggtcgtggcgatcttcaccgtggaccgcgtgggccgcaaaccgctgctcatcgtcggttcggcgggtatgatgatcggcatggccgcccttgcggcgctttcgttcaccgggtcgatcggcatcgcggcactggtcttcatcatcatctacaccgcatcgttcatgatgtcgtgggggccgatctgctgggtgctgatctccgaaatcttccccaacacgatccgctcgcaggccgtggccgtagccgtagcggcgcagtggatctcgaatttcctcgtctcggcgaccttcccctcgctgagcgcatggagcgtcggcggcacctactgcatctatgctctgatgtcgctcgcctcggctctcttcgtctggaaatgggtgcccgaaaccaagggcaaaaccctcgaagagatgtcgaaactctggcggaaaaacggcgactgaaccgcggcaaaaacagacattgccggcgaaccggaagaccgggccgggcggattcgtaaataaaaattgtcagcagtaacgcagcaacacgggtatatgtcccgcgttactgcgttacccgcttctcggaaccgcccggtcgggtcggatcgctatttttacaaattcttcgcataccgctcccgatttcccgaatctttttattacctttgccgtcgatatttcgaaggggtgccttactatcaggctgagattatacccattgaaccggatacgggtaatgccgaaaccgggatgcataatctttcaacgcataccccttttcagttcattaacttttaaaagttcagacatgaaaaggtttctacttcccatcgcggccgtcgcgctctgcgttgccgcaaacacggcgagcgccgagaatccggcaaacgccgtaattaccgctgcggccgaaactccggctgccgtctccctcaccgcaggcgtaacgaacgccgcaaccgccgcagacgcgacacgatccgcggcgtttgtcacggcagctgccgttccccctgcaaagacaagcgaagcgatcacggcagccgccggcccggcccggcccgaagactccgtgcgcatgtaccgcctgcaggagatcgaggtgaccgccacgcgcgcatcgggcagcacgccggtcgcctataccgacctttcgcacgaagcgatcgcccgcaacagctacggattcgacattccgtcggtgctggcgctgactccctcgatgatcgccaccaacgaaaccggcatcggcatcggcggcacgtcgatgcgcctgcgcggaaccgacgccacacggctcaacgtcaccatcaacggcgtctcgatgaacaaccccgactcgcactcgatgtactggtacgacacgcccgacctcatctcgtcggtgggcaccatgcagattcagcgcggcgcgggcatctcgaccaacggcacgggagccttcggcggcgcggtcaatatgtccacggccccgctcgaaaccgagttcggcggcgatgtctcgctctcgtacggatcgtacaacaccaacaaacaggccgtgcacgtctcgtcggggctgatgggcggccattggacggtggacgcacgcctgacgcgcctctcctcggacggctacatccgccgcggaggcacctccctcacctcctacatgttccagagcggctattacaacggcaacacgatgctcaagctggtttcgttcggcggcaaggccaaaaccaacctcagctacaacggcgccacgcgcgacgagatgcgtctcaacggccgccgttacaacagcagcggcatgtactccacctcggacgcctactcccaccgcatctggaacagcgaggacggcgagtggcagcaggtgaacttctacgacgacgagaccgacaactacctgcagatcaacaaccagctaatcctcagccagcgcttgggcgaccgatggacgctgagcgccacggccttctacacctacggttacggctactacaagcagtataaggacaacgccaaactcttcgaatacctcttccccgaccatttggcctaccagaccgacgaccaaggcaatttcgtgacggacggcgacggcgaacgaatcgccgtacgcagggacctgatccgcgaaaaactcatgcgcaaccatctgggcggcgtgaacgccgcggcggcctacgctgcggataacctcgatctcgccttcggcggctcgtggagctactacagctgtccccattggggcgagctggactggatgcaggaaaccgatcccgccgactaccgcagcaaacgctggtacgacaacgacgtggacaagcaggacgccaacctcttcgcacgcgccaactggaccgtggcccgcagacttaacctctttgccgacatgcagtaccgctacgttcactacaaggcatggggcgtgaacgacaactacgacgaagcgagcgggggcatgcagcccatcgacgtggacgagacataccacttcttcaacccccgcgccggcgtcagctacacgcccggcaaacgccacaatttctacttctcgttcgccgtggcgcagaaggagccgacgcgcagcgacttcacggaccgctacatgttctccggcgacgactcgtacccctcctccgagaagctatacgactacgaactgggctacacctacacctcgccccggttcagtgcgggcgtgaacctctactacatgaagtacaaggatcagctggtgcatacgggcatggtcaacgacagctccgacgcgctgaacgtcaacgtgcccgacagctaccgccgcggcatcgagctgacggcttcgtggcgcgtgaccgggtggttcaccgccggcgccaacgccaccttcagccagaacaggatcgagaactatgtggacgcactctcgaacagccccacctacgggcagaatctgggcgagcggaccatctcctactcgccgtcggccatggggtcgctgtttctgaacttccattaccggggcttcgaagccgtgctgcacacgcaggccgtaggcaaacagtattttaccaacgacgagaacgagacgctctcgctcggccgttactgcgtcaccaacctcaatctgggctacacgttccgcacccgcgccgcccgaagcgtgcggctgggcctgcagatcaacaacctcttcaacgccgagtacgaaagcaacggctacggctattcgtacatggacacgtggagcgccccgacgccccggcgcatcgacatggcctactacttcgcgcaggcgcccctgaacgtgctggccaacgtcacggtaaagttctgacgggcaaattccgtcccccccccggaacccgatccggagggacgcaacgcagataaaacgatggattggaaacttatcctgcagatcgccggcgtggtgctggggctgctctatctctggctcgaataccgcgccgacatccggctgtggatcgtgggactcgtcatgccgctggtccacggcgcgctctactacaaggcggggttgtacgccgactgttcgatgcaggtctactacgtgctggcaggactctacggctggctcgtatggcgcaacgccccgcgcaaaaaggccaagacggcccggaacgcggcagcggcaggaccgaccgatcaaacggcccggagcgcagaacccgcagcggcccgaacagcccggaacacaacggcgggacatagcgaccaaacggcctgcaatgcaggacccgaagcggcccaaacagcccggagcgcagaacccgcagccgtccggatcgggcatacgcccctgcgctatgtaacaggactgatcgcagtctacgccgcggcgcacgccggaatctatttcctgctctcccggttcaccaacagcaccgtgcccttctgggacgcgatgaccacggcggcgagcatcgtggcgatgtggatgctctcgcgcaaatacatcgaacagtggctcgtctggctggccgtcgatctgataacgatcgggttgtatctctacaagggaatccccctcaccgcgggactctacgccctctactcggcgctggccgtggccggatacctgcgctggcgcaagctcgcggcacaagaaacgaccggtaccgcaaagtaacgcaggcgaagaatcactacggcgcaaggcgccgccgacgctgagcaacacgacgcgagtgagacacagcaaaaccgcacaacgcggaacggcgccggcactgggccgccgaaactcagcgaccattacgaataacgcagtaacgcagggtacgccccacgttgctgcgttttcgtatccggttctgttccgcagaaaaggacaacgccccaaagtctcggagtcccttcccggtaaaaagcgaggtccgcaacggaaagcccccgcataagcagtccaatctcagccctccgccataaatcgtcccactccggcctctctcccgcatccacggtttcaagcataacagcggctcacacccgcaaacagcgaggtccgcaacggaaagccgtctccgcgtccctattccggcaggccgtgctccccgacataggcgaggatctcctcgcgcagtgccttgggcgtcacgctgcaccgcagcaccagcaggtaggagttgcgaatctgctcgcggataaagccgtcgggcaggtcgccggtggtgcggacggcgttccagtggcgtttgttgaagtgccacgccgcactcacctcgtcgtactgctcgcgcagcagcacggcttcggccggatcgcatttcacggcgacccattcgaattcggccatgtcggcgcaggcgaacatcttgcccccgaccttgtagacaagggtcgtttcgtcgaagggcgtgctctcttcggccatcggcagcgacagacagtagtcgcggaaagtcagtacatccataatcgatcgttttttcgttccggtccggcacaattccgtcgcagcggcgcatttccacggccggccggaattactcgccacccaaagatatataatttttggcacacgtattgcgtcctgctcccaagtaaaaccaaaatcaaggaaacgatgaaaaaaattctcctctgtatctgcctgctgtcgacattcgcagcgggtctggtcggctgctcgcagcagcggcaatggaatcacgaacagcgcaaagcgatgcgcgaagccctgcgcagctaccgtcagatggtctatctcgacgacctttcggacgatgaattcgtgctctttaccgacgaggtggccggtgatctggaaggggcctaccccgtctatacgaccttcgtcgaaatgccgggcgtgaccgacacggtcgacatggtcgtcgtcacgaccatcgtggacgaactgaacgccgacgcgcacaacatgcgccatatctatccgtacaactatctggtggcgcagggcgtgcttcccgccgggctggaccaccagcagcagaaggctttctacaactgcttcgcaggcaaggtgaacgcggcctacagcaccatgtcgcagttcttcaacgccatactggccgacacgaccgacatgtcgcagattcgtcagatggaggccggatgcgccaacgacctcttcgactgggtgattaccgaagtggaggtgaccgagaccgccgactgacagaaccgggacccgcataaccgggacaaccggaatcgcacggcaaacgacgcgcagccgcacggtccgcgcacaaaaaaggcaggcttttgcaaaagcctgccttttttgtttcagattctcatcggttcacatacccgatcgacgaacaatccgataacggaacgtcaaaaaacagcagcgacgaattcacagcattattcaacaggaagattgtgctgtttcaaaaacgagagtttatcccaataccctctctgaaagacgattttatcgtttttcacatgaaaaaatccacatccgcgaagtccgagctgatctttccattccattatcgcccattctccatcttcaaaaatattctctacgatacaaaccatttcagccgttgcaaattcatttgcaaacatttcatggatcgccgtttttcctaccaccggtttattcgcaacctgatggtttaccgcatcttcggcatacagctccgtaagacggaccgcatcggcggcattaaagcggtctatccacttttccaaaacttctttaggcgtcataatcatgcttgatttatagttcggatttaccttctgagcggcttccgagtgttacacatcgtttttaaaaagactaacgtattaatttccgcttcttcccggaaacgccgcccgacacgaccgcttgccgcacgccgttttccggcgcagattccggccgcagccgctacttgccctcgcacgggcactcgccgcgctcctgccggtcgtagaactcccggcccacgacgatccggaccgccttgtggagaatcgagaattcgagcggcgtctcgcccagcagctcgccgtccacctcgaccgaaatttcgggcgacgactcgatgcggatacagcttccccgctcctgcaggatatgccggatgcgatagatgccgccgttgaacaggtagtggaaccggaacagcaggtgccagaaatgcaccggacgcaccagcgacacgtcgagcataccgtcgtcggccacggcgtcgggcagctgctgcataccgccgacgttgtacttgcagatgccgatggcgatgctgaacagcaggttgttgtagaccagccggtcgtcgacccacaccttcacgcccgtcgatttgtagcggaagaagttcttgaccagacaccacgtggagcgccagcggcttttgcggccctttttcttgaggtgcgaaagcttgcgcaccatccgcgcgtcgaaacccgcgcccgccacgttggccatatagcggctctggcggtagtgcgactcctcgtacgacaccacgcccacgtcctgcaggaacgagtagccctcgccgatggccttcacggcatcctgatagcggttcgaaataccgaacgtgcggacccagtcgttgcccgttcccacggcgatcacggccagcagcacctcgtcgggacagacctcctgctggatgaaaagtccgttcaccacctcgtgcagcgtgccgtcgccgcccacgacgatgatattgcggtaaccctccttgacggccgacacggtaagttccgtggcgtggaacttatgctccgtaaagaccggttcgcagacgatatgggcgtcgcgcaggagcttcgatatctgcggaaaatggtcaagcccgcggccgcctccggccacgggattgacaatgacgaaccatttgaccttgtcggcttccaaagcgcactattttttgggaatattgcgcagcgtatcgaccatgaagtcgtagaatttgcccaccgacgcgatctccaccttctcgtcgggcgaatggggatagcagatcgtgggtccgaacgaaatcatgtccatcttgggatatttactgccgatgataccgcattcgagtccggcgtggatcgccgtcacggcgggttctttgccgtagagggccttgtaggaggcggtcatggccttgaggatcggcgactccatgttcggattccagccgtcgtagctgcccgtgagctgcaccttggccccggccagagagaataccgcagcgatcgcttcgcccagcgcggccttctccgagttcaccgagctgcgcagcaggcactgcagtttgacactcttgccgtcggagaccacgcgcgcaaggttgctcgaagtctgcaccagtccgggcatcgacaccgacatgcgctgcacgccgtcgggacatcccacaacggctttggtcagcttggcggccacgtcggcggcgatccgctccttcggggcttcgcactccttcagtttgatcgacacggcgtcctcgatgccggcatattcggcctttatgaccttttcataggctttcagcgccttggcgaaagcttcgtactccttggttttgatcatcacgaccgcctcggcttcgcggggaatggcgttgcgcaggccgccgccgtccaccgagcagagcacgacatcgtgcgaggccgacgcggcgttcaggaaacggaacagcaccttgttggcgttggcgcgctggcagacgatctgaatacccgaatggccgcccttgagtcccttgaccgtgatccgggccgcggtgtagctgcgcgcgggagtcggctcggcggcatatttgaagacgatattcgcgtccaaccctccggcgcagcctacgtacagctcgccctcggtctccgagtcgagattcagcaggatatcgccgtgcagcagcccctttttcagcccgaacgcgccgtccatacccgtctcctcggtagccgtgaagagcgcttccagcggaccgtgtaccagcgaatcatcctccagtacggccagaatggccgccgcaccaataccgttgtccgcaccgagcgtcgtgccgtcggccgtcacccactcgccgtcgacataggcgtcgatcgcatctttcgtgaagtcgaacttcttgtcgttgttcttctggggcaccatgtcgaggtgggcctgcaggaccacgcccttgcggtcctccatgcctttcgaggcgggtttgcggacatagacgttatgtgcggcgtcctccttgcattcgagtcctttctcccgtgcgaaatccatgacgtatttgcggatcttctcctcgtgcgacgaggggcgcggaatgcgtacgatctgagcgaaatgtttccagaccagcgccggcttaagggcagagagattgcgagtgtcgttcataaaagtaggttttaatgatatgttattgtttttcgtatttttcatcctcgttcagcccggccggtcattaccgccgcctttggcgtcgtttgcaggtctgaccctcccctaaactgcgggcagcaggcgagggcaaaactcgttttgccgagccgccacagcagtcacggcgcacgtttgtcgctttagcgacgcgccgtaatcccctcctcggaggggacttctcccatgcggccgggttgcggacctaaacttttcccgcccgtgcggacggccgcaacagtcacggcgcacatttgccgtttcagcgacacgccgtaatcctctccccggagggaacctcccgcatgcggccggaagacccgtcccggagcggccccgtccttacttttcagctttggacaggtccgtcccgcacttgtcgaacgcctcgacgatatgtttcaccaacggatggcgcacgatgtcgcgcacgtcgaattcgacgatgccgataccctccacctcacgcagaatctccatcgtgcgcaccagcccgctgtcgcttttgcgcggcaggtcgatctgcgtcacgtcgcccgtgacgatgaacttggcgttgcggcccatgcgcgtcaggaacatcttgatctgcgagagcgtcgtattctgcgcctcgtccagaatgacgaaggcgttgtcgagcgtgcggccgcgcatgtaggccagcggcgcgatctgcaccgtgccctcctccagatacttcgccagcttggcaggcggaatcatgtcgttcagcgcatcgtacagcggctgcaggtagggggccagcttctccttcatgtcgccgggcaggaaacccagcttctcgcccgcttcgaccgccgggcgcgtgaggatgatgcgccgcaccagcttctccttcagggcgcgtacggccagcgcgatggccgtataggtcttgcccgatccggcgggtcccacggcgaagagcaggtcgttcctgtcataaagtttcaccagcctgagctggttgaccgtgcgggcgcggacgatgttgccgttgttgccgtagacgatcacgtccttgtcgaccggggcctcctgcgccgcaatgccgcccgcgaagcactggtcgatgacctgcgacgaaatgtgtccgtatttgagataataggccaccagcccctccatgcgttcctcgaaacgccgcgtctcggcctcggaaccgaggactttgagcgaagagccccgcgcgacgatcctgagctgggggtgaagcgatttcatctggtcgaggtagacattccgcggcccgtacagctcgcgggggtctgcaccctcgatgagtatctcttttccgactgcgtctgtcataggctaaaaaaggtatccgaagttaagcgccacgttataagtgcggagtttgtcgagcttgccgccgtcgggaagcaccacgtccttcttgcttttgaactggccgttgtagcgcaggtccaccagcagatggcccagcagcttgactcccgcgcccaccgtgtaggacatcgtgggacgcacgcggccgaaatcgagcaggtcgccgcccgacttctgcttgcagtcattcatcaccgtaaagacgggaccggcatagatccgcacgggacgcagcaggcggaacgacaacagcaccggcacgtcgatggaattggacttgaggttgatctccttctgcccctcaggacggatgcgaagcccctgacgcacatagagtatctgcggttcgacggcgaaagcccccagattgaccgccgtggtgataccggcctgccagcccagtttgttcttgacgtcggtgcccgacatgttggtcgtatagtcggggatgttgatgccgcccaatacgccccattcgatccgggtgcggggccgctgcgccgcggcagagagcgcgcaaacgaccagcaaagaggttactacgatcttacgaatcatcgttttcagtttttattgctttattttcagtttgaagctcgcccagagcatgtagcccacacacagggcgacgaacagcatgccccagtgcgcatcgccgctccagcggacaatggccccgcagacgggtcccgaaacggctcccgccgagatggccagaatcatcagccccgccacttcgttggccttttcgggcacggccttggtcgccacggcgtagaacgtcgcgaaaacgcaggccatggcgaatcccgtcagccccacagcggcgtagaccgccgtttcgccgcgcaccagcagcagcacggcgcagagcgccaaagcccccgccatgttccagcgcaggtatttcacgtccgacacccgcaccagcacccacgccccgacgagcgtgccgacgatgcggcaggcgtagaagcccgtggtggtgagtatcgaatcgggattgtcgatcagccgtaccgagaggaatccgatccccacgtcgcccgcgatgaagcaggccacgcccagcgtgcagatcagcaccgtcggattgcccagcagccggaagcagtcggccatgcccgcggcgcggtcactgcgcggcggttcggccaccgaagtcgcctgcagccagatgccgcccagcaccgtgaggcccgcatagatcggcagcagcaggcgccacgatccggtgagcgccacgagcgccgtgacgatcggcgccagcagcaggagcgaagtgttgcggaagatctggcccaccgtgaggtagctggtcatccgctcgcccggcacgatggtggccagcaggggattgatcgccacctgaatcgccgtattgcccacgcccagcagtccgaagccggcgaaataccaccccagcgcacacccttcgcccgcaacgtaggggaccatcagaccggcgaccgtaaaggcatagccgatcagcgcggtcgccttgcggcctatgcggttcatcagcgcggccagcggcgtggagagcaccagaaaccacaggaaaaccatcgtgggcaggaagctcacggccgcctgccgcgatgcgggaaactccaatgcgatgcgtcccgtaatcggagccaccatatcgcagaaacccattatgaagaagcccatcagcacggggccgagcactcgtttatctactttaccgacatgcatgagcggcgaaatttcaggtatacaatttttcaaagttacatttttttccataaaaaccgatttccggacagcgattatttcacaattctttctctttgcggagcaaccgtccgatcccgaccgacaaaaaacgtgcgaaaaacgccgttccactctccgcgccttataccccgcctttccccgcaaactctgtctcccgccattctcccacgcaaaaaaacagcctgcagaatcggccgttcggactccgccgcagcaaaatgcggcgggcgcttgtttttagccgcagatttttatatatttgtaggaaagccaaatgatcgcatgatgtttcaattcgcccatatagcaccgataacactgccgctcgaagacccgatcctgaagtttctgctgattctgatcatcattctggcggcgccgctgctcctgaacaagctgaagatcccctatcttttggggctgataatcgccggcgcggttatcggccctcacggactcaacctcgtgctgcgcgacagcagcatcattctttcggggaccgccggcctgctctacatcatgtttctttcgggactggacatggatacgtccgacttcaaaaaaagcggctggcgcagtctcgtcttcggactctacaccttctgcgtaccgctcgcgctcggcattctggcaggttattacattatgggattctccatctactcctcgatcctgcttgccggactcttcgcctcccagacccttatagcctatcccatcgtcagcaagctcggcatctcgcgcgacaaggccgtcacgatcgccgtcggcggcacggtcattaccgacacgctggccctgctgctgctcacggtgatcgtcggcatggccacgggcaacgtggacgaaagcttctggtggcggctcagcgcctcggtgctgttgtgcataggcatcattctgttcctctttccgctgctggcgcactggttcttcaaacagtgcagcgacaacgtatcgcagtatatcttcgtgctggcgatggtcttcctcggcgcctacctcgcgcagctcgcggggctggaaccgatcatcggcgccttcctctccggtctggccctcaaccggctcataccccgcacctcgccgctgatgaaccgcatcgagttcgtgggcaacgccatcttcatccccttcttcctcataggcgtgggcatgctcatcgactaccgggccttcttccgcgactgggagagcatcgaagtggcgctgatcatgatcgtcctgatcaccgccgccaaatacatcgccgcctatctcacgcagaagacattccgtctctcaccggaccagcgcaccgtgatcttcggactgagcagcgcccatgtcgcggcgacgctcgcggcggtgatggtcggctacaacgtcatactgggccacacgcctgatggcgagccgatccgtctgttgagcgaaagcgtgctcaacggtacgatcctgatgattctggccacctgcacggtctcgaccttcgccacgcagcggggcgcgcacaacatcgccatgcgcaatgcgcaggacgacgacgaacagcccctgcaggaggaccacatcctcattccggtcgccaacgagcagaccgtgagcgagctggtaagcctgagcacgaccctcaagaaagccaaatcccgcaacggactctacgccctgaacgccatcgacaacaaggtcgaggaccccacggtcgaaaagcggggccgcaaaatcctcgacacggccgccaaagccgccgccgcatcggacaactacctgcaggcattgctccgctacgacgtaaacatcgccaacgccatcgtcagcgtagtcaaggagcgcagcatcaccgacatcgtgatgggcatgcaccacgaccgcacgccgggcggttctggcatcggccgcatggccgccgacgtgctgggacagagcaatgtcaccacctatctctaccaccccgcgcagcccctgccgaccatcaagcggcatctggtggtcgtgccggagaaggccgaaaaggaggccgggttccagatgtggattcagaaactgcgcaacatcgccgacaattcgggcgcccggatcgtgttctacgccccggaaagcaccatgcagtacctgcgccccgcccgcggcaaacgctcggccaaggccgaatacgtggtctccaacccgtgggacgacctcacggcgctcacttacgagaccaaacgcgacgactgtctgtggatcgtgatgagccgccgcgaacgggtttcctaccatcctgccatgagcaaggtccccgcctacatggagcaattcttcgccgacaacagcttcgtgctggtctaccccgtacaggccggcgacacggagagcaggtatatataataagtatccggacgagtattctctgtcctgcagtttttacagagtgtgttccgcaagagtcccgcgcatttggttttgcgcccgacctgcactatccttgcagcatacaggcggcgtacggacaatgctcaaataaatttggcattgcgcccgacttgcactatctttgccctaagaaaaaagaaaagaatatgagccttgtagcaatcgtgggccgtcctaacgtcggcaaaagcaccctcttcaaccgtctggtgggccagcggaaggccatcgtcgatgcgacggccggcaccacccgcgaccgccactacggcaaaacggactggaacggaaaggaattctcggtgatcgacaccggcggctacaccgtcaattcggaggatattttcgaagacgaaatccgccgtcaggtactgctggccatcgacgaggccgatgtgatcctctttctggtggaggttgcgaccggcatcaccgacctcgaccagctgatggccgatatcctgcgccgcacctcgaaaaaggtgatcctcgtctgcaacaaagtggacaacaacgaccagatttactcctcgcacgagttctacgccctcggtttgggcgatccgttctgcatcagttcgatgagcggcagcggcacgggcgacctgatggatgccatcctcgcggcgctgcccgcggagaccgtcgccgaagaggacgaggacctgccccatatcaccatcgtcggccgtcccaacgtcggcaagtcgtcgatgaccaacgcgctgctgggcgaggaacgcaacatcgtgacctcgatcgccggcaccacccgcgactcgatccacacccgctacaacaagttcggcatggatttctacctcgtggacacggcaggcatgcgcaagaagggcaaggcgatggaggacctcgaattctactcggtgatgcgctcgatccgtgccatcgagaattccgacgtctgcatcctgatgctcgacgcccaacagggactcgaatcgcaggacctcaacatccacaacctgatcgtccgcaaccgcaagggctgcgtgatcgtggtcaacaagtgggacctcatagagaaagacaacaacacgatgaaggagtggacggagttcctgaaaaagaaactcgcaccgttcaacgacattccgatcatcttcacctcggtactcagcaaacagcgcatattcgacgtgctccagaccgcgatccgggtctaccagtcgcgcaaacgccgcatctcgacctcggaactgaacgatttcctgctgccgctgatcgagaactatccgccccccgcaaccaagggcaaatacatcaagatcaagtacgtgacccagctcccgacgcccacgccgcagttcgcgtttttcgtaaacctgccgcagtacatcaaggagccttaccgccggttcctcgaaaacaacatccgcgaccactgggatttcgccggggtgccgatgcagatttatttccggcagaagtaagacggccgcaatacaaggctaccggacctctttcgcacgacgaaatccggaagcgatattcccgccaaatccccctttgacagagggggacttttttatattccggagcacctatgcaggtctatttccggcagaaataaaacggctgcaaacgggaagcaaacaaagagaccggactcagagttgagtccggtctctattatcttgaagtgtccgccagtctaattcgccggcggcgtagccccgccctcctgcggatttccgccgcggttgcgattgcggttgcggccgccgcggtgacgcctgcggtcgcgcgttccgcggttgccttcgccgcggcccgatgcgtggtcgttatccgccggcgcagcctgcggagtcccggcgccgttttcggccggcgccgcagccgcacgctctctgtcgccgcgacggtcgcggttacggtcgccgtcgcccctgcttgggcgtcctccgtcgcctttatcgccgcgtccccggccgcggccggaacctccgcgtcccgatcccccgcggccgcccctgccgccgcggccgaaacgtccgcggttttcgtcgggtgcgtatttcgggccttcgcccacgcttgcgggcagttcggctttgcggatatcccgctcgataaacttctcgatggcgtggaattttccctgttcctcctcgctgacgaaggtcacggcagcgccggtcgccgcggcacgcgccgtacggccgatgcggtggatataatcttcggggtcgtgcggcacgtcgtaattgatgaccagtccgatgtcttcgatgtcgatgccgcgcgccacgatgtcggtggccacgaggatcgagaccttgttgttcttgaagtcgagcatcacctcctcgcgctgggcctgctccagatcggagtgcatggccgccacgttgagtttcatgcgtttgagcgtatgcgccagctccttgaccttcatcttcgacgacgagaagatgatcgtcttcgactcggtcggctcggcgaacatctcgcggatgatgcccagcttctggttctcatagcagacataggccgactggtcgatggcctcgttgggtttcgaaatggcgatattcacctcggcgggattgcgcagaatggtcttggccagttcgcggatcttcgggggcagcgtcgccgagaacatgatcgtctgccgctccttgggcatgtacgagacaatcttcatgatgtcctcgctgaaacccatgtcgagcatgcggtcggcttcgtcgagaatcaggcattcgacatgcgagaggtcgatgccgctgttctggatatgcgaaatcatgcggccgggagtggcgatgaccacgtccgaccccatcagcatgccccgcttctgcacgtcccagcccttgccgtcgccgccgccgtaaacgaccgtggtcgagatgggcaggtaataggaaaagccctgaaactgctggtctatctgctgcgccagttcgcgcgtgggcacgatgatcaccgattttatcacattgtcttcgttgccttcgagcagcagccggttcaacagcggcagcgtgtaggccgccgtcttgcccgttcccgtctgcgcgcatccgatgatgtcgcggccttcgagaatcaccgggatcgtgtgttcctgcaccggagtcatctcctgaaaattcatatcgtagagtccgtcgaggatctcatcctccaactcaagttcgtcaaatcgcattttacgtatcttaattttatccttctgaaatttcttctccgaaaagcgtcgcgggagtgcagcccgtaatgcggacccgcacatagtcgccgacgccgtggccgccgcggtcgaataccacgaccttgttctgcgaggtacggcccgaaagctggttctcgtcgcgcttggacgttccctcgaccagcacttcgaattcgcgccccacgtcgcgcaggttgctcgcacggctcagttcgttctgaagggcgatgatttcggccagccgcgccgacttcacctcttcgggcacgtcgtcgggcaggtgcttgtgcgcgtaagtgccggggcgctccgaatatttgaacatataggcgaactcgtagccgacctcgcgcatcagcgagagcgtcgcggcgtgctcctcctccgtctcgcccgaaaatccggcgatcaggtcggtcgtaacggcgcagtcgggcaggtagcggcggatggccgcgacccggtcgaggtaccattcgcgggtatatttgcggttcatgcgcgcgagcatcgacgaggcacccgactgggcgggcagatggatcgcacggcagatattgggcatttcggccatgacctccagcaggcggtcgctgatgtccttggggtgcgacgtggcgaaacgcacgcgcagcaggggcgagacggaggccacgcggcgcatcaggccgggaaagtccacctcgccgaagcggtaggagttgacgttctggcccagcagcgtcacctcgcggtaaccgttcccgaacagtgtccggacctccgcgagaatggtttcgggatcgcggctgcgttcgcggccgcgggtatagggcaccacgcagtaggagcagaagttgttgcagccgcgcatgatggcgacgaaggcgctcacgccgttgcggtcgagccgcacgggagcgatctcggcataggtctcctcggtcgagagcaggacattgacgcccttgccgcccgcttcggcttcgcgcacaagccggggcaggtcgcggtaggcgtccggcccggccacgacatcgacgccgtgcggtccttcgaccagcttctccttcaggcgctcggccatacagccgatgacgcccacgaccagtccggggttggcccggcggtagcgtttcatctcggccagacggccccagatgcgctgttcggcattgtcgcggatcgagcaggtgttgatcaggataacgtccgcctcgtcgatccggtcggtatatacgtacccctcgcgctgcatcacggagaccacgatctcggtgtcgccgacattcatctggcagccgtaggtttcgacaaaaagtttgcgtccggcgcccgacagggggcgcagtgtattcgtatcgagtcttaattccactttttcgtttctgttattcggcatgaatctcgttcttgtcggggaactgcttgaagccctcgccgaaagtctcgtaggcgtcggtcaccaccacgaacgccgaagggtcgatctccttgatcttgtgctgcacgagccgcacctccttgcggctgaccaccagaaagatcatatcgcgcagcgcgtcggtgtacatgcctttcgacttgatataagtggcgctgcggtcgaggtcctcgatgatgaagcgcttgagctgctcgtgatggtcgctgatgatgaacagcagtttgtcgtacgacgcgccgttcagcagataggcgatcacgcgcgaagtgatgtagatcgtgatgagcgaatagagcgtcagcatccagccgttggaagcagcgtcgcccgtacccagtccgaaaccgatgacggccagacctgacagcacgacgaaaccgtcggcgagcaggatgccggtcgagaacttgatgccggcaaacttctgcagcagcatcgccacgatgtccgtgccgcccgtagtcgcctgctggcgcacgacgacgccctgcccgataccgatgaccacggcgccgatgatacacgtcagcagcaggtcgttcgacaagtcgagccgcccgcccagcagcaacgccggatcgagactctcgacggccgcggcgtcgggatagaccagccgcgtcagcacgttcatgaaaccgggcgtatagagcgccgccagcaccgtgcgcgtaccgaactgcccgccgaaaaccagcatcgcggtaagcatcagcggcacgtcgaacatatagccgaacgtaccgacctgaatcgacgggaagatgttgtggagtacgatacccataccgtagacgcctcccggcacgaaattgtagggattgacgaacagcacgaaacccgcgcccatgatcgaacagccgaggaaaatcaggaaccacgagcgccaccacgcccacgaacccatcggctccagcaaagcctttgtattcataaaggtatatttttaggcaaagataacgcaattctccgaaaacccggcgcccccgcgccggatttttcatcccgaagctgcaaatacgatttttttattatttttgtaaatctcaaaaaaaaatacccgtacagatat

SEQ ID NO: 12071 - DNA, 43939 bp, Unknown
  gut microbiota DNA sequence
agaacttctgctgaaggagtgcgactatccgctgtcgggcgaagtcatggaccgatttctggaatctgcggaggaacttcacctgaaacggaacgaaatactgatcatgagcggcaaggtagacgccaacatctatgtcgtcaaagagggtatcatgcgctacagctacatgaacggactgcgggaagtaacctacgcgttttcgctgcccggcaccatgatcatctcgatgttctcctactatttccacctgcccacgttctaccagatagaagcctgctgcgaatcgaccgtggtcaggataacccggcagcggtacgacacgctgacagcgcagtcgcacgacttcgcccggtgggcgctgcagatggctcacggacagcttttcttcttcgaaatgaaaaacagcgtcatcaacggcgatgccaaggagcgctttctctcgctggtgaaaaaccgccccgaaatcatggaaaaggtgccgctgaaattcgtggcttcctatctgggaatcacgcagtcgtacctgagccggctgaaaaaagcggtcatgaagccttgaaaaaaagccgtttttgacatagtacaaaaactttcttttttttagtgcctacatttgttttcgaatatcgtatatacacttttttaattgttagattatgagaaaacatctatctgaacgggcactccatctctgcatggcattaggtctgattctggcaggaagcaccggctgcagcgacaacgaagagataccggaaccgcagcccctccccgtggaattcaagctggaaagcaaaaccgtattcgtatcgtgcgacggagacgaacagtcggtaaactataccgtcgaaaacgggctgaaaaacgcaacgatcaaagtgactgccgacaaggagtggatactcgacccgcaggccgccgacggcaagataacgttcacggtggagctgagcagtgaagagcagacgcgggaggcgaccgtgacggccgtctacgaagcggacggaacagacccgatcgaaaagtcgttcaaggtagttcaggaggcctacgacgctcccttcaaggtctcggtagacgcggtgacgccggtgagcgcgaccataagcttgacggtatccgatccccggcagccctacctcatactctattcgccgaaagaccagctcggcaaactgaccccggacgaggtcatccggaaacagctggaatattacgaagccgtggcgcccgccatcgggcagacctaccgcgaagtgctgcaacaggcgctaaaggccggcaatttcagcggcgaaaagatcacgggcctactgcccggctcggaaaccctcgtgctgatagccggcgtggatctcgacggcaaggtcaccacacgggtatgcgtcaaggagttcagcaccgaatcggtggagaccaccgacatgacgttcgacttccgcacgcagatagacggcacgagcgtaacgatcgacgtgctgcccggcgacaaggagcagtattattacagctactacctcgaaaagagcgaagtaacgcagcaaggcgtgaatccggccgccgaggtgcagcgctccctttccgaaatcgtagagctgtattacacctacggactcccggccgatcaggccgtaatggcactttgccagaaaggcgacttccaactgacgggaaccgagctggaacccaatacggtttaccttgtggtcgggatcgccgtcaataacgaaggctacgtcatgtcggatctcgtgcaggcggagttcacgaccggctcgcccgcaccggtagacccctccgacaaccggatcacgatcgaggccgcgaatctgacgcccaccacggtagacctccggatcacgacgaccaacaaggatccctacctcgtctacatattcctgcagagcgaggtggcaaacctctccgaagaggcgattatcgagaagacgctgcagaaaaagaaatacgcccacttgcgcgaaggcgacacgacggtgaaatactacaaccgggaaccgaatacgggttatgtctgcgtagccatgggttatcagtcgcagcaggtcaccaccaagctgttcaggtacgatttcacgactccaagcgcaggttccgcggccgccgcccggtccgaacgccccctccccggagcaccggaattcgcaaagctgctgcggcagcggccggccctgctgcccgacggaggaattcccaagaccgcattctgaaaacgcccccgcacgtgaaatatccgcagagagacgcaccgtcccctctgcggatattttttgcccccgttccccgccctcctgcatgtcatttattgcgttttattcgtttatccgggagattttattatatttgcattatacaaacccctgaaaagtcactatgattctgacatattacaccgccacgaccctgattatcatcgcctatctgctgggttcgattccgagcgccgtatggatcggcaaaaaatattacggcatcgacatccgcgaacacggcagcaaaaacgccggcacgaccaacatgctgcgcgtattgggcaaacgcgcggccctgcccgttttcggactggacgtgctgaagggattcgtcgccgtgacgatcatcgacctgatgaaatatgacagcgttttcgccgacggcgcaaacgaaacgtggttctacatcctgcgcttcatcgccgtattcgccgccgttctggggcatatcttcccgatcttcgccggattccgcggcggcaagggcgtggcgacgctcgtcggcgccatcatgggcgtaaacgccccgctggtgctgctctgcttcggcgtctggttcctcgtgctgatgattacgcactacgtatcgctggcctcgatggtcgcagggtgcagcttccccattttcacgctcatttcgccgaaagtgaaccatctggttccgttcgtcgtgttctcgttcatcatcgccgtgctgctgatctacacgcaccgcaagaacatcgaaaggctcaaggcgggcacggaatcgaaaatctacatctggaaaccccgccacgtgaaacagcagcctcccaagcaggaaaaaaaggaggaataaaaacggcacaaaaagctctgcggcagggcctatggttcaaaacatcggcaatatgggataaaaaatgccgcgatttggcggtaaaatcgtttttttagcctatctttgctcagcaattaggacgcgaccatgttacaggagaatctgatcaaaatatacgaaaccagtttccgagacaatcgtgaaatgcccgccctgaccgattatttcaagggcgaaactttttcgtattacgagatggccaaggagatcgccaagctgcacctcctcttcaaaaaggccggcatcaagcagggcgacaaaatcgccctcataggccgcaacaacccccgctggtgcatcacctacatagccacgatcacatacggagcggtcatcgtcccgatcctgcaggatttcacccccgccgacatcatccacatcatcaaccactcggagagccgcatgctcttcttgggcgacaacttctgggacaatatcgaagaggaccagatccggcagatcgaagccgtcttttcgctgaccgacttccataccatttacgaacgcgacggcaaggcgctcaccaagttccagcgcgacatcctgaagaattaccgctcgaaatatccgcgcggattcagcataaacgacatcaaataccccgaaatccccaacgaccgggtcatcctgctcaattacacgtcgggaaccacgggatattcgaagggcgtcatgctcacggtgaacaatctgacgggcaacgtgattttcgcccagcggatgatcaacacccagaccggcaccttctatttccgcaaaggcgggcgcacgctgtcgttcctgccgctggcgcacgcctacggctgcgcgttcgacttcctttcgccgctggccgtgggcggacacatcaccctgctgggtaagattccgtcgcccaagattctgctcgaagccatgggcgtcgtaagaccgacggtcatctgctgcgtgccgatgattctcgaaaaggtctaccgcaagcaggtgatgccgatgctcgaaaaaggccccatgtcgatcgccgtgaagattccgctgctcaacacggccatctactcggtgatccgcaaaaaactgctggaggctttcggcaacaacgtagacatattcatcgtcggcggcgccccgatgaatcaggagaccgaagcgttcctgatgaagatcaagttcccgatcaccatcggctacggcatgaccgagtgcgcgccgctcatcagcttcacgcccgacaacgagttcaaggccggatcgtgcgggcgctacctgcacgaactgctcgaagtgaagatcgactcgcccgacccgcagcacgaagcgggcgaaatcatcgtccgcggcgagcatgtgatgaagggatattacaagaacgaaaaggacaccgagaaggttctcgaacccgacggatggcttcatacgggcgacatggccacgatggatcccgacggcacgctctacatccggggccgttcgaagacgatgatcctttccggcagcggacagaacatctacccggaggagatcgaggacaagctcaacaacatgtatctcgtgctggagtcgctcatactggaaaccgaaaacggaaagctcaaggcgctggtcgtccccgattacgaacaggccgagctggaaggcgtggacaagaacgacctgccgcacatcatgcagaacaatctcgcggagctgaactcgctgctggcggcgtacgaacgcgtctcggagctggcgatctatccgaccgagttcgaaaaaacaccaaaacgcagtatcaaacgttatctatacagtccgtcgctattgaccaaataaaacaagtctcagcaggtaaccgcatactttggattctctatcccaaattcttcatagtcactgaatccaattccaacaatgaggcgtcactaatagttcggttacctgcttttttacgaaagttacccgcgaatatccgggtaacttttttttattatctttacggcatgaaaatcaccaagaaacagacgatcggcgaaaacctgctctacgtgatggtctggtcggccatcattctggtgccggtgctcaactcgctgatgatgtccgagcttcacgtcagctgggaaaacgtattgatcgcatggcgcaagatcgcgccctacctcatcatattcatcgtccacaacagcgtcatcgcgccgcggttcatgctcaagcacaagtattggaagtatctgataaccaatctgacgctgatcatcggcacgttctggttcgtggacttctacgaacagcacatcaccgacagtctgctcttctcggacctctccgaggaccagttcatcgaacaccgcaaggcgtcgttcaccgatctggaaatgtattggaacgtgatactcggatttttcatgtcgggcgccaatacgggcatcaagctcatgtaccagtcgatacgcgacgaacagcagatggaggagctgaaacagcagaacatgcaggccgaaatggattatctgaagtaccagatcaatccccacttcttcatgaacacgctcaacaacatccatgcgctgatcgacatcgacacggaatacgccaaaaacgccgtgatcgagctttcgaaaatgatgcgctacgtgctctacgattcgggacgcgaaatcatctcgctcaacaaggacattcagttcatccagaattatatcgggctgatgcgcatccgctacaccaacgacgtgaacatccgggtggagtatccgcacgacctgccgacgcaggtctccattccgccgctgctgctgatcgtcttcgtggagaacgcattcaagcacggcgtgagctacaacaacccgtcgttcatccacatgcacgtcgattacgccgacggcaaggtcaccggcacgatcagcaacagccgccacacgcagaaaggcgaaagacacagcgccgggatcggactggacaatgtccgcaagcgtctggaactgatctacggcccccggaactacacgctcgacatagaagaaaacacgacgacatacaccgtaaaactcgtaataccgaccctcaatgcttaagtgtatcgccattgacgacgagccgctggctctgcgtcagatcgaaagttacatacggaagattccttatctggagcttaccgcttcgtgcaacaacgcactcgaagcccagcagtttctcgccggacagcatgccgacctgatcttcgtagatatcaacatgcccgacctgagcggcgtggagttcgtccgttcgctggtcgaaaggccgatggtgatcttcaccaccgcctactcggaatacgccgtcgaagggttcaagctcgacgcggtggattacctgctcaagccgttcagcttcgccgacttcagccgttcggcgggcaaggccaactcgctctacgaactgcgccacaaccagcgtccggccgacgcctcggaacccgttccggaagcgctgcccaaagacaaggagtatatctcggtgaaggcggactacaaggtatcgctggtgaaaatcagcgacatcgtctatctcgaaagcgaaggcgaatacgtgcgcatgcatctggccgacggctcgacgatcaccaccctgttccgtctcaagaacatggagacggcgctcccgtcggagatgttcatgcgcgtacaccgctcctacatcgtgaatctgcgctgcatcaaaggctatgtccgcggccgcgtgtttctgagcgacacggagtacgtgcccatcggagaaaattacaaggagagctttcagcgttatatcgacgccaatttcaagaatctataaagccgcgaagtccgggaatcccgccagctggacatagcggccgccgcggtactcgcagcaatagtgtttccggccgttggtcaggatgacgaagcgcgcccccagcaccgaattgtaacgcacggcctgcgaaagggtccgctcgtcgatccggatctccggagccttgcattcggccagcaccagcggttcggcgctgtcgcccaccacaacgacgtcggcacgctgcggctgcccgttgaccggcacggcatattcctgaacgatgcgtttgggcaacaccccgcagtgcgacatgaggtaggcgatcagatgacgccgcacccactcctcaggcgtcagcacgaggtaaattccccgcaggtcgtcccatacttcgacctgcccgccacggcggcgggcgcgcagccggatggcaggaaaattgagtttgggaaattctgacatctctagttccggaaaatttactatctttacctgcacaaatatacgaacattttcgttaagcgggagccgagcagagaaactcgtttcgccgggcggcgaaaatgaaggttaaaaaagcgaatatatgaggagtattctttcgatcatagcactcttctcgtgctgcacgctggcggcgcaggagtatattccgacctacggccgtgaacttccgcgcggcgaagtgatcgcctaccccacggcgcaggaagcggccgcagcctctgcgggcgacacccgttacttcacccgtctggcggactggacgcaaaaagacaacgttttctcgaccgagttcaccgtgccgttcgcatgggccaaccggcaggtattcttccatttgggatgggcttcggccgattacgaagtgcgcgtgaacggcaaaaccgtggcctatgacagcgactgcagcactccggcggaattcaacctcacgcgccatgcgcaggagggccgcaacacgctggaaatcgtcgtcagcgctccgtcgcaggtggcgcgtctcgaaagctggaaaagcgatccggccccggcaataggtcccgcatgggtcatgagccagcccacgctgcgcgtacgcgacgtactgaccaaatcgtggcgcagcagcgaggagaacgacaaggtcatggctgaaatcgccctcgtcgttaaaaccgagtccctcaatccgcgcacttcgcgcatccactatgaactgctcactccggcaggctccaatgccgccatcggatacaaggacgtcacgctcgacatgcgccgcgaggacaccgtgcgttttctggcccgcattccggacagcatgttgtggaaccccggccggccgacgcaatacacgctgcgcgtaaaaacccagcacgaaggccgctacatggaatacatcgaactgccgctcggattccgcaccgtcgaactgcacaacggacagctggcggtaaacggcaatcccgtcgcactccgcacgcgcgaggttccgccccatttcccggcggaggagatagcgaaactccgcgagcagggattcaacaccctcaggcttctgccgggagccgtgtcgccgacgctgtatgcagtttgcgacacaatgggaatgtacgtgattccgcaggctccgatcgacacccgcagcagcggcgaatcgcgccgcatcgggggcaatccgtcgaacgatcccgcttggcagggcgcctacgtcgaacgggctgaaaacagctaccacacctcgaagcgccatccgtcggtaatcgccttctcgctggcgacgaaatcggccaacggcattaatctctacgaaagttatctgaatatgaagaagttcggcgacacccgccctttcatttatcccgacgccgcaggcgaatggaacagcgacggtttgaaaccggaatgatccgcaacaccctgaaaacaccctctgcaacaggtccgtctgtggatatgcgaaaaaaatcctgaaaaattttcaggatttttttgcaataataaaaattatcactaattttgcactcgcaatcggataacgattgatgcctctttagctcagttggtagagcacgacactcttaatgttggggtccagggttcgagcccctgagggggtactaaaaacgctaaaagccggcacaaataagtgccaaacaacggccaaagcaacgtaaaaaccttatagttagcacactataaggtttttttcttttgtggttacgacagcagaatgccaaactgcgacaaaaaatcgttactaattcgtaaccaaaacccaaaaatatttttggttacgaattttccccgattttggttacgaatttcttgtaaagtccgttaattgtccgctgattgtcagagatttaaaacacaattaaactaattttgcaaccaaaaaaagtaaccatgaaaaacacatttagcgtgcttttttatgtaaaaaagcaacagaaaaagagcggattattgcccattatggggcttattactgtcaataagcagacgacacaatttttcatgcagttggaaattactccgacagaggcaatagtcacagccagaatcaaagaaaagtacggaaaaaatcaccgttcagatgttatcagagatacgacttcagattccgaaaaaatcatcccggccaccatatcagactctttaacttatataaaaagatataaaatgcctttatttgctaatatagcacaatttttagcaaaaattccataggatttacgaaatttccaacggtaattttgtataacaatctaaatccaacctaaaaccaatgaatgcaggattccaaacagcggattatctggtcttcggcgtttatgcgcttatcatcattgcaatcggactgtacgtctcgcgcttcagcaaagaaaagagttcgtcggattattttctcgccggcaggtcgctttcgtggtgggccatcggcgcgtcgctgattgccgccaacatctcggccgaacagtttatcggcatgtcgggatcgggattccggataggaataggtatcgccgcctacgagtggattgcggccgccacactgattctcgtggcgaaatacctgctgccgatcatgatcgaaaagcggatttacaccatgccgcaactgcttaacgaacgttacgggcacggcgtcagcatcgctttctccattttcttcctgctgctctacctcttcgtcaatctgacctccgtggcatggctcggagccttggccatggagcaggtactcggtattccgatgatgtggggcgtcgttggactgctcttgttttcaggactctactcaatatacggagggctgaaagccgtcgtctggacggacataattcaggtcgttttcctaatcggcggcggtctggtagcagtttatttcgcgctcaaagccgcggacccctcgacaacgattatggccgacggcagcgcatggaccggactgcagaacgtcttccatacgatccgcgacgccggcggagattaccacctcagcatgataatccccgaaggaacggtcgtttccgatccggccacagggcaacagttcgacatttcgaaagacctgccgggactcgcgctgctgttggggtcgatctgggtcaccaatatcggcttttggggattcaaccaatatatcattcagaagggactggcggcccgttcgctgcacgaagcaaaaaagggtctgctctttgccggttacctgaaactcctcatcccgctgatcgtcgtcattcccggcatcacggcctatgtactgttcaccaatccccacctgatccacgggctgcaagattcgatcaccacggccgacagcgcctatccgtggctgttgaagaacttcacaccgacgggtatcaagggtctggccttcgccgctctggtcgccgcgatcgtctcttcgctcgccagcatgatcaacagcacggccacgattttcaccatggacatctacaaacggctgatctcccccgaagcctcggaaaaacggctggttaacgtcgggcgcatggtcgcattctgcgcgttatttatcgccatggccgccgccaaacccctgctgggcggactggatcaggctttccagtacattcaggagtattcgggatatgtgtatccgggcgtaaccgtcgtattcggtatgggactgttatggaaaaaagctacgaaccgagccgctctatggacctcgatactcacgattccggtcggcatcgcgctcaaattcgcatatccggacatgggtttcgtcctgcgcatgagctatgccttcatcgtattggtcgtcatcgccgtaacgatctcgctgctggaccgcagcgaatccgtgcaggacgacacctcgaaaatcgcgggacgccgttccatggtcagagcctcgtgggtactcctgatattggcggcgatctgcatcatggcgggaattctcttcagtaaacgctggaccagctaccatttcgacgccatctacatgctcggcatcctgctcggattcatcggggtgatgctgcgcaccaacagccagagccgcacccgcagcagccgggcttacagcatcggcggtaaggctttcgacttcactcccggtctcacggtcggagcgctgggcatcgtcatcatcctgaccgcgatatacgccgttttctggtaaactgactcgcacgcttcgttcataatccgccaactccacatggcccggcaaaattaatttagcacaagcaggacttccagcaggaagtccccgcttgttgcatcatcctgccggattacaaagatcggcataactcacacaccatataatatagtccgataatggagttgcagtgtaaaaacactttgttcatatgttcatccggaatctttcgcttcgggtgttcaacgcaaatatagcacaagaatttgcaaaaatccgattagaaacccaaaatccgtcatcgtacttttgtataacatcagaaccaaacgggcggatagcggcccgataagattaacctaattaaaaaaccaaaacttccacaaatgaaaagcatgctgttacaacgaatccgcctgttatatgtatcgggctttgtcgtcagcgccgtttttatggccagctgctcggatgacgacaccgacaaaaacgccgtctacgatccgaacaagccagtggtgctcgaaagctattctccccaagagggcggtgtagggacgaaactcatcatccgcggtgagaacttcggttacgacccgtcgaaagtcaaagttcgaatcgccaacgacgaaaaccgggaagcccgcgtcgtcagcgcaaaaggcaaccgcatctatgccatcgtccccgcgcgggccgacaccggcaaggtcacggtaaccatcggtgagggcgaagaagcgcaggaagtggctttcgaggaggaatttcagtacgaattcaagaaaaacctctccaccctctgcggcggcggtttcaacgccgaagacaaagacggcacattcaaggaggcgaaattcgcccgcccgctgcgtctggctctggacaacgaaaatcagaagctgtacgtcctcgaagccgatgcctacaaatgtatccgcgaggtagacctgatcaatgaaaaagtaagcactccatggcgcgcccccggcctacacaacctgcgcacaatcagtttcggcacgacctgcgacacgctcttcgtcggcgtcgaaggctcctcttcgaatgtttcgaccgtctttctgctgcgctccgacggattcgtgcgtcacaagacttatgcgccccgctcaggttcgaacgcttcgatcctgaatcccgtggacggagaactgttcatcaacgactattacaaaggcatggtgctgcgatgggaccgcgacaaacaggagatggtggaactcgtgcaatgtttcaacaacaacaccgatttcacgtactgctggagccacgacggaaaatacctctacgcgctggctctcggcggagcgtctcattcggccatcgtccgcatggaatacgatttcgcgacgaaaacgctcggcgaacccaacacatgggtcggcatggacgggcagctgggctatcaggacggcgtaggcgaagatgcgcgcatcaaccagccttaccagatgtgcaccggcccgcaaggcgactttttccttgccgacacgtggaatcactgcatccgccgcattgtagacaatgccggaacagccaccgtcaccacctatgccggcatcggaggacagctcggcttcacggagggtgatccgctcgaagcacaattacaattcccgaccggtgttgcggtcagcgacgacggctcgaccgtatatgtggccgacaaagaaaacaaccgaatttgtaaaatcaccgtagaatagttcgctatgaagaaacttatactatatatactgaccgtatgcagcatcatgctgggggggggtaatccggtctccgcatttgctcaaagcaaagagtatacgatcaccggcacggtcctcgacttgcaggggcagcctatggtaggcgtaaacgtcatcgtgaaaaaccagcccggactgggaaccaacaccgacatcgacggtaaatacaaaatcaaaaccggagccaacgaaacgctctcgttcagctacttgggatatgcgacgcaggatattccgatcgcaggcaaaacccgtatcgacgtcaaactggcagaagattccaatgcaatggaggaggtcgtggtcgtcggcgccggcttccagaagaaagcatcggtggtcggagcggtcacatcgatcaaaatggaggatctgaaagtccccaccgccaacatcaccaactcgctggcgggaaacgttccgggtatcatcgccgtacagcgttcgggcgaaccgggcaaagacgcttcggaattctggatccgcggcatctcgacattcggcgccaacgcatcggcactggtgctggtagacggcatcgaacgcgatttcaacgaaatcaacgtcgaggatatcgaatcgttttccgttctgaaagacgcctccgctacggcgatctacggtcagcgcggcgccaacggcgtcatactggtcacgaccaaacgcggacaagcaggaaaggtgaacatcaatttcaaagccgaatacggcatctcctcgtccgccatcgaacgtgaattcgtcgatgcggaaacctatgcttcgctggccaacgaagcccgtgcgtcgcggtatcaggaccccgtatacgacgcgagcgatctggaaatcatcaaatacaatctcgatcccgacctctaccccaatgtggactggcacgacgccctgctgaaaaaaagcacctcgacattcaaaacttcgctcaatatcagcggcggcggttcgacagcccgctactatatttccggttcctactacaaacagggcgggcttttcaaggattcgctgaaagagaactacgatacggacaccaattacaaacgctacaacttccgcatcaacacggacatcaacatcaccaagaccacgattctcgaagccggtctcggcggctgggtcgtcgatcagcacaaaccgggcatgaccaccaaacccgacggcaataccgacgatttctggaggtcgatctcctacatgaccccgatcaccgttcccctgcgctattcaaacggccagctgccgacctacggtacggacggatacggcatttcgccttatgtactgctcaaccacaccggttattacacgttctgggaaaacaaggtggaatcgaacatcggactgaaacaggacttgagttttattacgcaagggctgcattttaccggccggttctcctatgacgcctacaaccggcacaatctgggccgcctgaaaatgccggctctgtacaaggcagaacgagtccgcgacatggaaggcaatctgattacgtcgcggatcatagacgagcaaccgctctggcaaacatcggacgtctacggctcccggcgcgcctacggcgaagtgcaactggcatacgaccgagctttcaacaagcaccgggtcggcggtctgctctactattacatgcagtcgttttcggaaaacgatgtcaatgacaatgtcttcaaatcggttccccagcgcaacatgggcctctccggccgcgtaacttacggttacgacgaccgctatctggtggaattcaacttcggatatacgggatcggagaatttcgagccgaaggaacgcttcggtttcttccctgcaatcgccgcgggctgggtgatctcgaacgagaaattcgtcaagaaacatatgccgtggcttaccatgctcaaaatccgctattcatggggccaagtcggcaacgaccgcatcggcggcggaacacgcttcccttatatcaccacggtaacaggcggtaacagcgtcaatttcggaaatatgggggcaaacagggctgacggcatactcgtacaactcatgggttcgcaaaacctgacatgggaagtcaccaccaagcaggacctcggtctcgacctgaaaatcgccgatcggttcgatctgacggtggatattttccgcgaccaccgcgaagacatcttcatacggcgcggtttcctacccggcactaccggccttttggtcggcggattgatagaccaacgtccttggggcaacgtgggttccatgcgctcggagggtatcgacggcaacttcggctacacgcagcgtatcggcaaggacttcatcttcacgctccgcggcaacctgacctatgcctacaacaaggtgctgaaatacgacgaagcggccaatgcgctctattaccgcatgacgcagggctacaaatgggaacagaaccgcggtctgatcgcacttggtcttttcaaggacgaagccgaaatcgccagcagcccgacccagtacggacaggaactgatgcccggcgatatcaagtataaggacgtcaacggcgacggcgtcatcaacgacgacgacatcgttccgatcggcaacacgagaaccccggaactcgtatacggtctcggactgagcgcccaatggaaaggcatcgatttcagcattctgtttcagggtacgggcaagatggacttcattatggaaggttattccacgttcccgttcatcgcaaacgacgccggcaacatcctttcggtagtagccgaccccaagaaccgctggatatcacgcgaaatatcgggagaccccgccaccgaacgccaagacgccattttcccgcggctctcgtacggtccccgcgaaaacaacaccaaatggtccacatggtggctgcgcgacgggcactaccttcgcctgaaaaacctcgaagtgggctatacgctcccgaaagctttcacccgcaaattccgggtcgagaaggcacgcatcttcttcctcggctataacctcgcctgctggtcgtcgttcgattggtgggaccccgaaatgggcagcaaggacggcaactcctacccgatccaaagaacctatacattcggcgtgaacgtcagcttctaaccttaagatcccgattattatgaaaaaaataggaaacattctgatcgtcatgtttgccgcactgagcatgatccggtgcggggactttctcgacgtccagcagtatgtgaaagacatgcagcagtacgactcgatcttcgtccgcgaaaacaccacgaaacagtggctctgggaggtctacagctcactgagcagcactccgtcgctctcgaacggcgccctctacttcgcatccgacgaagcgatctacaacgacgcaaacgcttcgtgcgaactctaccagaacggacaatactcatcgacgaaccccgtttgggaagaccgctataatgcgatgtatgtcggaatccgtacggcttcgattttcatccacaacgttcaccgttgtctggaggtctcgtcggccgaacgggaacgcatggagggagaagcccgcttcctgcgcgcctatttctactttaccctgatgcgccaatacggtccggtcccgatcgtacccgacgaaggacaggacatctcgctcgattacgaagagctggcactcccgcgcgccacgatcgacgaaatggtcgatttcatgctctccgatctggaacgcgcagcccgcatcctgccttcggaatatgcttcgacatgggtcggacgcgccacgcagggcgccgcattagccttgcgggccaagatactgctctatgccgcctcgcctctcttcaacggcaacacagacctgttcaacgtcaaggacaacgaaggccgcaacctgattccgcaggaaaaggacatccgcaaatgggcgcgggcggcggcagcggccaaggaggtgatcgaaatgggactttacgaactgataacggtaagggctaccgcgacaacggcacctctggcaccgaatgtccccacggcggcattccccgaaggagccggaggcatcgatccttttgaatcctatgcgcagctcttcaacggagagactcccgtaacgctcaacaacgaattcatctttatgcgacagagcggcgccgacgtcaactcgttcgtctataaggcattcccctattcgcacaacggcacgaacaacatggcggccacgctcaaacaggtcaacgcctattacatgcgggacggccgcgacaaggatcaggcaagtagcgaatatccctattacacatcgggattcaccaccggagacaccaacgatccgttcgtcccgaacgactgtcaccggatgtggctcaaccgcgaaccgcggttctacgcttcgatcgcctacaacggctgcatctgggaaaacggcaccgccgaccagagataccagaatttccgctgcaactactaccgcgcgggccaagacgggaaacagttgtcgcgtccctacaacttcccgctcaccggcatcggcatcaaaaaatattacgaccccgacgactcgtgggacgaaggcggacgaacgacctacaagccgcatcccgaaattcgctacgccgacgtattgttatggtatgccgaagcattgaatgaacttcccgacggcgaagcgtacgaattcaaccatgtaatttatgacgaaccgtttatcgtaaagcgcgatgtgaacgagatcagaaaagcattccggcaggtgcgtttccgcgccggactgcccgatctcacggatgcggaatacaggtcgcccgacaccttccgcgataaactcaagcgcgaacgccagatcgaattcttcatggaaggatcgcgctacttcgatctccgccgctggaaagacgctgcaacggaagaaaacgaagccgtaatgggtatgaacgtcgacatgaaggggtccggcacgcagaaagaacgattctacgaaaccacgccgacgcagataaccaaggttttcatggacaagatgtatctttggccgttcaccgacgacgaactgaagcgcaacaccaaactgacccaaaatccgggctggtagtaaccgcaaaacgaacacgacttatgaaaaaagcaattatattcctgcttgccgcaacggcatttttcacggcctgcaacaacaaccagctcgacgacgagctgttcatcaaacacgtgctgatcaaccagaacggcttccgcgagtacgatctcaactatgtggatgcgaatgtcagggacacgctcatcaccgtcgccgtaaacggatcgtcgaaactcgaccgcgacgtcagggtcgatctggcggtcaaccccgacaccctcgaaggatacaactgggagaaataccgcaacgaccgcagtctctattacgaactgctgcccgaagagtgctactctttcaacggggaaggcatcatcatcaaagccggaacggaatacaccgacgttccgatcagtttcaatctcgacaagatcgataaggacaagaatttcgttcttccgatctcgatcgtctcgacctcggaatacaggatcggagagccgaaatacagtacgatcctgatgaacgtcgtcctctcgaacgcctatacgggcacctattcgctgtcgggcacgatccgggaagtcgctacgggcgatttcatcgacgtccgcatgacccgtacgttgcgcgtggtcgatccctccaccgtatcgctctacgcaggcaatacctccgaacgcgtctccaaccgggaaaattaccggatgaacatgaccgtaaacgcggattccacactgacctttacgccgctgcatcccgacatcatcgagataaaccgcgacgaaccgaacctcgacccgaagaatccgcggaacaaaatcctcgtggaacggaccgtagacgtacagaattcgcacaaatcgtatatagtcacgacattctacatgtactacaactatatcgacaaaaccgacccggccgatcccgtcgaaatgcgatgggaaggcacctgttcccgtacgaaaacggtatttaccaaataacggtctctctctgcaaaaacctatggagcggacttgttcgcctccataggttttattaattttgcatcaggcatcttgccagtcactcaaacggataaacagaaaaaatgaccaaatcactccgcagtctgctattcgggatcgccagcctcttcgtactgacagtccacgctcaggaataccctttccggaaccccgacctcccgatctccgatcgggtgcaggacctcatctcacggctgaccctcgaagagaaggccgcccagatgcagaatctcacgcccgcgatcgaacggctcggaatcccggcctacaactggtggaacgaatgtctgcacggcgtcggccgctcgtgggacaaagtgaccgtctttccgcaggcgatagcgatggctgcgacgttcgatcccgaagcgttacggcaaatgggcagcatcacctcgaccgaagcgcgcgccatctacaacgaagccaaccgcacgggcaaaggcggcatccaatacaagggccttacgttctggaccccgaacatcaatatcttccgcgatccgcgctggggccggggacaggagacctacggcgaagacccctacctgaccggactgctgggcaaagccatcgcagagggactgcagggcgacgatccggtcctgctgaagacttcggcctgcgccaagcactatgccgtccacagcggccccgaaccttcgcgccatgtcttcgatgccgacgtaagcgactacgatttatgggacacctacctgccagcattccgcgacctgatcgtagacggcaaagtgagcgccgtgatgggcgcctacaaccggttccgcgggcaaccgtgctgcgccagcgacctgctgatgcaggagattctgcgcggcgaatgggagttcacgggctacgtcacttcggactgcggagcgatcgacgatttcttcaaaaaccacaaaacccatccggacggagcctcggccgcggcggatgcagtgatacatacgaccgatctggactgcggcgaaatcttcgcctacctgcccgaagccgtcgagcgggggcttatctccgaagccgtgatcgacgaatcgctcgcacggctgctgacgatccggttccgactcggcgcattcgatccgcaggagcgcgatccttacgccacactcccctattcggtactggaagccgattcgcacaaggcccatgctctgaagatggcacacgaatccatggtgctgctcaagaacaacggactgcttccgctgcgccacaacctgcgccgcatcgccgtactcggaccaaatgccgattcgcccgaagtccagctgggcaactacaacggattcccgtcggagatcgtcacaccgctgaaaggcatacgggcgaaaacgggtgccgagatcgtctacctgcgcgcttcggattacaccacgccggaagccggggccgatgaaatacgcaaagccgtcgaaggcgccgacctcgtgatctacgtcggcggcatctcgccccggctggaaggcgaagagggcgacgcaggacgcgaaaaactcgacggattcctcggcggcgaccgcaccggcatcatgcttccaaaagtccagacccaagtgatgcaggttgtaaaacagatcgggattccgctcgtcttcgtttcgatgtcaggcagtgcggtggctttcccgtgggaggccgaaaatgccgatgcgattctgcaggcatggtacggcggacaagccgccggaacagccgtagccgatattttatggggcgactgcaacccgtcgggacgacttccggtcacgttctatgcagacgacgaacaactgcccgatttcaacgactattcgatgaaaggccgcacttaccgctatttcgaaggacgaccgctctatccgttcggatacggactcagctacacgacttttagatatgacactccggtatgcaccgccaaaaccacagtcaccggagagtccgtgaaggttgtaacccgcgtccgcaatacaggtagcgtagccggagatgaagtggtacagctttacgtcagccatcccgacgctccggagcccaagccgattagggcgctgaaaggcgtaaagcgcattcatctgcaaccgggtgaggaacagatcgtcgaattcacccttacgccccgtaatctcgcactggtcgatgtagacggcactacggcctgctgtccgggacgcatctcgttctatatcggcggctcccagcccgtctccgaagcggaccggcgacaacactccgccgagatacgcgtcaaaggtccccgcagggtgctggcccggtagacggtccgaaacgataaggctggttccctttcgggaccagccttatttcgaatcattcgtcaccggccgcggccgtaagctcttcctccgaatattcggtccttgacttcccctgatgcgcccggcggtactccagcggcgagaggcccgacatctccttgaatttgtgattgaaatgcgagatgttgcggaaccccgattcataagccacctgtatgatgctgaaatcggaattgacgagcagtttgtatgcgaagtcgatacggatttccagcaggcagttgaaaatactgcgtccggtcgattgcttgaaattccgacatagcgccgtgggattctgtccggcgtatccggccacctgccggagcgtaaccggctccttgaaattattggccagatactgatatgcccggtaaaccggcaggttatgcaggtctttgacccggttgtagtccacctcggcgatcgacaggtaggaaaaatcgggagtctggctcagcattcccagaatgcggtaaagttccatcagccgtttcaggccgtccagccgttcgaaatccgacagacgggtacggatgcgctccagcacctcgtcgttgtggaaaagcaggccgcgggaactttcgtccagcagccgtacgatcggtccgaattcgggcatggtgcggaaatcggccggaaagatattctggttgaactggatcacttcggaacaacaatacagatcgttgttttcatagtaaacccggtcactcagatgaaaatggggcacattcgagccaataaacgcaatatcgcccggcgagaattcgctgacgccgtttccgacgaaacgcttgccaaccccctccgtaatggcgaccagctcgtattcgggatgataatgccagtccggcggaaagtgtttgaatataaaattcttcttcgtaaacgacgatccggatgccggaataatggtttcgtaaagcatgatcttatattattatcgaaggaacggcccttagtgcaaatatagcacaattatttgcaaattacacggtagacagcagactttttaccctatatatttgtataaccaattcgcttcattttttataaaccaacgatatgaccaaacgagaagtaatcaagtgcgtcctcgacggtaaaaagccgccttacgttccttggtctttcaaattcaccaaagagccgaaagaggctctcatgcagtactacgacacggatgacctcgacccggtactgggcaaccatatcctgcagctgggaagcgacatcggcttcttcgaagatttgggcggcgactatgtccgcgatgtcttcggcgtggtttgggaccgcagcgtagacaaggatatcggcgacgtgaagggctgcatcctcgaaaaccccacgctcgaaggctacacgtttcccgatccgctcgacccgcgcttcttcgccgacatcgaaagcgaaatcagcaaaaagcccgacatgttccgtgtgttccagatcggattctcgctctacgaacgggcatggacgctgcggggcatcgaaaacctgctgatggatttctacatcaatccccaattcgtgaaccagctgctcgacgcgatctgcgactacaacctgcgccagatcgacaaagccctcgaatacgacatcgacgcggtttacttcggcgacgactggggacagcagatcggactgatcatgggatacgacctctggaaagagtttatctatccccgcctgcagcgtatgtacggccgtgtccgtcaggccggaaaatacgtgatgatacacagctgcggcgacgtggacgaactgttcgacgacctgatctcgatcggcctcaactgtttcaaccccttccagcccgaagtgatggacgtggacgacctgctgggccggtaccggggacggctggctttccacggaggtctgtcgatgcagaaaaccctgcccttcggcaccaaagaggaggtagcgagggaatcgcgccacctgctcgaactgggccgcgacggcggttacatattctcgccctcgcattcggtcgaaagcgacacgtcgctcgaaaacatgcttacattcatagatatagccaatgcacaactaaaataacctacgaccatggaagatatgaaccaaatttcgcaggcgatcgtggacggcaaactcgaacttgcgcaggagctggtctgcaaagcgatcgaatccggcatggacgcccagtcgatcatcgatgattacctgaccgccggcatggccgaaatcggccagcggttccaagaccgcaaagcattcgttcccaacctgctgatgtccgcgcgcgcgatgaaaggcgcgctggaggtgctcaaaccccacatgagcggccgagtcgaatcgcacatcggaaccgtagtgatcggcacagtcaaaggcgacctgcacgacatcggcaagaacctcgtggcttcgatgttcgagggctgcggtttcaaagtcatcaacctcggcatcgacgtatcgagcgaaaagttcgtgaaagccgtcgaggagcacaatgcagacatactctgcctttcggccctgcttacgaccacgatgaactacatgcgcaacgtcgtcacggaactgagcaaagccggcctgcgcgacaaggtgaaggtcatggtaggcggagcgcccgtcaatgcggcgttcgccgcgcagatcggcgccgacctctacacctcgaacgccaacgcggccgtcacgggtgcgaaacaactgctcaacatcgcctgaatccaacgacgccaccatgcgaacccggcaaatagacatcgactacaaagacctcgcgatcgaccggcaggagatctaccgcaccatgggctacggcgacggaacgcccgaacctgagatactcgccatgctcgacgaggtgctcgcccaaacgcagcgagtctgcagaccccgcattctctaccgaatatgcaacgggcaggtgctgacgccgctgcatatcgagatcggcggcgtgaatttccgccccggcaagatcatcaccgacagtctggcgggcgcggagctgttctgcctgttcgtggctacggcaggacgcgaattcgaagagttccgccgcacctacagggagtcgggcgactgcgtccgggaattcatcgccgactccgtgggcagcgtactggccgaagcctgcgtcgcaaaactcgaacagcagctggactgtgatctggagataccgcacacgctcccctacagtccggggtactgcggatggagggttaccgaacagcatctgctgttcggcatgcttccggaccggccctgcggcatcgaactgaccgaaagctcgctgatgtacccgatcaaatcggtcagcggcatcatcggcatcggcagtcgggtcgaacgcaaaccgtacggctgtacgatctgccgcaacacggcatgctacaaacgcagaatctcctgacaatcaacaaaaatacgatgaacatgaaaacactcgatatgaaagcttgggccgaatcagcccgaaacggccggcggcgtctggcgattccgatcatgacccatccgggcatcgaactgtgcggttacacggtacgcgacgccgtcaccgacggcgaagtgcacgcccgcgctattctggccctcaatgaccgctaccccgccgacgcatgctcggtcatcatggatctgacggtagaggcggaggccttcggcgcacacatcgtctttcccgaaaacgaagttccgagcgttaccgacactttggtacacgacctttcggagatcgaggcactgaaaatcccgacgctcgaagccggccgcatcccgcagtacctcaaggccaaccgcatcgtcgccgaagccctcggcgacaagcccctgttcgcgggctgcatcgggccgttctcgctggccggacggcttttcggcatgaccgaactgatgatggccacctttaccgagcctgagacgattcagctgctgctgaaaaaatgcacgcggttcatcggcgattactgcatagcgctcaaaaagagcggagcgcagggcgtcgtgattgcggaacccgccgccggactcatttccaacgaggattgcagcctttactcctccctatacgtgcgacggatcgtagagttggttcaggacgaccattttttggtcgtgctgcacaactgcggcaatacggggcactgcaccgaagccatggtcgagaccggttcggccggctaccacttcggcaatcaggccgggatggtcgcagcgctggaagcatgtcccgctgacacgttggttatgggcaacatcgaccccgtgggactgttcaagcaggcgtccgccgacgaaatgtaccgcgcgacgcagaaactgctgaacgccacggcggcatatccgaacttcatcctttcgtcgggctgcgacgtgccgcccgaaacgccccacgccaatatcgacgccttttacaaggctctctccgagtacaacaaaactacaaaccgataccgatgaaaaagactgcattcctattcgcagccctactggcagtcctgacgatttgcgcgaccgacgcaaaggcttcggaacgctggaccaaagcgcaggcgcaggcatggggcgaagccaatccgtggttctgcggcttcaactacattcccgcaaatgctatcaactatacggccatgtgggacaagacgagtttctcgcccgaagtgatggagcgcgaactcgcactggctgaagagacggggctgaactgcgcccgcgtcgtgcttcagtacgccgtctatgccgagaatccgaaacatttcatcaaagcgttcgacaaatttttggaaatttgcgacagacaccgtatcaaggcgatgccgatcttcttcgacgactgcgttttcggcgccaacgccgatcccgcgaccgggccgcagcccgaaccgctcaaaggctggtacgcatgggcgtggtcgccctcgcccggtcatacgatggtcatcgacgagcgcacgcatccgctgctcgaaacctatgtcaaggagatcatgacccgcttcggtcaggacgaccgcatcttcgtatgggacctctacaacgaacccaccaacagcggattgggcgaccgcagcctgccgctgctgaaaagcgtcgtgaagtgggcgcgcgaggtcgatgtcaaacagccgatcaccgtcggcgtatggtgcggcaacgaggggctgaaccgcttctgcctcgacaactcggacatagtcagcttccactgctacgccgatgcgaaccacacgcgcaacacgtgccgcgagctgaaaaaggaggggcgtccggtgatctgcaccgaatggatgaaccggcccgcggcatcgacgatcccgaccgtgctgcccgtcttcgccgaagaggaggtaggctgcatgatgtggggattggtgaacggcaagacgcagaccgacctcccgtggggccaccgtcccgaacacggcgagtacaaaggaccgtggcagcacgacatttaccacggcgacttcaccccctacgatcagaccgaaatagacctgctgaaaaaatactgcaaataacattccgacccgcaagacaatgagaacaaaactattagcactgctttccttgggagccgcaggccttgtcccggccgcgacggcgcaggaaatccccctgacgcgcatcgacattgacgttgcgcaggaaaaagccgaaatcgccccgacgatgtacggcgtattcttcgaagacatcaaccgctcggccgacggcggcatctatgccgaactgatcttcaaccgcggcttcgaggaggcgaatcttccgtcgggctgtacctacaatcccggagacaagcgcgtttacgcgccccataaatcggtctactcctcgcccgaacacctgcgaagctggagtattccgtggaatatcgaggacaaacatccgggctggacggtcgaatgtccggccgacggcgaatactcggtccgcatcgatgacaccgaccatctgggcgtcgaagcatcgaaggccatgtacctgaccatcgaccgccatgcagccccgttcaggctggtgaacagcggtttctacggactggccgtcgaagcgggcaaaaaatacgacctgcgtttctacatcaaggccgcacccggctacaagggcggcgtgacggctgaaatcctcacggcgcaaaacgaggtcatcgcctcgaaacgtttcacgctcaagggcgacggggagtggaaatatttcgaagccgtcatgaagccctcgcagaccatgaacgacggccggttcgccctgcgtttcgattcggcgggcgcactggagatcgactacgtgtcgctcttcccgcaggagaccttccacaaccggtccaacggcctgcgcagggacgtcgcccaattcgtcgccgacctcaaaccggccttcatgcgctggcccggcggctgtatcgtcgaggggctgacgatggagaaccgcgtgaactggaaaaacaccatcggcaagcccgaactccgcaagggcgagtacaacctctggggctaccactcgaccaacggcttcggctaccacgaattcctgcagtactgcgaagacatcggggcgcaggcgatgttcgtctgcaacgccggcatgtcgtgcgacggccgcaacggcgactattacgatgacaaggaggtcgaggtgctgatacaggatgcgctcgacgccatcgagtacgccacgggcgacgccgagaccaccaaatggggcgccgaacgcgcaaagaacggacatcccgcgccctttacgctcgactatatcgaagtaggcaacgagaaccacagcgccatgtacgccaaatattacaaccgcttctacaagcgtatccgcgaggcctaccccgacatcacgatcattacctgcctgccgatgagcgaccagctctcgtggatcgacggttacgacatgaacgatccccatttctacaacttccccagctggttctacgccaacaccgactacttcgacaagttcccgcgcgaagagggccacaaaacctatgtcggcgaatacgcctgcaacatgggcgtcggttcgggcaacatggaaggcgcactgagcgaaggagcgttcatgatgggcatggaacgcaattcggatctggtgacgatgacctcctacgccccgctgatggagaataccaaatgccgcatgggcgtcaacctgattctggtacggaacgacgacgtcatcggcaggagctcctactgggtcgagcgcatgttcaccgacaaccgtccggacgtgaatctggccaccgacacgcaattgggtgtgcttcccgacaagaccactccggtcggcggcatcggtctgggaacctaccaaacggcggcggagtactccaatatccgcatttcggtagacggtgaacaggtttacgcatcggatccggagaataatcccggcgaatggattgccgcttcgggcaactggaaaatcgaaggcggcaagctgatccagcccgacgagaacggcaccggctcgatcatgctccgcgaccaatggctcgacgccgtcaagtcgaagatcgtatccgtggaattcgacgccagaaagctgggcggcaaagaggggttcgtcctcaagttcggcgccaaagatccggcgaactgctaccagctgacgctgggcagcttcggcaatgcatggactatcttccagagcgtcgccgacgacaacgccttcgtgctgaacaccgaccgtccgacgacacgcatcgaaacgggccgcacctaccatgtgaaactcgtcatcaaggacaaggatatcttggagtgctggatcgacggccgaaaagacctgacctacgacaacagttacgtacagcgccaatacgccatcgcgggactggaccggacaaacggcgaagtgatcgtcaaggtaatcaatgccgaggacgttccgatgcgcacgaagctcaatttccgtaacgccgaattcgagccgcagggcaaacgcatctcgctctgggcgaattccaagcacgaggaaaacactttcgaggaccggaaccggatcgttccggtggaggatgtcttcaacaacgtaagctcctcgatggacgtcacgttccgcccccaatctatgaccgtactgagactcaaactcaaaaaatagcccgcgccgccgtctgccgccgtattgcaccgaaccggcggcagacagggccgcaggccgcaaacccgaacgaacatgaaaatcatcagacaccgcatatttccgctcctgacagccaccgcaatctttatcggcggtacggtttccgccgccgcaccgcagtcgggacagttctacaaaaccaaaatgcacaaaggcacgatcaccgtcgccgacatccgccgggaccacggccctgcgcgcatgatctccacggcctttcagggactcataaatcaagagacggccgagtgctacctctatttagccgaccaccatgtccgccagctcgacgacaccaaacgccccttcgagatcctgcccctcggcgaaggccgcgatccgggtctgcgctcgctgttcaaggcctatgcggaccgtgtgcagaacatctacatctggagtccagaggaagactggtcgtggaacatggccgtcatgctctcggcccagcaccaaggactgccgctgaccgaggaactctatgcccgcctgacggccgaaaccccgtggaaaggtaacgtggagcggctttacggccgttgggcgtccaagcgcgacgcatatgaatgggccatggagaccattcagccccaatgccacccgaacatactcttcacgctgggactgcgcagcgactggacgggcaatccgtggacgctctacgactatgccgtggcgtcgcgcggcttcgcattctggctcgacgacgctgatcccgaagagcgttcgatcatcgaggagatctgccgaaaaggcgacttcaagccgggagccatcgtcatgggctatgccaaaagcggcgacgacctgctatacgtcaccaaccgctacaacatcggctacgtcgtgagcgactactacgccaacggcagtttctggtgcagttaccccaacaaatcgttcaaacagcggccgggcaaagccgtcaaggccgagaacggcaaaatctacgtcagcgtcgtattcagcgacggcgacaacgtacagttcgaccaaaacgcgctctacgccatctggaccgaggacaccgaccgcggggctttccccgtcggcacgaccctctgcgccggcatgcaggagctgaacccgttcctgctggagtggtattacaagcacatgagtcccaacgacgagctgatggccggcccttcgggctaccagttcatctacggccgcgactacagcgaggaaggttatgagaagtggctcgaactcaatcgccaatggctcgcgtcggccggattcaagacggcctgcttttggcacacctcctacggcacggaccgtttctaccgctatgcggaaaccgcgggactcgaaggcgtcttcaacggcgacgacgacgtggtgctggactaccacgacggggtaatcatcatgaatcagggcgaccatctggtcgccgaaggcgatctgtacaacaacctcgcgcaccggcaggggctgctcgatccttcgcggccgcactttctgaacgtctaccccacggcggccacttacggctaccacggcgtggcccgtctgaaacgcgaagccgaacggctggaaaaggatttccccggccgcttcgtattcctgatgcccaaggacaacgtcgccacggcccgcaagtattacgaggcgcaccccgaacatattccgtggaaaaacaagtctcagaacaaataatccggccatgctcagacacacgattatcccgctgctggctctcgccggcgcaaccgctgtacaagcccggactcccgatccgtcgctcgcacgacaggaaggcgtcctgcaatgggtggacacgcggatcggcacgtcgggccacggccataccttcatgggcgccgccgcaccgttcggagccgtgcagctcggtcccaacaacttcaacaaaggctgggactggtgttcgggttaccacgattcggattcgatctgcgtgggattcgcacacctgcacctcaacggcacgggatgcagcgacacgggcgacctgctcttcatgcctaccgcgggcgaaatacgtgtgacgcccggatcacaggagaatcccgacagcggctacgcctcgcgctactcgcaccagcgcgaagcgaccgccccggcctactaccggctgcatctggacgattacggcatcgacgtcgaactgactgccaccgagcgcgtgggactgcaccgctacaccttccccggcgaggggcagaaacaggtggtgataaatctcttcgacgccaacggcgacgaccgcgcgacggagaccttcatcgaacagcaggacaaccatacggtccgcggctaccgctgttcgtcgggctggtccaaacaacagcgcatctatttcacggcgcgcttctcggaacccgtgacgctcgaaatctacaaagacgacaaactcgccgcaggcagcagcatcgagcgcggcataaacctcaagggagtcgctcggctcgacgattcggcccgcgaggtactggtcaaagtcggcatctcgcccgtcagcatggcgggcgcggcgcgcaatatcgactgtgaacttcccggctgggacttcgccgccacggtcagggcgaccagccgcaaatgggaacgcgagctgggcaaagtcgcggtcaaaggttcggacgatgcggcccgccgtatcctctacaccggactttaccacgctttcctccagcccaacctcttcaacgactgcgacggagcataccgcggcgccgacggcaaaaaccacgaggcccccggacacgagacctacaccgtattctcgttatgggacacctaccgcgccgcgcatccgctctacacgctgctgcagccggaacgcgtgcccgacatggtcaatacgatgctcgacatttacgacgagcagggttatctccccgtctggcacctgtacggctccgacacccgcgaaatgatcggcatccagtcggttccggtcgttgccgacgccgttatgaaaggatttccgggcattgattacgaccgcgccttcgaagccatgaagcggtcgatgctgagcgactacaagggactcgcatggctccgcacgcaggattacatcccgtccgacaaggagggcgaatcggtcgccaaagggctggaatatgcgctggcggacggcagcatcgcccttgcggccgaaaagctgggctgcgaagaggatgcccgcctgttcggcaggcgcgcccgattctacacaagttactgggaccccgaaacccgatttttccgcggccgcaacctcaacggatcgttccgcgaaccgttcgatccgttccactcgacccaccgcaacgacgactactgcgagggtacggggtggcagtacatctggctggtgccgcacgacgtccgggggctgatttcacttttcggcagcgaagaggcgttcacggagaaactcgaccggctcttcaccgtcgagggcgacatgggcgaacaggcgtcgggcgacatatcgggcctgatcggccagtacgcccacggcaacgaaccgggacaccacaccgtctacctttacgcatacgccggacagcagtggaaaaccgcccgcatggtgcgccgcatactcaacgaaatgtacaccgaccggcccaacggactggcgggcaacgaagactgcggccagatgtcgtcgtggtacgtactttcggcgatgggattctacccggtgaatccttcgctgggaatctacgtcctcggcagtcccaaattctcggaaatgaccatccggacggaaaacggcaaaaaattcacggtaaaggccgaaggcaattcagaacgcaacatctatatccagtcggcggaactcaacggcaaaccctatccgtacgcctacatccgccatagcgacatcgtaaagggcggaacgctgcgcctgacaatgggtccgcaaccgaacagggagttcggcgccgctccggaacaccgtcccttcgaacgttaaattacagataacccgaccaacaacccgaccatgaaaaccctacaccagaatctttcgcttccggcgctggccctgctgctgggcgcctgttctcagccggaagcccaaataaacatcgatgcggcacagcgcggcgcagaggttccctcatccctgtacggcatcttcttcgaagagatcaaccacgcgggcgacggcggactctacgccgagctgattcagaaccgcggattcgaagacagctccgtacccgaaggctaccggatcgaaggcgataaaatctatccgcccgccgtctgcaatcaccttaccggctcgaagccccatcccgatctggcatttcgctggacaacggacgaaatacccgcatggtcgctcgaacagttggcaggcgaaggcgcgaccatgcaactcacgaccgaatatccgctcaacagcgcgactccgacggcgctgaaggtcacgcttcccgttcagggacgcgtcgcgctctccaataccggattctggggcatcaacatcgaaaagaacaaaagctatttcctgcgtttcaacacctcgaacggcaaccggttcgacggcaaagccaccatcaaactcgtcggcgccgacggcacggaactctgcaaccggccgctggccctcgacccggataaatcttggtgtcagtattcgggcgaactcgtagctgccggcactgaccacaacgcccgcttcgtcatcgaactcgaaggcaagggaacgctgctgctcgattacgtttcgctcttcccggccgagacgttccgcaaccgcgaaaacggactgcgcaaggatatcgccgagacgctcgaagccatgcgtccggcattcgtccgctggccgggcggctgcgtggtggagggcatcaccctttcgaaccgcatcaaatggaaggaaaccatcggcgatccggccacccgtccgggtgtttacgacacttggggctatcgtaccacgatgggcttcggctaccacgaattcctgcagttctgcgaggacatcggtgccgacggcatgttcgtctgcaacgtggggctgggctgtcagggccgcgcgggcgacgcctgcccagaggatgaggtggacttcttcatcaacgacgcactcgacgccatcgactacgcattgggcgacggcacgaccgcgtggagccgcaaacgcgtcgagaacggtcatcccgaacctttcccgctgaaatacgtcgaaatcggcaacgaaaactggggcccggtctatgaaaagcgtcacgacaaattctacaaggccatcaaggcgaaatatccgcagttaaaactcatctcgacgctcggactgggcggccagcaccgtcacgagaaggtcgatatgatagatccccactggtacgtgtcgcccgaattcttcttcgccagcgacaaactcttcgaccaacaggaacgcggggattacgaaatctacatcggcgaatacgccgtcaatcagaacgtcggcggcggcaacctgctcggcgcactggccgaggcggcgttccttacgggcgtcgagcgcaactccgaccttgtgaagatggcctcctacgctccgctgttagagaacgtcaatgaccgcgtctggcccacgaacctcatctggttcgattcccaccgcgtcatgggacgctcgtcgtatcaggtacagaagatgtacgccgaaaaccgtccgtcgttcaacgtcgccaccgcattcgaacagccgacacaccccgtcgaagtccgcggccgaatcgcattgggcggctggaataccgacaacgaatacaaggacctgaaagtcacgctggccgacggtcacaccgtcgaagccgacatgacgcagggctggacgccccaagagggtacatggaccgccggggaaggcacgctgaaaggctccggtcccggcgtgatgcgctggattctatggagcacgccggaagcgttcggcgactgctcgatctcgctcaaggcccgcaagaccgccggagcggagggattcctcatctacttcggcatgcacgacgggctgaacggctacgtgctcaacatcggcggctggggtaaccagaccacggctttccagcgcatcgacggcaacgacatgccgcagattcccaacaacatctcgcagcatgtggaggagggacgctggtatgacatccgcatcgacgtcaaaggcggcaaattcacctattatctcgacgacaaacagatgctcgaaacgacgatcgagaacatacagcgctatgtagtttcgggttacgacgagagtacgggcgaactgatcgtcaaattcgtgaatgccaccgaagagccgttcaccacgtcgatcaacctgcagaacgtaacctccgtggagcgtaagggcaaagtcgtcaccctcacgtcgaacgatcccaaagacgagaacacgctcgacgatccgaagaaggtattcccaagggaaagcacctacaacggcttctcggaaaggttcgactacacgttcgaaccgtggtcgctgaccgtgctgcgcatcaaggccgaaatctaaacatcgcatgaaaggataacccgccttccggaaccgggctgcggattatccttttttcaaaattccgaaccgcatgaaaaagattcttttcaccctgctctcagctgccgtcgccgtatcggccgcggccggcgacaaaaactacctccgctatgtggatccctacatcggagcgggcggccacggccatgttttcgtcggggcctgcgttcccttcggtgcgatacagatcggaccgcaaaatatcttcaaaggctgggactggtgttccggctaccactattcggacaacgtgctgatcggattttcgcacacgcacctcagcggtacgggctgcaccgatttgggcgacatccagatcatgcccttcacgggcgacgtgcgtacgcgccgcggcgaacaggacgacatctcgaacagctgttcagcccattaccggcatgaaaacgagcggatttcgccctatttctattccctgacgctcgacaacggcattcatgccgaactgaccgcatcgcggcgggtcgcattccacgaatacacgttcccggcaggcgaaaaggcccgtctgctgatcaacctccgcgaaggcaacggatttcagtcgttcgcctcgtcgctacggctggtcgatgcccacaccgtcgtcggccaccgcatcgtcaaaggctgggcgccggaacaccgcgtctacttcgcactgaaaagcgaccgcccgatcgccgaactgctggtcttcaacgacgacgagccggccggacgcaacgagctggaaggcgaaggcgggaagggcgtggtctgcttcgaaggcagcgtcgagaaactggcactgaaagtcgccgtttcgtccgtaagcaccgacaatgcgctggaaaacctgcgcaaagagattccccactggaatttcggcaaggtgatgacggcggcccgcgacgcatgggaaaaggaattggagcgcgtcgagatcacaactgccgacgaacgcgccaagcgcatcttctatacggccatgtaccacacgatgatcgcccccacgacctactgcgacgtgaacggtgaattccgcggccacgacaataaaatccacaaagccgatcggacgaactattcgaccttctcgtgctgggacacttaccgggcgctgcatccgtggtttacgatcatccagagcgaccgggtgggcgacatggtcgcgtcgatgctctcgatctgcgaccagcagggcaagcttccgatctggccgctgatcggcggcgagaccaaccagatgcccggctacggcagcgtaccgatcgtcagcgacgcggtagtgaaaggaatccggggaatcgacgcgcagcgcgccctgcaatgcgccgtgcagacggccacgctccgcggacaggccggcatcggctatgtgcaggaccgggagtatatccccgcggacagggagttcgaggcgacgtccaaagccatggagtatgcggtggccgactggggcatcgccgccatggcgcacaaactcggccacaaagagacggagcgaactttcgcccggcgcgcccgctactggaaacactatttcgacggcgacatcaatttcatccgcccgaaattcgacgacggaagctggctcacgccctacaacccgttccagtcggtccacggcggcacgggctacttcgccgaaggcacggggtggcagtacaccttcttcgtgccgcaggacccctacgggctgatcgaagccatgggcggcgacgagccgttccgcgcaaaaatcgactcgctgttccgcgtctccggcgacatgggtccccacgcttcggccgacatttcgggactgatcggccagtacgcccacggcaacgagccctcgcaccacgtcatctatctctacaactacgcaggccagcagtggaaaaccgccgaactggtgcgctacgtacagcaccatttctacaccgaccgaccggacggcatcatcggcaacgaggactgcggccagatgtcggcatggcatattctttcggcgctgggtttctatcaggtcaatccctcgtgcggggtctattcattcggcagcccgcttttcgagaaagcggtgctgaatatgcccaacggacgcaaatttatggtgacaacagagaacaattccgcaaaaaacagctatattcaatccgtggaactgaacggaaaaccttatctgaactcttacatcgcatacgacgacatcgttcgcgggggcacgctgaaattcgtcatgggcccgcagcccaactacgacttcggctgcgcccccgaacaccgtccctacaacgaaacacgccaataaagacgctatgaatacgaataccaaacgattgctctgcaccctcgccggcacggcggccctgctgacggcggccggaaacgacgacgggagtcgcatcgaaatcgatctcggcaaacgcggggccgaaattcccgcatcgctctacggcgtcttcttcgaggagatcaccggttcgggcgacggcgggctttacgccgagatgatccgcaaccgcggcttcgaggagggcgtactcccgacgggctgcacgctcgacgccgacgggtatgccgccgcaccccacgcgcactgttattcgaacgactcggtcaaccgcttccgcgtgcggtggagtcccgatctggcgatgacgggctggcggacgcaatacgccgacggctcgcaggccgcttcgtccgttaccgccgaatatccgctcaacgccgccacaccccacgccctgcagctcgatcttgccgcggcgcacggcgaagtgagcgccgtgaacagcggctactggggaatcgccgtcgaagcgggcaagagctacgatctggaattttacgtccgcgcggagaaaaccccgtggtgccgcgccgcgatcgtcacgcccgacgggcaacctgttgctgcgagcgacgtgcgtctgacgacggacggcaactggcaccgctatacggcgaccttcaccccgtcggagaccggcagcaaaaacaccctgcgcctcacctttcctgccgaaggccgcgtctggatcgactatgtatcgctcttcccgcgcgacacctacaaaggccgcgccaacggactgcgcaaggatgtggcgacgatgatcgaagaactgcgcccggcgttcgtccgctggcccggaggctgtatcgtcgaagggctgacgctcgacaaccgcgtgaaatggaaggagaccatcggcgacccggtaacacgtccgggagagtacaacctgtggggttaccgcagtacgtacggattcggctaccatgaattcctgcagttctgcgaggatatcggcgccgagggcatgttcgtctgcaacgcgggcatgtcgtgtctgttccgcaacggcgactatgtacagggcgacgaactcgaaccgctgatcgaggaggcgctcgatgccatcgaatacgctttaggcgatgcaaagacgaccaaatggggcgccgaacgcgccagaaacggtcatcccgaaccctttccgctgaaatacatcgaggtcggcaatgaaaacgtcttcgcccgctatgcggccaactacaatcgtttccacaaggcgatcaaggcgaaatatccgcagctgacggttatctcggcgctgatgttcagcgacgacatcaagcggctggacaaagtggagatgatcgacccgcactattacgagaccgccgactggttctacaacaacgccgacgtctacgacaagctcccgaagaagctcccctataagatttacgtcggcgaatacgccgccgtggggcagtcgaatctttacgcgtcgctggccgaagcggcttacctgaccggcgtggagcgcaacgccgacaaagtgcagctggtctcctacgccccgctgatcgaaaacgcccattacggccgcaaccacctgatggtactcgacaacaaacaggtttacggacgcacgaactaccatgtgatgaaactcttttcggagaaccggcccgatgtgaacgttccgctctgcattctcggagagcaggtcgcaaaatcccactctcccaaaggattcatcggcctgaatacgggcaacacggcggcgcagttccgcgacctgaaggtcacgagcaacggccgcaccctctacaccaccgactggagcgacctcgacacacgctgggagacgatacgcggcgaatggaaagccgcaggcggcgtcctgacccagccagtcccggccggagatgcgctcctgcgtctgaaagatctcgaagcgggcgactgcacgatcaccctcaaagcccgcaagacggccggacacgaagggttccgcgtagtcttcggcatgcaggacgaccgccgctatttcatggccgacatgggaagccactccaacgagtcggtcctcttccgggagatcggcgacaaaggttcggtttcactcttcgactaccgcaatcaggagccgatcgaaacgaaccggtggtacgacgtgcgcatcgaaatccgtggcagcaaatggaagtgctacctcgacggtgaactcaaatacgcctacgactatacgatcgtcaacaagcactacgccgtcgccggtctcgaccgcaagcgcaacgaactggtcgtcaaactggtcaatggccgcacggagccgtggcgaacctcgctggcgctgaaaggcgggaaagccgcgcccggcgaagcccggcgcatcgagcttgcatcggcgtcgatctacgacgaaaattcgttcgaagaacccgaaaaaatcaccgcccgcgaatcggcattccgcatcgaagggcgcaccgtacccgtagaatgcgcccccaactcgctcaccatcctgcgtatacctctcgacaaataataaccagcaacctcaataccccgatgacaaagtatctgaaactgatttccgccattgccgccctgctgcttgcggcatcgtgcggcagcacaaaaaacgcacgtaaaagcctttcgggaaatcccgtctttccgggctggtacgccgaccccgaaggcgccgtcttcggcaaggagtactggattttccccaccctttcggacctctatgccgcaccgggcgaggaaatgccggcctaccccgccgagaaaagctcggcagtccaccagctgtacaacatccagacctacatggacgccttctcgtcgaaggacctcgtgaactggaccaaacatccgaaagtcctcaccaccgacgccgtgaaatgggtaaaatacgccatgtgggcgccggcgatactcgaacacaagggcaaatattacctcttcttcagcggcaacgacatccaaaacgaccacgaatacggcggcatcggcgtcgccgtggctgaccgtccgggcggcccgtacaaagacgcgctgggcaaaccgctgatcgaccgcatcgtcaacggcgcacaacccatcgaccagttcgttttccgcgacgacgacggtacgcattatatgtattacggcggctggcaccattgcaacatggtcaaactgtcggacgacctgctgagcgtcgtgccgttcgatgacggcgagacgtacaagtccgtaacgcctgaaaactacgtcgaaggaccgtttatgttcaagcgcggcggcaagtactatttcatgtggagcgaaggcggctggggcggtcccgactacagcgtggcctatgccatcgccgactccccgttcgggccgttcgaacgtatcggcaaaattctccagcaggaccccgaaatcgccaccggagccggccaccactcggtgatacggattcccggcagggacgaatactacatcgtctaccaccgccgcccgctgggcgcgaccgccatggggcaccgccagacctgcatcgaccgcatggagttcgatgcagacggcttcatcaaacccgtaaaaatgactttcgaaggggtcaaacccgtccggatcaaataacgaccacataaaaaacaaagaccatgaaacgctatctcttcttaatggcagccacggcctgcatgctctcctgcgcaggcaatggcgacagcggaaacggcgtcgaactgctcgatgccgccgccttcagaaccaaaatcgacgggaaacccgtcggactctacaccctgcaaaacgccgacggcatgaccgtgcaactcaccaattacggcgcacgcgtcgtcgcgctctgggttccggccgccgacggccgcttccgcgacgtggtatggggatacgacagcatcgacgcctatctccgcacggccgacaaatactgcggacccgtcgtgggacgcttcggcaaccgcatcggcaaaggacgcttcacgctcgacggcaaggagtaccaactgacgatcaacaacggtgagaaccacctgcacggcggtcccggaggattcgaatgccgcgtctgggacgcccgcgagaccacgacgcccgaaggaaatcccgccgtcgccatgtcctaccgctccgccgacggcgaagagggctatccgggcaacctcgacatcacggtcacctactcgctgacgccggacaacggactggttatcgactacgaggccacgaccgacgctccgacaatcgtcaaccccacgagccatgcctactacaacctgcacggcacaacggagcattcgacagactcgcacctgctgaccatccatgccagcggctttacgcccaccgacgcgggtctgatccccacgggtgaaatcctcccggtcgaaggcacgccgctcgacttccgcacgccgcatgcgatcggggaacgcatcggacgaaccgactacgaaccgctggcattcggaaacggctacgaccacaactgggcgctcgacaagcctgaagcgggcacggtttcgctggctgccgaggcttatgaacccgcgacgggcatccggatgaagatctacaccgaccagccgggactccagttctatgcaggacagggcatggacggcaaggaggtcggcaaacgcggcgaccgccacaacttccgctccggcatcgccctcgaaacacagaatttccccgacgcacccaaccacgacaacttcccgtcgtcggtgctgcgtccgggagagacctacacgcagcatacggtctacgcattcgaaacagacgagcaataaccagccccctgacaacggaaacccggcggcaaacggacttcgaccggaccgaaaccgaacgctccaacgtcgtacatcccgccgtaacgatacgccgtgaagcagcgacgctctgcgcaccgggccggcccttgccgacaaacaaggacagaaacagacaaacaaagaaccgggcaagtccttcgggaacctctggaatttgcaaacaacactgtaatttaataagttgcagcgttgtttttttatgaggtaatgatttagaaacgcaagtatcgaataaacttacatcgaggttcattctgtcaaacaactctatataaatatgcaaaatatttgataaaaaagtaaatgggatttttattactttatttgccgatctatggcagacatcagcgtcaccgtggatcatttcttcatttgagcggaatgaaacggtctggagcggatatagaagtcgttttctgaaggcttggattgtcttgtgtatccttaacgcagaaaatcatctacccccccc

SEQ ID NO: 12072 - DNA, 56980 bp, Unknown
  gut microbiota DNA sequence
ctccatgtaaaagatgtgggaccgggttgttaacaaatccttttgtcaacctctcacaccggtcaatggacagccataaaccaagagggcatgcgctgcctctaatggaaattccttggtcaatcagctttctgtcataagccaaagatagtgcaagctaagcgcaaaagcaagtttacttgtattttgccgagacgcagcctgtctaaggcagaaccaaaaataatgcaggccgcgggcaaaaccgaacgatttgtcggcttttaccgcggcccgcatcgtttaaccgtccggaaggcccgctcagcgacgtcccccaagtttcagataacggtcgtagagacggtcgtaaaccgcatgacgctccatatcgggaatgtattcgttcgagaagccggggcacatcgcacgctgagcctcctgtaccgagccgtagagtcctgcggcgaccgctgcgaacatcgcagcacccaaggcgcaggcttggtcgctggccaccacccggatcggaacgccgataacgtcggccatcgtctgcatcacgaaaggcgatttgcgagcgatgccaccgatagcgagaatattgtcgatgggcaccccctcttcgagcatccgctcgttaatggcccgagacccgaagaccgtcgcttcgaccagcgccttgtagaccgccggtgccgacgtggcgagggtcagtccatgcagcacaccccgtacccgggggtcggcatcgggcgtccggcgtccattatgccagtcgagcgccacgggatcttcgtccgtcagaggcagccgttcggcctcggccgtcagctccccgagaattcgctcttcaaattgcgggtcgcttccggcgattcgctgcagcggccacgccatcatccgacggaaccaagcgtacagatcgccgaaagcggcctgcccggcctcgaatccgatatatccgggcagcaccgaaccgtcaacctgaccgcagatgccgcgcacggtccggctgccgacctcctcgtaagtgccgaccacgatgtcgcatgtcgaggttcccatcaccttgaccagcgttccggggacgattccggccccgacggccccgacatggcagtcgatggcccccacgccgacggcaatgcccggtttcaaccccagccgggcggcccactcgccgcacagccggccgacgcacgtatcgccagtgacggtttcggaataaagatggccgcggaagacgcccagcagcggatcgaccgcttccaagaactccggcgcggggagtccgccccacgaggcgtgccacatcgccttgtgcccagccacgcagcggctgcgggcaatggtttcgggggtcgtgtccccgactaacagggcgctgatccaatcgcagtgctcaacccacgaataagccgccggctgcaatccgggcgaacgacgcaggcagtggagcatcttggcccacacccactcgcaggagtaagtgccgccactataacgcgtgtagtcgatttcccatttttttgctaaatcgtttatttcatccgcttcggcgagggccgtatggtccttccaaagcacgaacatcgcatctggctcctcggtgaactccggcagcagggccagcggggtgcccttggagtcagtcagcgccggagtcgacgccgtggtgtcgaaggagatgccgcggacggcatcggctacgtcgcggccgcaagccgccaaagcatggcggacagacgcttccaacgattcgacatagtcaagcggatgctggcggtaacggttgtgcgcgggatcgcagtagagccgctcggcccaccgggggtaagctaccaccgccgaggcgagttccgccccgtcagcggcgtcgacgacgaggcaccgcacggaatcgctcccgaaatcgacgcccaaaagataattggttcgagattgcatagttatttcggttaatggttgaatgcttctttcacagcccgcagtccaccgggtatcaggtcgcggagaagctcttcgagcaaggcttcatccccctgcaggtggaagatctcctgcgcgtgacacagcgtttcgccgggccgcaggaaagctgccggcgaagaggtttcgatttcgaagaacggacccatcacctcgccggtctcggtcggtccgtcgttgtaggcgttgactacatccccgccgaacgggttcgcctgcgcgccccagcggctatccacatagcggtcgcccgccgcggaacgccggtagcggaccagcgtcacgtgatgcgccgccgcatcgtaactgccgcaaagccccgtatcgtggcccgcaggcaatccgatcttcgaccggaactctccgtcgatccgcaagcatacgagtcttccggagacggagagccggtcgtccggaagcgttccgaaatagtcgctgttgacggccgcccgcgcatcctccccgtcgcaggggagaaaaacggtggtcgacggcgacggcgtgaacatcccgagcatccagagcgacggtgcaccgcccgcggacgtccatgcgtcagtaccgcagttaccgatccggttttcgctgcgataggccaccactgcgagttccggcggcagggcacgccccagcgatgcctctgcctgccggagcgaaaggagttcgacccgccgcgtcaccccgatctcaaagcgggtttcggcggcgttccggagcgacatctcggcttcgaaacgcacctgccgggcgtcgcgcccgaccacccggaaaggctcggtgtccagcgccgccgggacctgccagttggcatacacctgctcggcgccgggtgcgaaatagagcgaaaagggaccaccctcgggaccgagccaaaggcgttcttccccgccgaaaggatttaatcgggatttccgcacccctgaagcgatcagcgaacggtttatccaaccgtagccgggtcctccggttccagtcgccgtcgaggttatcacccgtccctgccactccggaaccagatagacccgcgctcgtcccgattcgtcggacagctccacgccccgcaccccgcaactttccaaaaatgaacgcatttcaccgtaagttttcatatttcgaaagggataaaatcaaaaaatcagtgaaaaaatttgtttattaaaacgttttaattacttttgcaaaagtaacagaaaatcccagatattgcaaaaaatcgcaaaaaatatgcgtacgaagcgtgtaaccataaaagatatagctacggaggcgggcgtttcgatcgccttagtctcgttcgtgatgaacaacaaggccgacggtaaggacacctaccgcgtgaacaaggaaaccgcacagcgtattctggaagtcgcgcagaaactcaactaccagcccaacaacgccgcccgtaccctgcgcagcggtaagaccaacaccatcggcgtcatcgtttcggacatctcgaacaagttcttcgccgacattgcccggtgcatcgagaaccatgcatataaacataagtataccgtgttgttcggcagcacggacgaaaatccgcagaagctggagaatctgatcgaggtcttccgcaacaagggcatcgacgggctggtggtcgtgccgtgcgagggcgcggacgagatcatccgcgacatcgcacgccagaacatcccgctcgtgctgctcgaccgcgaagtgcccgatctggaagtcagcagcgtcgtgctgaacaaccgccgcgccgggtacgaaacgaccgaagcgctgatccggcgcggattcacccgcatcgagatgatctcctactcgatggggctttcgaacatccgcgagcgtgaagagggataccgccgttgcatgcaggcacacgacatggccgaaaacaccgtcatacaccgcctgcgccacgacaaactcgccaagatcgaggatatcatccgcgaggcccggcaacgccgcgtcgaggctttcctcttcgccaccaacaccctagcaggtcagggcctgagtgctattttccgcaacggctggcgcgtgccgcaagatttcgccatcgcctgcttcgacaccaacgaagccttcgacatctataaaaccgccatcgcctacgtccgccaacccatcgaacggttcgggaccgatgccctcgatctgctgatcaagagcatcgaacaacgcgacgaacccggaagcagcacacgcatcgtgctgacgcccgagatcgtcgagagcacccccgaagaggtgctgagaagcccggaagaggtagtaacagaaagctaaaaacatttgcctcaaagctaaaacgatttacaagaaaccaacataaaaccatgaacccggcaatccatccgttttacaaggcgagcgttctcgccgtccgcagtgccatgctgaccgccgcactcttcgtcacgacctcggtaccggcccgaacgtcgcatacagtccgtcccaagggagagggtgacactccgacccaatccgacccggacattctgcgctacaacaacccagacctcacggtcgacttgggagtcgggctttggggcattccgctgcccgtagactacgacggcgacggtgtgaaagacctgctggtgtcgtgccccgaccgcccctataaaggactctatttttttaagaacatcggaacgccccgccatccccgtttcgccgccgccgagcgcatcagcgagaaggggatgaacaacatccgcctctcggaggtggacggcaagccctacgtcctttcgaagaatttcgaatatcccgactttttcaaggctccctacgccaaaacacggcgtcttcactacgaaggcgaggagctcggagcgacctacaagaagtcgcggagcaatatgtggaattacgtggactgggacggcgacggcgacaaggacatcctcgtgggtatcgacacgtgggacgactacggctgggacaacgccttcgacagcctcggacactggacccgggggccgctgcacggctacgtctacctgctggaaaatactggcaggggatatgtcaaccgcggtaaagtggaagcgggcggtgccccgatcgatgtctacggagcgcctaatccgtgtgtcgccgacttcgacggcgacggcgatctggacctgatctgcggcgaattcatcgacggcatgacatggttcgagaatatcggatcccggacggaaccccgttttgcggcggggcgcccccttgcaaacaaacacggggagatccgcctccatctggagatgatcgtcccggtggtttcggatttcgacggcgacgggcatcccgacctcatcgtcggcgacgaagacggccgtgtggcttgggtgcgccacacgggaaaggtcaaaaaaggcatgccacaattcgaatctcccctctacttcacccagcaggccgaccttgtcaaattcggagccctctcgactccctgcgctttcgattgggacggcgatgggaaacaggacatcattgccggcaattccgccggcgagatcgctctcatccgtaacctctcgggcggcggaaatcccgtgtgggacgctccgcgcctctttaccgtcaacggtaaacccatccgcattcaggccggagagaacggctcgatacaaggtcccgccgaacgcaaatggggctacacggtactctccgtggccgactgggacggcgacggactacccgacatcatcgtcaactcgatctggggcaaaatcgaatggttccgcaatctcggcaccaaagacggactgaaactcgctccggcgcagtctgtgcgcgtggcatgggagggcgagacccccaaacccgcatggaactggtggacgcccgagtccggcacgctcgtcacgcaatggcgcacaacgcccgtggcgatggactggaacggtgacgggctgacagacctcatcgtcctcgaccatgaaggttacctggcttattacgaacgtttccgcacgcccgaaggcgaactgctgctccgtcccggccgccgcatcttccacggcacgaactgctcgctgtacgagcggaaagagggcgtattgaatgcctcggaaggattgctgcggctgaatggtgtggaggccggttggtccggacgccgcaaaatctgcttcaccgactgggacggcgacggacggctcgacctgatcgtcgacagccaaaacgccgcgtggttccgcaatgtccgcgaggagaacggcgatgtatggtacgaatacatgggcaacctctccgaccgggtgctcgccggacactcgacctgtcctacacccgtcgattggaacggcgacggacgccccgaattgctgttaggtgccgaagacggccatttttatctcatcccgaacaataccgataaacaaatccgataaaccatgcaaattccgaaattacgggggatcattcccccgatgattaccccgctcaagggcgacgacgaactcgaccgcgaaggaaccgtacgactcacggagcacctcgtcgccggcggagtccacgccatttttctgctcggcacgacgggcgaagcccagagcctgacctaccggctgcgttatgaattcgtcgagctggtatgccgtcaggtcgcaggacgcatccccgtgctggtcggagtcaccgacaccgccttcatcgagagcgtccggctcgcggagcatgccgccaaatgcggcgccgtcggcgtcgtggccgccccgccctactacttcgccccttcgcagcaggagctgatcgaatactacacagcgctggccgacgccctgcccctgccgctctacctctacaacatgccgtcgcacgtcaaggtcttcctcgaacccgcgaccgtcaagacgctggccaaccatccgaacatcatcggactgaaagacagctcggccaacatgacctacttccagacactcctctaccacttgggggacaatcccgacttttcactttatgtcggacccgaagagctgacgggcgaatgcgtcctgctcggtgccgacggcggcgtgaacggcggcgcaaacatctttcccgaactctacgtcgccatgtacgacgccgcatgcgcccatgacatcgcccgcgtccgcgaaatccagcgccgcatcatgcagatcagcacatcggtctataccgtcggaaaatacggatcgaattacctgaaaggcgtcaaatgcgcactttcgctgctgggagtctgcgacgactacctctcgtacccctaccggaaattccgcaccgaggagcgcgcccggattcgtcaggcactcgaagcgctgggcgccaactgcaacgtataacccataacaaccaaccctcatggagataaccttactcgattacctcgtatttttcgtcttcgtcggcggcgtcgccctcttcggctgcagcttctacttccgcagccgcaaaggcgcggctgcattcaccgccgccgaaggatcgctgccgacatgggtcgtgggaatgtcgattttcgccacgttcgtcagcagcatcagttttctcggcctgcccggcgacgcctacaaaggcaactggaatccctttgtattcagtctctcgatccctatcgccacatggctggccgccaaggtattcattcccctctaccgcagcgtaaacagcgtctcggcctaccactacctcgaaatgcgtttcggctactgggcgcgctgctacgtggcggtctgctacctgctgacgcagctggcgcgcatcggctcgatcctgctgctgctggccctgccgctgaacacgatgttcggctgggacattcagaccatcatcatctgcacgggaatcgccaccctgatctacacactgctgggcggtatcgccgccgtggtctggaccgacgccatacagggcatcatcctgatcgtgggtgccctcgcctgcgccgcgatccttaccttcaccatgcccgaaggccccggacagctcttcgaaatcgccgcggcacacggcaaattcagcctcggcagtttctcgctgtcgctgaccgaaccgaccttctgggtggtgctgatctacggccttttcgtcaatatgcagaactacggcatcgaccagaactacgtacagcgctatatgaccaccaaatcgacggccgaagccgtgaaatcgacactcttcggcggtctgctctacatccccgtctcgctcgtcttcgtctacatcggcacggcgctcttttcctattatacggcccggcccgaactgctccccgccggcacgccgtccgatcaggtcttcccgtggttcatcgtccacgggctgcccaccggactgaccggactggtcgtcgcatcgctcttctcggccggcatgtcgaccgtcgccacgagcatcaactcctcggcgaccatcgtactgaccgacttcgccaaacggctctcgaaaaaggagcttaccgaaaagcagaatatgggcacgctctacgccacctcgttcgtcgtcggcacgctcggcatcgtcgtcgggctgctgatgatgcgcatcgacggcgtgctggacgcatggtggaagctggcgtcgatcttcagcggcggcatgctcggactgttcctgctgggcgtcgtctgcaagaccgtgcgccggatccacgcagtcgtcgccgtgatcctcggactgctgaccatcgcgtggatgagtctctcgccgctgatcaacgaaggttcgcccttctaccgtttccacagcccgctgcacacctacctgacgatcgtcttcggtacgaccgtcatcttcctgacgggcttcctgctgacgaaactcacgcaccgcaaagccgaaaacgcatgaaaacccgactgaaaaccggactgttgctctgcggcggcgtattgggcggcagtgccgccgtcgcagcccagaagcaacccaatatcctgctggtactgagcgacgaccagagtgccttcgccgtcggctgttacggcaatgccgacatccggacgccgcatctcgaccgtttcgccgcagagggcgtgcgcttcaaccgcgcctacgccacctcgccgcagagcgtgccttcgcgcgcctcgatcatgacggggcgttcgcccgtggcggtgaacatgacccgcttcaacgtgacgctcgcccgccgtttccgtgcttttcccgaatacctgcgcgagaacggctactatacgggcgtcgccggacgcggctaccacctcgacggcgccgtcagcggccgggtcggaaagatcaaggaggtcgaactctactatgcggagcatggctacaagacctttcccgaccggctcgacacctgcatggtcgtcgccgacgcccgcaaaggcgagagccattggaagatcaacgcgcagttccggaccttcatggagcgccgtgacaaggacaagcccttctttctgcaactctcctattccgatccccacacgccttacgacgccccgaaggtgcacgatccccggtcgctgaccctcccgccgttctatcccgacacgcagctggtccgcgaatacctggcggcctattacgacgagatacaccggatggactccgatttcggagaggtactgcgctacctcgacgaacacggcctgagcgacgacacgatcgttattttcatgggcgacaacgggggagcgcagttcatggccaaaggcacgctctatgaaaacggaatccgggtgccgttcatggtgcgctggcccgggcacatcactccggctgtgacggacgttgtggtctccaacgtggacatcgcttcgacctgtctggctgccgccggactgccggttcccgaagagatcgagggcgaggacctcctgcccctcatgacgcggggcgaaaccccggccgaaaggtgggtatactccgtgcggagctgccacgcgaccaattcgctgccgaccgacacttcggtcttcgaccagatgcgttgcattgtcggcgaacgctacaaactcatctacaacctgctgcccggccagccgtgggtacccatcgacttcgccggaacggagatgttcgccgaactgaaacgcatgcacgcgggcggccggctcgacgcgctttcgagccgtctctatttttcgccgacacgcccgatgttcgagctatacgacctgcggaacgatcccggcgaacagcgcaacctgatcgatgatccggcgctgaaagaggtccgaaacgacctgatcctgaaacttacgtacaagatgatcgaggacgaagatttcgtgacgctccctcatccgataatttacgaataagaacccaaaaatcatccgacctatgacaaaccatcctaaaatcggtatccgtccgatcatcgacggccgccgcggcggtatccgcgaatccctcgaagagatgacgatgggcatggccctgagcgtcgcgaaactctacgccgcgaagctgcgctatgccgacggcgctcctgtcgaatgcgttatcgccgacacgacgatcggcggcgtggccgaagcggctgccgcgaccgacaaattccgcgacaacaacgttggggccgtcctctcggtaacgccctgctggtgctacggctccgaaaccatcgatatggacccgctgatgcccaaagccatctggggcttcaacaaaacccagcgtccgggagccgtctatctcgcctcggcgctggccgggcataaccagaaggggttgcccgcattcggtatctacggctccgaagtgcaggaacaggacgacaacagcatcacccccgacgtagaagagaagctgctgcgcttcggccgcgcggccgtcgccgtcatggagatgcgcggcaaatcctatctttcgatcggttccgtgtccatgggcattgccggttctatgcccgatcccgatttcttccatgaatatctgggcatgcgcaacgaagccgtggactgctcggagattgcacgccgcatcgaactgggcatctatgataaggaggagttcggacgggccatggcctgggtcgaaaaacactgcaagacgcacgaaggcgaggacctcaacccggaacacctccgctattcgcgcgaaaagaaagacgaggtctgggagtatgtggtcaagatgacgatgatcttccgcgacctgatggtcggcaatccgaaactcgccgaaatgggcttcgaagaagaggccgccggacacaacgccatcgccggcgggttccaaggccagcgacagtggaccgactttcgtcccgacggcgatttctcggaagccatcctcaacacgtcgttcgactggaacggcatccgcgaagcctacaccttcgccaccgagaacgacacgttgaacggcgtttcgatgctcttcatgcacctgttgaccaaccaagcgcagctcttctccgacgtccgctcctattggagccctgaggccgtagagcgcgccacaggcaggaaactgacgggcaaggccgcgaacggcatcattcacctcatcaactcaggaagcagcacgctggacgcctcgggtgcgatgtccgacgccgagggcaaccccgtgatgaaacccttctgggagatcaccgaacaggaggccgagcggtgtctcgaagcgacgacttggcatccggccggccgcgagtacatgcgcggcggcggtttctcgtcgaagttcttcacgcgcggtgacatgccggtcacgatgtgccgcctgaacttgataaaagggcagggaccggttctgcaaatcgcggaaggatgggccgtgaacgtcgaccgtgcgatcttcgcgcacatcgacaaacgcaccgacccctcgtggcccacgacctatttcgcaccccggctgacgggcaagggagctttcaaaaacgtctacaacgtgatgaacaactggggcgccaaccacggtgccatcacttacggccacgtcggagccgacctcatcacgctcgccgcgatgctccgcattccggtctgcatgcacaacgtcgacgaggagaagatcttccgtccttcggtttgggccgccttcggctccgaccccgaaggatccgacttccgggcctgcaacaactacggacccgtctaccgttgaaaagcttaacctaaatgaatccggaatatgaaaaaactattacttgacggattattcgtctgcatcctgttgcttttgggcggcagtgtgtctccgctctcggcacagaatacccctgcggcgaagatcacgggagagatacgcgacgacagagagcatccgatggctggtgtcgccgtgctcgtacagggtacgaacaaaggtactacgaccggggccgacggtaaattcacgatcaatgccgccgcgaaccagaaactcgtgattaccatgctgggatacgttacgcaggagattcccgtcggcaaacagacacatctcaaagtgacgctgaaagaggactcgaagatgatcgaaaacgtcgtcgtggaaattggttacggcaaccagcggcttgtcgatgtcacgggaacactgggccgcgtgaagatggatgatatcatcaaagctcctgtagcttcgttcgatcaggcgctccaaggccggcttgctggcgtttcggtcacctcttcggacggacaacccggttcggagatggatatcgtcatccggggcgccaactcgctcacgcagagcaattctccactctacgtcatcgacgggttcccgatcgaggatttttcgagcgcagcggtcaatacggcggacattgcttcgctgacggtactcaaagacgcctctgcaacagcaatctacggttcgcgcggagccaacggcgtcatcatcatcgaaacgaaaaaaggcgagatcggcaaaccgaaggtttcttacagcggtacagtaggcgtgcaggaggtgaccaaacgcatggaactgatgacgccttacgaattcgtcgtataccagattgaacggtcacccgcgaatctcgaccgttacctgaccaaaccgggtcggacactcgattattaccgcacccatgcgggaatcgactggcaggaccgtttgtttcgcaatgcgctcatgcacacccacaatatttcggtttcgggcggtaacaagcagactcgctacgtcgtgtcgggagctgtggtggatcagcagggtgtgatcgacaattccggttatcggaagtatcaggggcggttctcactcgaccagaatctgggcaagaaagtacgcctgagcctcaatgccaactatactcacgacaaaacttacggacagaccacctcgcgttcgctcgcctcggcgaatgcctatgcatcatacctgatgtaccgtacgtgggcttaccgtcccgtactgctcaacaccgaggacagcgagaacctgttcgacgacgagaacgacaccagcgtaatgaacccgatcatctcgaataaggccgaaaatacctcgaagaaggtcacgacgttcctttcgaacgcgaaactggaatggaccatcctcaaaggactcaaactgacggtacgagccggttacgggcgcaagtcgatccgacaggaggaattcaataattcgctgacctatcaggggttccctcgtgcaggcaacaacaagggcgtcaacgcctcgttcagccaacgcacgctggacgactggatgaatgaaaatacgctggtctaccgccgtgagttcgccaaccggcaccggttcgacatcacggccggatatacgatgcaaggtaccgtatcgtcggtctacggattcgacacctcgcatattcccaacgaattcctcggactgagcggcatggacgacggtattccctatgctgcaacggccacgctctcggaaaatgtgctcatgtcatggttaggccgcgtgaattacagttaccgctcgcgttatatcttcacggcttcgtttcgcgccgacggctcttcgaaatttacgccgggaaaccgatggggcatcttcccctctggggctttcgcatggcggctgggacaggagaaattcatgcagaaactgcggttcgtgaacgatgcgaaactgcgggtaagttatggtgttacaggtaataaccgcatcggagattttgcaacctatccctcgcttaccctctcggactactattcgttcaataacggcacgccatcggatgccgtagtgccgaataatctgggcaaccgcgacctgacgtgggagagcaccgagcagatcgacatcggttgcgacctgacgctgtttcataaccgcgtcaatttcacggtcgacctttaccgcaaaaccacccgcgatctgctgttgaatgctaacctgccttttacaagtggtttctcgtcggtttacaagaatgtcggacgggtgcgcaacgacggtctggaactgtctttgagcacggtcaacatcgacagtcggaactttaagtggacgagtgatttcaatatcagtttcaaccgcaaccgcgtcatggcactggccgaggagcaggagagtctgctttcgacagtggccttcaccaccgatttcaactctacgccactctacatcgcgcgcgtgggcggtccgatggctgctttctacggcatcgtctgggacggcgtctacggttatgaggattttgaaaccgacgctactggcgcttcggtactgaaaaagaacgtcgcaacgaacggcaatgcccgcgagtcgatccgtccgggtgacatcaaatacgtagaccaaaatggggacggagttgtcaacgagcaggacatggtggtcatcggacgggcgattccgatccattcgggtggtttcaacaataacttctcgtggaaaggactgaaccttaacgttttcttccaatggtgctacggcaacgacatcatgaatgccaaccggatcattttcgaaggcaattatgcgggcaagaacatcaatcagttccgttcctacgtcgaccactggacgcccgaaaacacctccagccgcaattaccgtcccggcggtcagggtccgcgcggcatctactcgtcgcgcacgatcgaagacggttcgttcctgcggctgaagaccctgcaactaagctatacgcttccaaaaaaatggtcctccaagatacggatggaatcggttcaggtctatgtttcgggacagaatctctggacatggaccgcttattctggcctcgatcccgaagtgtcgacccgcaactcggccctgacacccggttatgactattcggcatatgcgcgtaacaggatctatacggcgggtttgaagatcgtcttttaattccttaatctctcgaatatgaaaatgataaaatacatactgttctccgtgtcggcattcctagccgcctcatgcagcctgctggatacggaaccgcaggatttcatcgatccgaacgactattatgcgaccgaagggcagctccaggcagctcttaacggcgtctatgcaacaatggcccaaacggggctttacggcgccgccatgctgggccgcatgggcctgtctgcggatatcggttacgaggcctatacggtggacgagggtacggtcggctattacgatgtgacgccggccgacagtaaaatccgcagctactggcgcgaactctatgtgggcatcggacgggctaaccgtctgatggaaaatatcgggaaaccggaaatggatgagaccgaacgcgacaatattttcgggcaggcgcttttcctgcgggcctattaccatttcatgctgacgacccgtttcggcgacgtgccgttggtgctcaatacgcccgcttcgggaaagctggccgacgtgcggattccgcagacgtcgcagcggatggtctacctgaagatcatcgaggatatggagacagctgcgaaactggtcaaaccggcttctgaagtggaatgcggcggacggatcagtcagtcggcagtctacggtattctggcccgcgtgtgtctctatatggccggcaatccggtgaacgaaccggggatgtacgtccgggccaaagaatttgccgccaaggtcatcgatacgggattccatgcactgaacccctcctaccagcaggtcttcatcaactacattcaggacaaatacgacatccgggagagtattttcgaagtggagttctatggcaacaacgtgggaacctatacgacaaccgccggacaggtcggccgcaacaacggcatcaaattcaccaatacggacaaacccgaaattggatattccatcggatcgatccgcgcaacgccctattttttccagcttttcgaggacgacgatgaacggcgggactggtccattgccgattacgagttcacggacgagggtgagaaaaaggcgatatcgagcaacaatatgtggatacgcttctgcggcaaattccgccgcgagtatgaactcctcacaccgaagagcacgaccaatacatcgacgaatttccccattctgcgttattccgacgtgctgctgatgtatgccgaagcggttgccgcagacgaaacgagcgaggcaggggagttgacccaagcttacgaatacctcaaccgcgtacgccgccgcggttacggacgcgatgtaaatacgcctgtaatgggcgtcgatctgcctgaagaaggccgtatctcgctactggaagcagtgaaggacgagcgggcccgcgagcttggacacgagttgctgcgcaaggacgacatcatccgctggggcgaattctacgaccggatgcagtctgtccgcgtgacggttcccgaggcctacacctccaactactacgtggcggcacgtctctactacggcaacgtacagcgtcgcgacgtattgtggccgatcccgacgtatgaattgagcgtcaatccgtatctggttcagaacaagggctggtaatctcaaaaatccgcaaatcatgaaacttatcaataaatttacctttatcgcagtacctttgcttgccgctgcatccctgctctggctggtaggctgcaacgaggaggagcaggtcgaaacgcccgatttcacggcgagtaccccgggtacggtcttcaaagtcggcgaaccggtcgttttctcgttcgagggaaatcccgatttcatcatcttctactcgggcgaaccgggcaatgcttacgacttccgcgaccacgaccgcatcgaaaaagctgaagttaccctctctttcgtcacacagacaaaggccggacaaaagggccatgccaatccatcgtgtgcccggatcttttattcgaccgatttcgacggagactacagcgaaacgggcgtgaacaaggcgacatggacggaactttccgaccggttcgaccttccgaccgatacggaacaggcggttccggcagggacgctttatatcgacgatctctttccggaagacggttcgccgatctggctgatgtaccattatcaggtgaaccaatacaacggatcgaacggtcgtacacaggtggatatcatgaacttcaacgtcaacggtatcaccgccgcggggacgacgaaactctacgatctcaaaaacgccgggttccaatgcttcggtgatgcggcctacctcgccaataacaagacgcagggacccgacgtcaataacagccgcatcatgctccgcacggattacaagcccgcttcggatatgcagttgtgggccgtttccggagcgttgcaccgtcccgaagacgtaaatcttggcccagacgggggtgtaggcatcaaggctgtagccgatcccacgatgcacacgttccaccatacttacgatcgggcgggagaatacgttgtcacgttcgtcgccgcgaattcgaatgtttacggtcggcgcgaggtactgcgtgaactcaggatttccgtcgtggatgacgggggcagcatcgcacctccctcctatgaagaatggtgaaccctttgaaaaataacggaattatgaaaaaacatatttttgcgataatgctcctcgctctcgcttcgggatgccgggaagcggatacggaccttgctttcgcaggacaggaagcggtcgtgcggttcgccgccccgggagcggtcgtgagccgtgcaatcgtcgaagccgacggtacacagctcaatattacgtggaattcggatgacgcgatcggcatcttcggacgcggcgcggtatcgggtaacaactacccctatctggcaacgcccgaccgcaaggagcctgcgcgatgctcgttctcaccgatgtcgctggaccggatttatgaatggcagcccggcaagcaggagttctatgcctgctatccctataacgaaacgttccatggtgaaccgaatgccttgttcgtttcgcttccaacgcaccagatacaaaccgcagccggttcgacggagcatctggcagctctttgcacgatgaaggcagctcctatttcacgcgtattcgatgagtcggacgattcaccggtggagtttaccttccacaacctctttgccatagtggagattcgcctcaaaatggaggccggcgcgtcaatcgacgtgccgatccagcagataaagctcgtttccgaagaggctgccctgacgttacctgccggtacggtcgatttgactgccccgatcgagagcggttacaccgtacttccggtcacggctgtcgaggagagccgcgaggtcgtactgactttctcgcagcagcctgtcgtgagccggagcgaatacggcagtttctggctcatggtggcgccgggccggcatacggccggtaaactgaagctgcaggtgacggcgatcgacaattcggtatgcacgctcgaacttccggaggtcgatttcaaatcgaaccggaattatcgtcaagatgccacgctgagcatggatgatttcactgcagcagatccgttcgacgtattcgctgccgcagtcgagtgccgggtaggggagccgattcgtttcatactcgaaggagaggctgaaagcatcgatttcttctcgggcgagatgttccaccagtgggaatatgccaagaaagaccgcctgtcttactccgacatcctcttctcgttccgttcacagttacagggaggtaagcagattcatcccgtaacggtgaaagtttcgaccgacttcgacggcacgtatacagaagagcatattcaaacagccacatggacggatgtgacggcccgtttcacgcttccaacaaaaatctggacagctaacaacggtccaacgactgcagaccgttacacggaagaggggcgaatgaccgcttcgggcgaagtgaacctgtcctcgtactacggggaatccgaaacgcttcatgtggcattcttctaccacatcgacaaatacgatgctggtctgaagaacagccgtaccggtgtttggttcaccgacatacaggctttcagacaggagggagacactcggacggggatattgcagcagaccgaatctgaaattcatatcgtcaacggcgcttcctatgccaccgatgcgacaccgtccgactggggcaatacattcacacacggaggcgttacggtctatccatggcgtttctggtgtgcaaacaatccgaccggcgaccgcaacgcctatgccgtaacgaacccgctggagcgcacgatgcggaatttcggtcccgacaaacccgaacgggtgaagacttcgggcgacgttatgccgcaggaattcgactacgtcttcaccgaaccgggcatatacgaggcgacattcgctgcacggaaccgaacgctgacgggcgaaacggaaattgtccggcagtttaccgtaacggtcaatccttaaacggaatagaaacgaaacaataaaagaccaattatgaacagaaacctgaaaatattgcttctggcgctgtttgcgctgccgttgttcaccgcctgtcacgatgaaacggaagagcagcccgattcgctcgctgaaactatcgttgtcagcgacgccgagggatatcggaaacaattactttccgaaggggctaaaatcatcaccaaccgagcctacaaggtgaccaatatcccggattatttcaacggattcgaaatgctgaccagcaacggtcgcgccaacaacggcggaacaatcaccacgcagatggacgggctggtctacattatcgctcccgcctcggccaaacccgaaggatgggcggttgtgcccaatacgttgcatcaggaccgtgagatgaaatatgcgaccacggatcaggaagtgaagctgtctatttacatgaaacgcgcctatgcgggtcatcccgtcgagattccggcggtgtccactttcgccagtgccattcccattgcccgcaagatcatttacaacgtccccgaggaaccattggcggctactacggtacgtggtacagtgagctgcggaggagcgcccgtaaaggatgtcgtcgtatcggacggcgagcagactacgaccaccgacgagaacggacaatacctgcttaactcatggaagcggaccggatatgtcttcatctccgtaccgagcggttacgatgtttcgtcggacggattgataccgcgcactttcgtacggctggacggaagcgaggaagatgtggccgatttcgaactcgtccggacggataacgaacggttcacgcttttcgtaatgaacgacatccatctgacaaacaccgtttcaaccgcagacatacagcggttccggaatgatttcgtgcctgattatgctgcgatgctggccaagacgccggggaaagtctatacgaccgtcctaggagacatgacgaccgatacacgttggtataataacaatttcgcgctgcccgaatatctggaagagatgcgggccgttcccggtgcgattccgatctggcacgttatgggcaaccacgacaacgacatccgctgtgtgggttcctccgaactttgggatgctttggccgtggaaacctaccgccgggtgatcggacccaactattattcgttcaacctcggacagttccatttcgtcgtgctggacgacattgtctatacaggagtcaatacctacaatacttacgtcgaagacgtacaactggcatggctggaacgcgatctctcctatatcgatgcatcgacgccgatcgtagtgttgacccatgccccgctgttccgctatacgggtatggccgacggtgtgctgcaaatgggcaaaggattctcgaatccggaccaagtggattggctgctggaaaaattcagcaagttcgagcgtatacacattatctcgggacacacccacacgaactatttctgccgctattcggaccgcgttaccgaacagaacaacattgcggtagcagcctcgtcatggcagatttacggtcctgagaaacgccatctgagcaaggacggaacgcccggcggatatatgatctatacattcgacgggaaaaatatcgagcgacaatataaggcattgggccgcgaaatagacgagtgtcagttcatcgtttacgacctcaacacagtacccgcggcctatggcggtacgtcgggcagtaacgaactgctgatcaacgtttacaactgggaccccgcatggacagtccgagtacgcgaaaacggaacggaaattcccgtccggcaatgctggcgcgctgatccgctctattcattggttgccgagggcatgtcgctgagcagcgcattcgctccgggaacgggtgtcccgcacatgttctgtgcgacggcctcgtcagcaaacggcgaagtagaggtcgaagtcttggacggcttcggaaatacgtggaaacaaacggtcgtgcggccgaaagcatttacgtggaatatgcaataaacgggagaaggttgatttcgggcggcaactctcagtcggagaccgcccgggcaaccttctgatatgaaccattgaaacgatgaaaatgatatgtaaaatcatctcccgtctttggcagacaggattggccgtcggctttctgctggcgaccggcgtcgtaggagcgcataattacaatgtcgtgggaaaagtgtcctgcgacggaaaggggatcgcaggagctgtcgtttcggacggtgaacaggtagtccttaccggagccgacggcacatacggactccgatcttccaaacagtgcggatatgtcttcttatcgataccttcggggtatgaagtggaagcggatggagtgatcccgcgccatttcgttccgctggcgggtacggctgtagacacggctgatttccggctgataaaaagcgacaacgaccgttatacgcttttcgttctgaacgatattcatctcacgaatacgccggctcagcaggatatccgccagttccgggaaaagttcgttccggatttccgcgaaacattgcgaacgacttcgggaaaaacgtatgccctcacattgggagacatgacgaccgattcgcgctggtatcgcaacaatttcggacttcccgaatatctgaaagagatggaacgcattccttcgctccccatttttcatgcgatgggcaaccacgacaacgatcccaaaggcacacacacacccgagacatgggattccgtggcggtcaaaacctatcgccgggtcgtcggaccgaactattactccttcaacctaggatgtgtacattacgtgatgctcgataacatcgtctatctgggtccccggaaaatcggcgcaaaaacccgctgggacttcagggtctgcgtcgacgaaacgcaactcggatggttggagcaggacctgcgtcatgtaaagaaatcgacccccgtggtggtatgtatgcatgccccgctgctgggatgcacctccctcgaaaacggagagccgaaactgacgacgaaatttaccgaagcgggtgcggccgaacggctgctggaaaagttcgacggtttccggagagtctgcttcctgaccggtcatacgcacgtgaaccggcattatgtatggtcgaagcacctgaccgagcacaacaacatcgccgtagccgcctcttcgtggaaactcgacggtgaaggccgccgccacatggccaaggacggtacgccgggaggttatgcgatctaccgcatagacggaaaacgaatcgagtggtgttacaaggcgctcgggagacccgtagacagttgtcagttcattgcatatgacatgaacaccgtaccgacacaatatggcggaaagccgggagccaatgaagtctggatcaacgtctacaattacgatcccgactggaaaatcgaggtgcgggaaaatggcaagaaactgcgcgtggagcgctgtcgggagtatgacccgctttaccggcatatttccgaaggtgcggtacccgtctcagggaacgctttttcacccgcccttaccgaacacttgttccgggtggttacctccgggcctgatacgatgatcgaaatatcggtatgcgacggtttctcccaccgatggcagcaaacggtcataaggccgaaatcgtttagctgggatatgcagtaacagcttccggtcccttttctacaattattatgatttgcaacatccgaaaaacgcttctgcttgcaggaatcttcctgctgagcgctctttccgtagcggcacaaccgttcctccggctgccggccgtcatcggcgaccacatggtccttcaagaaaaggccaccgtcaaactgcacggctgggccgaccccaacaccacgctgacggtcagcccttcgtggggtgaagccgtgacggtcaaagtgggatacgacacggcttggagcgtcgagctgatcacccccgccgcttcggcagagccccgttcgatcaccttcgccaccaataaaaaggcggtccggaaagtcgacgacatcctcatcggccaagtatggctttgcagcggacagtcgaacatgaattggagcgcggccaacggcatcgcggacatgaagaaggaactcgaaagccctatgaatccccagatccgccttttcaccgtcacgaagaacagctccccgtatccgcaggacgactgcgaaggtcgctggctggtgtgtaattccaaaagcgccctctatttcagcgctgtaggttatttcttcggcaaacgcctcgctgacgaacttcggcagccggtcggactgatcaactcctcgtggggcggaactcccgtcgaagtatggactcccgccaacgtcatggacaaaaacccgcagatggtcgcctcatggaaagaacagccgaagagcagattctggcagatcggctcgctctacaacgccatgatccacccgttgcgccacacgaccttcgccggagccatctggtatcagggcgagtccaacaaaacgaacgccgcactctacggcgatgaattttcgatgatgatcgaggcgtggcgcaaagtattccgccggacgctgcccttctatttcgtgcagatagctccgcacgcccgtaccgagggaggtacggcgggcgccgtggtccgcgaacagcaggcccgtgtcgccgcgacggtcccgttgacgggcatggcggtcatctccgatctggtggacgacgtaacgaacatccatccccgctataagcaaggtgtcggcgaccggctggccggtttcgccctcgccgaggtttatggcaagagcggccggaaatacaaaagcccgaccttccggcaagcggaattcaggaaatcgcaggtttacgtttcgttcgacaacgccgaagggggcatcgtctgcaaggacggcgccatccgcggattggaggtgtgcgacgcctccatgaagttcgtcccggcgcagggaatcatcgacgacaaaagtaaccggctcgtcgtatggagcaagcaggtagcccgtccgacagccgtgcgctactgtttcagcgacggcgccatcggcaatctcttcgatacggccggactccccgtagccccgttccgcagcgataccgacgactgacacaattccggaagacgaaaaaaggggttgtctagaacttgttagacagcctctttttccgtgttattcgattggcgtccaatccggtatttcgatggtgtcggcgtcaattatcgagcatcggataatttctatctctcctttttgatagatgttgcaaaccgcgaaaagcgccgcgatgagcatgccccagattaaagcgaggatgcaaaggccatatgtttgatttcctgtttaatttgtaactatcaaaggtcgccccccatgcgcaatagcggcagttgtaattgcgcttgtctcagagtatctcagctttcccatcccctccggagccggtcattgagtattgctcgatgaacgactgttccaactcggctaatggcatatcgctcacgttatactctttgcgcatgaaagcccgcagatggtcgatggatttgtggtaatgccccatgtactgtagctgcggttgatgccgccccgttttttgaggttggcggtaaactttcgaacgcttcgagaagcagccggtatttctcccaaaaccgagataggcgtttttgaccttctcagccgtaacgtacgactcccggtcgcagatatcctgatagtgcctgccgatctgggtgcggatattgtccagatggcggttgatgcggtcggcttcgaggctatgacccttggcgtggccgtcgcggacctcccaaagcgtctccggaacggagagctttgcgcagaattgggcgatgctgccgttgaccgagatgcggcccatgaccggcacgactttccgatctttctccttgttcctttttagggagaacagaaccttgaacgtgctgcgcacaaactctactttttagggttgcaaaaataatttgagcagagtcgcaaatcaagatgaatagcaatgtaagaaactgaaaatcacccttctataaataacaaagcaaaagaaacgaggtaacgatttgaaaatcgaaacctcgtttaatattaccttattctacgttttctctaaaacaaaggcacagaagaaaaatgcataataagttgattatctttcgttttacacttttttatgcctctgttttttatcccggaacttccttcggggcttgcccggttttctatccggcaacggattccgcagggatgacgctatttccggaattcgagacgcacgacgaccggaaaatggtccgacggcgtgcgcgcatcgtaactgtgcagtgaaacctccttggggaaggcgcccgacttgatctcttcgccgctggcggcggtctccgtacggtaggtgtcggtcagcaccccgtaatcgtgcacgtgaaccgacggcgtcacgaagatatggtcaatgcggctgtcggtcttcagcgaagggttgaagctgttgaacgtaccgttcggggcgtagcgtcttccggcggtctcgtacgaatcggccagaatgcccgacgagacaaaggtcgtatagatatgattgttctggtcgacgttgaagtccccggtcaggatcacgaactctttgggtttgcacatttcgcggatcttcgccaccaccagcttggcgctctcctcgcgggcctgcaccccgatatggtccatatgcaggttgaagaaccagaagcggcgcttggtctgcaggtcgagaaaatggccccacgtgcagatgcgcggcagcgcggcgtcccagcccttgttcggacggtcggtgatctccgaaagccagaaatggccatcgtccagcaggcggaaacgctcctttttatagaatatgggcgcatactcgccttgcgtctttccgtcgtcgcgcccgacgccgatatagtcgtagtcgggaagctgcgccagcatgtcgtgcagctggccgtcgagcacctcctgacttccgaaaatgtcgaagccgtggaattcgatcaggcggcacacccacggaccgcggcgctcccaaccgttaccacgctcggcgtcgccccgattggcgttgcggatattataggtggctacggtcagctcctgcgccgcggcgcaaaaggtcacggcggcaaacagggcgagaatcagcaatttcttcatttcaaaggatcgtttaacgggtttcaagtcgaacaaagatacaaaaaacggacgaaataccctccgaacaggcttccgcaagtaaatttttctgccggattagtacactttcggacttgaggatacggggttcgccatatttttactatctttggggtgcaaaaaaccaaactaatggaatcagcccgtaaaacctctgtaaccaaagtaatgcccatccttttcagcttcttcgtgatgggattctgcgacgtggtcggcatctcgaccacctatgtcaaaaacgatttcaacctcagcgaagccctcgccggattcattccgtcgatggtattcctgtggttcctgctgctctcggtccccgtagcgctggcaatgaaccgcgtcggacgcaaacgcaccgtccagatcagcaacgtcatcacgatcgtcggcatgctgattccgttcgtatcgtataatttcgcaacctgcatggtggcctttgcgctgctgggaatcggcaacacgattctgcaggtgtcgctcaatccgctgctgacgaacgtcgtgtcgggcgaatcgcttaccagctcgctcacggcgggacaggtcgtgaaggccgtctcgtcgttcatgggtccgatcatcgccgtcttcgcggtgaacgtcttcggcaactggcagtacctcttcccgatcttcgccgcaatcacgcttctctcgtcgctctggctgatgatgacctcgattcccaaagaggaggtttccctacagtcgggcagttcggtcggcgcaacgttctcgctgctgaaggacagccacatcctgctcttcttcatcggcatcctctgcaccgtaggtctcgacgtgggcatgaacacgctgacgcccaaactgctgatcgaacgctgcggactcgaaatcaccgatgccggactcggatcgagcgtctatttcttctgccgtacggccggcgctttcatcggcgcattcctgctggcgcgtctctcggacgtccgctacctgcgcgtgaacctcgtcgtgatgctcgcggcgctgggcgtgctctatttcgccaacagctacatcgagatactgatttgcgtgggcgtcttcgccttcgccctctcgtgcgtcttctcgatcgtctactcgctggcgctgcgccgccgcccggacaaggccaatgaaatttcgggcctgatgattacgggcgtctgcggaggcgcgatcattcccccgctgatgggcctgctgaccgaaaccgtcggatcgcaggtcggatcgctcatcgtcctgaccgtatgcgccgtatacctgatcttctgcgcctacagcatcaaaacccaagccaacaaataaccaaaataccatgtacagatacgacaaccgtgtggtcatcacactcgacgcaggcggcacgaacttggtgttcggcgccatgcaggccaacaaattcatcgtcgatcccatcacgctgccgtcgaacgccgacaacttggacaaatgtctggcgacgatggtcgaaggttttcaggccgtcatcgacaagctggaggagaaacccgtcgccatcagcttcgcattccccggcccggccgactacccgaacggaatcatcggcggatacctgcccaacttcccctcattccgcgaaggcgtggcgctggggccgttcctcgaatacaaattcggcattccggtcttcatcaacaacgacggcgacctctttgcctacggcgaagcgctgggcggcgcactgcccgaagtgaacgcccggctcgaagcgctgggcagccccaaacgctacaagaatctggtgggctacacgttcggcacgggtctgggcatcggtatcgtggtgaacaacgaactcaaccgcggcgataactcgtgcgtcgagactttttgcctcaagcacaagaagatgcccgacattatcgtcgaagacggcgccgcgatccgcgccgtgaagcgcgtttacggagagttgtcgggcaacccggaccacgggctggaaccgaaggacctctgcgatatcgccgacggaaaacgcgaaggcgacacggaagccgcccgcaaggctttcgccgagatgggcgagatcgccggcgacgccatggcgacggccgtgacgctgatcgacggtctgatcgtcatcggcggcggcatcacgggcgcccgcaaatggatcatgcccagcctgctcaaagagctgcgcagcaagatgcacaccatcgcgggcgacgagctgaaccgcgtgcagatgaaggtttacgatctggacagcgaagaggagttcaaggagttcgccaaaggcgatcagcgcacgctgaaagtctacggcaccgaccgttacgtggcttacgacccccagaagcgcatcggcgtcgctatttcgaaactcggcgcgagcaacgccatttcggtgggcgcatacgcgttcgccctgagccagctcgacgcgcaaaaagcataataaaacaagatgtataagttccaacccattctcaaatcgacgatctggggcggcgaaaaaatcgtcccctacaaacaaatcgcatccggccagacgcaggtcggcgaaagctgggagctttcgggcgtcaaaggcaacgaatcggtcgtagcaggaggtcccgaagccggcactaccctgccgggcctgatcgcccgccacggcgccgcactgctcggcaaagccaacttcgaacgtttcggcgaggagttcccgctgctgatcaagttcatcgacgcacggcaggatctctcgattcaggtacaccccgacgaccggctggcatgggaacgtcacaagtcgaaaggcaagaccgaaatgtggtacgtcgtggacgccgacaagggcgcacggctccggtcgggattcgccaagcaggtgacgcccgcccagtacgaagccagcgtcgaggacaacaccatcaccgacatcctcgccgagtacgaaatacatccgggcgacctcttcttcctgccggcaggccgcgtccacagtatcggcgcgggcgcgttcatcgccgagattcagcagacttcggacatcacctaccgcatctacgacttcaaccgcaaggacgccgacggcaacacccgcgaactgcacaccgaactggcgaagggcgccatcgactataccgtgctgcccgactaccgcaccaagtacgagcaggtgcaggaccgcgaaacggaactggtgtcgtgtccctacttcaccacgtcgctctgcgacctgaccgccccgctgacgctcgactacgcggcgctcgactcgttcgtcgttgtgatctgcgtcgaaggcaagggcatgatcgccgacgacagcggcaacgaaatgccgatccatcagggcgagaccgtactgcttccggctaccgtgaagtcgctccgcatcgtccccgaagggaagctcaaaatgctgaccagctgcatcaaataaatgaaatgcactctgacagataaaatccggcagttccgattgccggattttttcattttccgcggcaaccccgataataaattttatcttcatcagctcattgcatcgtaaaaataatcgcccgtctcggcaaatcgaggaaaaaattttcttttaacaaaattccgttgcaggactccgttctttttagtacctttggaggtgcaaccggaacactaaaaaacagagaatcttacgacatggagaagaaactgcaagagatcgcatcgcacttcgctttggagggaggcatcgcggccatagactcgctgggcgagggttttatcaacgatacgttcatcatccgcaccgaaggggaggcccccgattacattcttcagcgcaagaacaaaaacatatttcccgacgttccggccatgatggacaacatccgccgggttaccgaccacatccgccgcggagtcatcgcggcaggcggcgatccccggcgcgaggtgatgaccgtggtcccgaccagagaggacgcgctgtaccacatcgacggcgacggcgaatattgggccgtctcggttttcatcgacgacaccgtcgcctacaacaaggccgattcgcccgaactggcccgcaagggcggcgaaggaatcggcaaattccaagcccagctggccgacttcaccgagccgctggccgaaacgatcaagggattccacaacatccgccaccgcttcgtgcagtgggacgaggcgctgaagcgcgacaccgcaggccgcaaaaaggagctttcggaggagatcggctggatcgaatcgcggcgcggagagatgctcggcttctggtccaaggtcgaggagggcacgattccgacgcgcgtgacgcacaacgacaccaagataaacaatatcctgttcgacaggcagggcgaggtgctctgcgccatcgacctcgacacggtgatggcctccacgtcgctcaacgacttcggcgacgccatccgctcctacgccaacacgggcgacgaggacgaccgcgacctttcgcgcgtcgggctgtcactcgaaatgttccgggcctacaccgagggctacctctcgcagcgggcgaagcagctcaccgactccgaaatcgaccatctggctttctcggcccgatacatcaccttcgaacaggtcctgcgtttcctgatggactacatcgacggcgacacctattacaaagtcaaataccccggtcacaacctcgtgcgcacccacgcccagtaccgcctgctgcaaagcatggaggaacattacggcgaaatgtgccgcatcgtacgggaaaccgtggacaaataccgcaaggcatgacggagatacgcaaaatcacgggcatcgtccccacgaacaaggccgccgtcgaagcggctttcgccggcatcgagccgcaggccgtagcctgctgcaactggccggaacaatttccttacacaccggaggtttcgttccgcatgttccacacgggcgactacctgatgctgcgcttcgacgtcgcggaacgttgcacgatggcccgcgtcacggaggacaacggcgaagtttggaccgattcgtgcgtggagttcttcatcgcccccgacgacagcggctactactacaacttcgagtgcagttgcatcggacgcctgctgctgggcttccgcaaggagcgcgagcacccggcgcacgccgcgcccaaggtgatggccggcatcctgcggactccgagcctcggactgcggccgttccccgaacacgaaggagacaaccgctggtcggtcgtgctggccattcccccgcaggcgctgttcatgcacgagctgagcgactggagcggcctgaaggcatcggtgaacctctacaaatgcggcgacaaactttcgcagccccattttctttcgtggaagccgatcgagacgccgaaacccgacttccaccggcccgattttttcgaacaaattaaattttcagagatatgaacaacaaatattcacttccgaaagacggcggcctgatcgcagaatcgacgccgcgcgacatcatccatcgttacgagaaaattcacacgacggtctatgaaaacgaatatctgggcgttcagtacgttgccgacaccatcgtcaaggcgatccgcacctacaacgaactccactgttcgaacgaagtctacgaagagcagcagcccttcgtgctgggccttaccacgggccgcacgccgctggggctctaccgcgagctggtgaaacgccacaaggagggcctcgtcagcttccgcaacgtggccgtattcagcctcgacgagttctaccccatccgctcgaccgagcagcagagccgcaacttccgcatccacgaggatttcctcaaccacatcgacatcctgcccgaaaacatccacatccccgacggcaccatctccgaggacaaggtttcggagtactgcgcctcgtacgaccattcggtgcgcaagatcgacctgatgattatcggcgtgggcgaagacggccagatcggtttcaacgagccggggtcctatgccaagtcgcgcacccggctggtgcagctgacccacaacacccgcaaaatccaatcgggcgcattcttcggactggactacaccccgaagctggccatcacgatgggtatcgacacgatcatgcgggccgacaagatcatcctgatggcttggggcgaagagaaggcccagatcatccagaaggtcgtcgaaggcgagatcacaacccaagtgccggcatcgaacctgcaggcccaccccaacatcgaagtcgtaatcgacgagaacgccgcccagctgctcacccgcgagcagacgccgtggctggtaggcccctgcaaatggacgcccaaattcacccgcaaggccgtggtgtggctctgcggcgtggtgcagaaaccgatcctgaagctcacctacaaggattacatcgaaaattcgctgggcgaactgctcgaacagggccgcgcctacgaccagatcaacatcgacgtattcaacgacctccagcacaccatcaccggctggccgggcggcaaacccaatgccgacgattcgacgcgccccgtgccgtcgaatccgtatcccaaacgcatcgtgattttctcgccccaccccgacgacgacgtgatttcgatgggcggcacgttcatccgtctggtgcagcagggacacgacgtgcacgtggcatatgaaacttcgggcaacgtcgccgtacacgacgacgtagtgctccagaacatcgacacggcccgcgaactgggctacggcaaccactacgccgaagtcgagaagatcatcgccggcaagaagaagggcgaacccgaaccccgtccgctgctcgacctcaagggcgccatccgccgtgcggaggcccgcgccgccgtgcgctcgttcgggctgaaccccgacaccaacgcccatttcctcaacctgccgttctacgagacgggcggcatcaagaagggactgctcacggagaaggacatcgaaatcatcgtcaaactgctccgcgaggtgaagccccaccagatttacgccgccggcgacctcgccgacccccacggcacgcaccgtacggccatggaggccgtgctcggcgcgctcgacgtggtgaaggacgacgaatggctcaaggagtgccacctctggctctaccgcggcgcatggatggaatgggatctcggcatggtcgacatggcggtgcccttgtcgcccgacgagctgatcatgaagcgtcacgccatctaccgccacctctcgcagaaggacatcatgcccttccccggcagcgacccccgcgagttctggcagcgcgccgaagagcgcacgcagaacaccgccaagctttacgacaagctcggcatggcggagtatcaggcgatcgaggtattcgtgaagatgttctgacgagaccccgcaaatgaaaaacaatcaataacccaataattcaaccattcaatctatgcgactgattatcgaagacacgcaggaaaacgcaggccgctgggcagcgcgctacatcgtagagcaaatcaacaagaaacaggcggccggaggcaccttcgtactgggactgcctacgggttcgaccccgctgacgacatacaaagagctgatcgcgctgaacaaggccggcaaggtctccttcaaggatgtcgttacgttcaacatggacgagtacgtcgggcttcccgaagagcaccccgaaagctaccattcgttcatgtggaacaccttcttcaaccacgtggacatcaacccggccaacgtcaatatcctcaacggcaacgcccccgacctgcagaaggagtgcgaccaatacgaggagaaaatccgcaaggcgggcggcatcgacctcttcatgggcggtgtcggcgaagacggacacttggcgttcaacgagcctttctcgtcgctcaactcgcgtacgcgcgtcaagacgctgacttacgacacgctcgtcgtgaattcgcgcttcttcgacaacgacgtgaacaaggttcccaagcaggccatgtcggtaggcgtcgccacggtgctcgattcgaagcaggtgctgatcctcgcgctcggccacaagaaagcccgcgccctgcagcagtgcgtcgaaggtccctactcgcatgtctgcacgatttcggccatgcaggtacacccgcacggaatcgtcgtatgcgacgaacccgcgaccgtcgaactgaaagtcggcacgtaccgctatttcaaagacatcgagaaagagaacctgatctgataatgccggagcggcccttcggacggtcgtacgaccgtccgaaaccgtatccgcacatttcggaggcccggatttccggctggatttcgccccgacatccggacgctcccatacaaataaaattccccgtacggcaaggcagtccgtacggggaattcgtttgagctgtactaatctccaaacagcgcggctcaacttatttcgtctgtttcaccaaagcgatctcgtcgatgcagaaataggttgggtcagccaaataattacagattaccttgaaaacaagtttatctatcgcaccaaacgaggacagatcaactttacgccatccgcttaattttgattttcccgcaacaagcgtttccgtaatacatcctttttccactccatcaagcgatcccgtgatgcggacctgaaaactgtcggagtcgttccctgtgaagtagttataaatccaagttgagttagctatataaagatgatcgacaatccgcggctccgtcatatcaatagtcggataacccgatttactcaggtattcgggatacatctccgtcggagagttggaatcataacacacggcaaaagtatcggttccgttagccccgccgtccgcccagacagagaactgttgtttactggttgcggtcgccgcgttcatatcgtacatctgcgagagtccgataccaccccagccgtcatatgccgaagcgtaataggaataaaaagccatattccggttggctgaggtaaagagcttgccatcaaaatcggcagtcgtggcgtaagcttttgcacaatacaccttcggataggtataatcccccaagcccatcagcgacattttgacttcaccaagttttacctcttgaccggtcacagcatcgagcatcccctccgcgggttcgaaagagatcacatcgtactcgacgggcggcgtcttggggccgtcatcgtccgagcaggcggcaaaagcagccgaaagcagcaacaggtaaaaaaatctgttcaatcgtttcataattttattttttcaagattatatcatctacacagaaatagaaaggagcatatttctcactgctcaccacggcgaagaccagacaatcgaccttgcccagcgaagagagatcgaacgttttccacgtatcggccttgtccgcaccactgataagcgggcattccaccgacccgacctccacatcattcagttttccggtaatctttatcgcatagctgtcgccctcgtgcccggaaaaatagttatacgtccatgtcgaattggccaatgcgatcgaaagcacttcgcggggagcggctgtaaagtcgatctgcggccagcagcaatcggcgctcatggccatacctgctgtcttggcatcgtaacatacggcgaaagttttcgatccgtcagcccctccgtcggcataagcttcgaactgattatcaggaccggcttgggggggggccacactcttgttcacattcgacgaaaggacaaatccaccccacgcatcatactgacttccatagatcgtgcagtcgcaatagtacgacgagaaccagatatttccgtcggcagtcgagaaaagcggcgatgcgaaaaagagttggtcgtaatcgtcacgcagatcgttggtctccgtatattcctttgcccagtaaacattcgggaaggtagccgtattcttaccgctcacgacagaaatcgtgccgagaattacggcttcaccgtcgattccgaccatattttcacccgcctcgaatgaaatcaactcattcacgcgaatcacgcatttcgccgtaaattcgccgcattcggccgttacggtcgcctcgccggccgacagagtctcgaccagtcccgaatcggaaaccgtcgccacagcttcgttatccgaagtccacgttacgggatcgaccgcatccgacggagtcaccgccgcaacaagttgtatggtttttccgggaacagtctccgcatcggcccggtccaatgcaataccggttgccgcaacgggcgcttcgggcttatcgtccgagcaggccgcgaacgcaagcgccgcaaaagcgatcagtaaaagttttttcatctttcgtttgtttaagttatctgtataaaataaaaaatccggttccgaactcccggaatcgaatccccgttttacacagcccggcgcatacctattatatatgccgccttcacaacaaacgtccgacacccagtgccaccgtccgaagcgctccgttctccgcagagcctgtccgaaaatcgagaattctcccaccgggagacgcaaggcaggtcttctggctcgttcctgccgctacgccttcccggccggagccagtggctaaagagtgtgcggcaattgacggaacttacagcagcgggaactgctgccgatttacacggcattcccatttaatcacacggggccttgcccggccctttgtgaaccattgcggtgcaaagttaggaaataaattcgtatctttgccgtcgctaacaaaaaatttaagcaaagattatgaaacacgcatacgtatttccgggtcagggtgcccaagcagtcggtatgggcaaagacctttacgacaacgtacccgaagcgaaggagctgttcgagaaagccaacgagattctcggtttccgcatcacggacatcatgttcgcaggtacggacgaggagctgaagcagacgaaggtaacgcagcctgccgtattcctccactcggtaatcatggccaaagcgctcggcgtgaaacccgatgcggccgcaggacactcgctgggcgaattctcggcgctggtcgtcgccggagcgctttcgttcgaagacggcctgaaactcgtatcgaaacgtgctctggccatgcaggccgcctgcgaggcacagcccggcacgatggccgccatcctcggtctggacgacaagaccgtcgaggatatctgcgcgtcgatcgacggcgtggtcgtggccgccaactacaactgccccggacagctcgtcatctcaggcgccgtagaggctgttgaagccgcctgcgagaaagccaaagccgcaggcgcccgccgcgcactgcgtctgcccgtgggcggagcgttccactcgccgctgatggagcctgccaagcaggagctggagaaggcgatcaacgaagcgccgttccaagcacccgtctgccccgtataccagaacgtggacgcaaaaccctataccgatcccgctcagatcaaggcgaacctgatcgcacagctgacggctccggtacgctggacctacatcgtgaagaacatgctcgccgacggcgtgacggagttcaccgaactcggccccggcactgtacttcaggggcttatcaagaaagtaaaccccgaagcaacggtcgaatcgaaatcgacgctataaaataaaaaggcgcaacggtaaaaggaacgatctgattgtcagaccgttccttttcgtttaaaaacttttgaaacaaaatttattaaattttattaaaaacatgttgcgttttttaaatatacttattatatttgcaaaggtttagttaaaaatgggatagcacggatgacatcactcaccgaatttttcaacaaacacgaagacgataccctgaagggtatttcacacaagaacagtatcatcaagcgcaacatcatcgcccacatggcggtgaacggcgaatgcacgctttcggagctgaccaaagagctgcatatcagcgtgccgacaatcacgaaactcgtgcaggaactggtcgatgagaacatcgtcacggatctgggtaaggtagagacccccggcggacgccgtcccaacatcttcggtctcgccaactcggctatctatttcgcgggcgtgaacgtcggacgcgacaacatgacgttcctgatcaccgacctgcagaacaacatcatcaaggaggagtacgactacacgttcgaactgctcgaccggccgcagtgcatcgaacgcatctgcaccaacatcgaaaacttcatcgccacctgcggcatcgaccgcggcaagattctgggactcggcgtctgcatgacgggccgcgtgaatcccgacacgggccgcagctacaaatacttcaccaccagcgaacagtcgctgcgcgacctgctcgaagagcgcgtgggcatccgcgtcctgctcgaaaacgacacccgcgcccgctgctacgcggaatatacctgcggcaagtcgaaggacgagagcaacgtgctctacctccacatgggccgcggcgtagccatcggcatcgtcgtggacggacagctgtactacggcaaaagcggcttcgcaggcgagttcggccatatcccgttcttcgacaacgaaatcatctgctcgtgcggcaaaaaaggctgtctcgaaaccgaggtttcgggcatcgccatcgaggacaagatgagccacctgatcgaaaggggcgtgaacacgatcctcaaggagaagtacgacaagcagaagagcatccatatcgacgatatcatcgccgcggcgaagaacgacgacaacctttcgatcgaactgatcgaggaggcgggcgaaaaggtcggcaaggccgtcgccttcctcatcaacacgttcaatcccgaaacggtcatcgtcggcggcaacatggccgcggccggcgactatatcatgctgcccctcaaatcggcgaccaacaaatactcgctcaacctcgtctacaaggataccaaattccgcgtatcgaagatgaccgagaatgccaacgcttggggcgtggcgatgcttatccgcaacaagatcatcggcatctgatgaacctcgaaggccggacaacgcggctgagagccttggaaccgggcgacatcgacctgatgtacgcttgggagaacgacacggcggtatggagcgtcagcggcacgctggcccccttttcgcgccacacgctcgaacggttcattcaggaacagcagttcgacatctttcagacccgccagcagcggctcgtcatcgaaaccctcggcggcatacccgtcggggcgctcgactttttcgagctggacccgatcaaccgccgggcaggcatcggaatcctgatccacgacgacgcactgcgcggcaaaggctatgcgtcggacgccgtggagacggcatgccgttacgcccgcgaagtgctgaacctgcaccagctctggtgcaacgtcggttccgacaacgcccccagccggagactcttcgccaaagcgggattcgcagaaatcggcgtcaaacgcgactggctatggcggccggacggctacggcgatgaaattctgctgcaaaaaatcctcgaataaacgatcgcaatacaatccgtcccataaacgctccacccatgacaaacacctgcatccggatttcagcgctcctgctggcaatatcgggcctgctgacgccgcacgcggccgcattcggcgcaggcaaagcacccaaaacccatgaactcaccttctcaggcaaggctactcccgaacaatactatgttccggtctacacctcgttcaccgtacccgaaggcatcgtaaagatcagcgtaacccagcatctcggttcgggcgaagcgcgtccgggcaatctggacctcggcatcttcgacgagcggggagccggattcgaaggtccgggattccgcggctggtcgggaggcgcacgccgcagtttcgaaatcggcgaaacggaggccacgcccggctatctcgccggacggatcaatccgggccggtggaccgtcatccagatgcccacgacggcagggcgcaccaccgactggacgctgaaaatcactcttacggaaggtccgcgggcaaaaaaactccccgcaccgtcgtacgcagctccgcaattgaacgacaaacccggctggtaccgcatcgcaccccacgtacatacggtccactcggacggacggctgacgccggccgaagtcatcgcgctcggcaaggcttcgggactcgacggcatcgtttcgaccgaccacaacaccacctcggccctcctgcactggggcgaagttcaggacccggaattcctcgtgatcaacggcgtggaagtcacctacgggcagggacactggaacatcttcggtctcgacccgcacgcatggatcgacttccggattcaccacaacgacacgctccgctaccgcaaggccgtggccaaagccagaaaggccggacggctgctggtcgccaaccacccctacaacctcgacttcctgtacgacgtaaccccgatggacggcatcgaggtctggaacagtgcatggagtcccgccaacgaacgggccgtagaattatggcataccctgctcgtgggcggcaaccgcaaattcgccgtcgcttcgaccgacttccaccgcggcggcaacatcgcctcgccccacacggtcgtccgcgccgaagcgctttccgccgaggcggtcatcgccgcgatcgccgcaggccgcagctacgtggcgcgggacgcctcggtcgagatcggcatgcaggtccgcaattcggcgacgcccgtacagcatgccgacatcggcgacaccctgctccgcagcggcgggatgcaggccgagttccggagcaacaccgccggccggctgcggatgacggaccagcagggatggttctccgacacttcgatcgcgccgggcaccgtcgtcgtctccattccagagcgttcgctctgggtccgggccgaactccgcgccgaggacggcagcatgatcgccctgaccaaccccatttatatccagcatccgctgaccacgcagtccctgctgcccgaataaaacgatcgtaccgacataaaaaggccccatcttcggatggggcctttgcttgataggtttcgagggaattactccaaccggcgcgagccatcggaaatcacaacctcatagactttgggttcatggccgtacttggcgttgaacttctctttggccgtagcgatgaagttgtcgtaaagcccgtctttcacaagattgatcgtgcagccgccgaagccgccgcccatgatacgcgaacccgtgacgccgcacgcctcggcgacctccgccaagaaatccagctcctcgcacgatacctcgtagtccttcgacatgccccagtgggtttcgtacatgcgtttgccgacggtttcgtaatcgcccttttcgagcgcttcgcaaacgtcgagcacgcgcttctcctcgccgatcacatagcgggcgcgcttgtaatcctcctcggaaatcttatccttaatggcgtcgagctgctccatcgtagctccgcgcaggaactcctgtccgagcatcttggcgacgcgctcgcacgacgcgcggcggtcgttgtagggcgaccccaccagctcgtgcttcacgcgcgaatcaagcaggacgagtttgtagcctttcggatcgaacgggaaataagcatattccagcgagcggcagtccagacggatcaggttgcccttcttgccgaacaccgaagcgaattggtccatgatgccgcagttcacgccgcagtagttgtgttcggtggactggccgatcttcgccagctcaaatttgtcgatcccgcagctgtagagatcgttcagcgcaaaagcgtaagtcgattcgagcgccgccgacgaagacatgccggcgcccagcggaacgtcgcccgcgaataccgtgtcgaagccgccgatcttgccaccgcgcttctgaatctcgcggcagacgccgaagatgtagcaggcccagctctgggcgggtttgtccgcctcgttcagtccgaactccgcactttcgccgaggtccagcgcataggcgcgcaccttgtccgtgccgttgagcttgatggccgcgacgatacccttatcgacggcgccggggaaaacgaagcccccgttgtaatccgtgtgctcgccgatcaggttgatacgacccggcgaagcgaagaggatagctccggagccgtaaagctctccgaacttcttactgactttttctttcattggttattgaagttttttaagttaataaatcgtctctgcatcatacgaagatagaaaaaaatcctgaatttccagcattttccggccgaaaaatccatctattcgtcattttcagtttcgtttcaaaatgccccgaaagagaccaaagcggccgatcattacgaaaaattacgctttacagggctttcagcttgttattccggaaatgttttctaactttgtgaaagtttcgttttataagcactcaaccaacatttcaaacgatatgacgaaaaaactcatcctcgcagccgccatgctcctcacgggaagcgccgcggtcgccgctcagcccaaagtaatttcgcaccgcggctattggaccgcccccaattcggcccagaactcactggcttcgttcacgaaggccgattcggtcggcgttttcggctcggaaatcgacgtatggctcacggccgacgacaagctgatcgtcaaccacgaccgcgtctacaagggcaccgacatcaacatggagaaatcgacgctcaaggagatcacctcgatcgtgctccccaacggcgaaaacattccgacgctcgacgcctacctgcgtttggtagccgccaagcccgatacgcgcctgatcctcgaaatgaagtcgctttcggacctcaagcgcgaggatctcgcagccgaaaagatcgtcaaggccctgcgcaaatacgacctgctcgaccgcacggacatcatcgccttctcgatcaacgcctgccttgcgttcaagaaactgatgcccgacggccgcatcttctacctcaacggcgatctggctccccgcagcatcaaaaaactcggcctgaccggtatcgactactcgatgagcgtgctccgcaaaaaccccaagtgggtggagcaggcccacaaagagggcctcgaagtcaacgtctggaccgtggacacggaggaggacatgcgctacttcatcgacctcggcgtggactacatcaccaccgactatcccgaacgcctgcaggcgctgctgaaataacaattacaatatataataaaagcggccgtgaaatcacggccgcttttattatacagctctccggtcggacggaagcgcacccgccaaaaccgcgtcacgcatcgaccacgatcacctcgattccgcgctcgcggagccgttcgaggtaaaggggctgaatgccgctgtcggtgatgatgcggtctacagcctccagatcgcagatcttgctgaagccgcgacggccgaacttcgaactgtcggccagcacgatcactttctgggcggcgttcatcatcgccccgttgagcgtcgcttcgagcatgttggtcgtcgtaaggccgaattccagatcgatgccgtccacgcccacgaacagcttgctgcaattgaagtggcggagcatctgctcggcgaaaggccctacgaccgacaccgaactgctgcgggtgatgccgccgagctgaatcacgtcgatgttggcgtcctgcgaaaggatcgaagtgacgggcaccgccgccgtaatgacggtcagatggcctacgggctttatttcgcgcgccagaaacgccatggtggttcccgacgcgatgatgatcgaatcgtcctgcgcgatcaggctggcggccttggcgccgatggcccgcttctccgcgacgttctttttttccttctcattgacatgacggtcgctgatatagggactgatcagaatcgcactgccgtgagttcggtacaattttttctgttgttcgagataggagaggtctttgcggatggtgacctccgagaccttgaacagttcggccagttgggccacggagatggagccgttctgctgaagcagcgcaagaatccggttatgacgttccggaaggctcaaaatagtctcttcgccggatttgttcatgtgagtaaagtttaatcgtttcgtaatgcaagataagaaaaataattcgaaatccgccgaaacgggcagaagaaataaccattcttgcgcaaaggaagcatatcgaaacggaatattatgaaataaaacatattttattttgaaatacaaaaaatcatatgtaattttgttgcgaaacgaaattcactaactatggaaagacttgcacaaatcaaaaaactatccgaaaaagacaaagtttgggatatcgtcgtggtcggcggaggcgcaacgggtctcggcgtcgccgtcgatgccgcgacgcgcggcatgagcgtggcgctgctcgaaaaaaccgactttgcgaaatgcacttcgagccgcagtaccaagctcgtacacggcggcgtccgctacctgcagaagggcgacgtcatgctggtgctcgaagcgctgcgcgaacgcggccgcatgaaggcgaacgccccccatctggtgaaagaccaagccttcgtgatctcgaactacaggtattgggataattttctttatttctgcggtctgaccttctacgacatgctttcgttcggtttcggctacggacgttcgaaatacatttcggcgaaaaaggtaatgaaatacatcccgacttcggtcgagaagggactgaaaggcggcgtggtgtaccacgacggacagttcgacgactcgcgtatggccgtgaacctcgcgcagacctgcgtcgaaaacggcggcacggtcgtcaatcaggctaccgtcacgggcatcgtgcatgacgcggcgggccgcgccgcaggcgtgaagttcgtggacaacctcaccggcgaggagcacacgctcaaagcgcgcagcgtcgtaaacgccgccggctgcttcgtggacgacatcatgcacatggacagcccgacacaccgcagaatggtgacgccgagtcagggcgtgcatatcgtgctcgacatgaagttcctgcagagcgactacgcaatcatggttcccaagacctcggacggccgcgtgctgttcgccgtgccttggcacgacaaagtcgtcgtcggcaccacggacatcgtgcgtcccaaggcagaggaagacccgcgcccgctcaaggaggagatcgacttcatcctcggcacggcgggactctacatgaacccggctccgacctacaaggatattctttcggtcttcgcgggccagcgtccgctggcggcgcccaagaaggagggcaagaacacgaaggagatttcgcgcagccacaagatcatcgtatcggacaacggtctggttacgatcacgggcggcaaatggacctcgtaccgtctgatggccgaggacacggtggacaaggcgatcgaagtcgcgaaacttccggcccgcaagtgcgtcaccaagaaactgcacatccacggttaccgcaagaatcccgatctgacggaccacatgtacgtatacggcagcgacgagccgaagattctggagcttatcaagcagcagcccgaattgggcgaaaaactctcgccgaagtacggctacacctacgccgaagtactctgggccgtgcgcgaagagatggccatgacggtcgaagacgtgctttcgcgccgcgtacgcctgctcttcgtcgacgcccgcgaagcgatggccgcggccccgaaagtggcgcagctcatggccaaggaactcggacgcgatcaggcatggatcgacgggcaggtaaaagatttcacggaattggcgaaaacttatatctttgcaggagaagccgaggcttagaccgaacgaagttccgaacgaacgaaacaacttttatagggaacaaatccgaagaatcccgaatttctcctctctgcgaggagggattcgggaggatttggaaaatgaccgggcgtagccgaacgccccgacgcgggtccgacgcagggacgcacgtcgccatgaatgaaccaataccaacttcaactcaatcgggttcctgcgtcgagccccacgtcaattatgtggaaaattcttcaaccccctgcctataaaccggaaatggaggccgacaaggtcgatgcgaaatacaaacgcatgcgtctgcaggtgtttctcggcatcttcatcgggtacgccggattctatatcgtccggaaaaatttctcgatggcgatcccggagcttgccctgctcggcttcgaccagagcgaactgagcatcgtgctggcgatgaacgccgtggcctacgccctgtccaaattcctgatgggaagtgtctccgaccgcagcaacgcgcgcgtatttctgccgctgggactggtgctggccgccctgtcgatgatgttcatgatcgttccggttacactgctcggcccggaacacaagcggctggccattttcatcatggcggtcctgaacttcctcgtgggctggttcaacggaatgggctggcctccgtgcggccgcgtcatgacccactggttctcgatcaaagagcgcggcacgaagatgtcgatctggaactgcgcccacaacgtgggcggggctttggtcggcccgatggccgtctacggcgccatctggttcggctcatggttctgcggcagccacacggaactctatttcctgataggaacctatcttttcccggcggtcgtcgcgatcttcatcgccatcctcgcttacgtgctcatccgcgacacgccgcagtcgtgcagccttccctcggtggagaaatggcgcaacgactacccgaaaaattacagcgccaagcaggaggaagtgctcacgacccgcgaaatcttcttcaaatacgtcctgaacaacaaactgctgtggttcatcgccatcgccaacgctttcgtctacatggtacgctacggatgtctcgactgggccccgacctacctccgcgatgcgcagggttacgacatcaagcaggccggctgggcctacttcgcctacgagttcgccgccattcccggcacgctgatctgcggctggctgagcgacaaggtattccacggacggcgcgccgttcccacgatcctcttcatggcgatcgtcgcggtattcatcttcctctactggcagttctcgtcgaactatttcatcgttaccatgtcgctgatcgccatcggatttttcatctacggtccggtaatgctcatcggcgtgcaggcgctcgacctcgctccgaaaaacgcggcgggaacggccgccggactgaccggattcttcggttacttcctcggcacggccattctggccaatatcgtgatcggctccgtggccgaagccgcaggctgggactggacgtttatcctgctcatcgcggcctgcttcctctcgatcgtattcatggcgttcacctacaagggggaaaaggagatactcggacagaaataggactgccgagactcaacggattgcgaaagcccttaactcacggttaagggctttttcattgcccccgaccatgcggtccacgagcgcatggaaacgcggcgaatggttgtggtggacggtatggcagagttcgtggacgatcacgtaatcgcgcaggtgttcgggcagggtcatcagaaaaaggctcagcgaaatggtattacgccccgaacaactcccccacttggtacgcgaagcccgaatcgtgagcttggcgtatttcagccccgtcagctgcgacagccgctcgatacgcgccggaagatcggctttggcggcccggcgcagctcttcgatgagggctttggcctcggcgggcggaagcgggggttccgcaggcatccgggccgccatacgcacgcgggcctgctcgacccagtcggccttcaggtcgaggaactgcatggccctgcggaccgaaacgccgtacggaaaagagacccgcacggcccccgtaccgcgcacgctgatcgagatgcggcgtgcgcgccgcgtccgggaaagagtcacctcgcccagccggggatgcgtcacggtcgaaatcatcgcatcagcactgcgttgatcgacatgccctgtatcacaacggccgaatccgtacgttccaacctgatattctcgaacagaatccggcaacggtcatcgcggtagtccagcagccgcagcagctgatcggacgtcggctcgcacccttcggagggttcgaatccgctctctttcagctggcgttcgagcagttcccggcagggaatccggtgcacggcacgctcctcgcccagaaacagccgaagcgtatcgccaccgaaatgatagctgctgtcactccagccccgaagattcatatagtaatgcggatattcggcatttacctcgaaccgggcattgacgggcgcttccagctcgatgatattattgacgcaatatgaattgcagtaatcgtaaccccacctcacgtagctgcgcatccgctccgggaatatcgcggcaaactcgtcaagttcggtcccgaaccgggcaaagaccgcagtatcgcgcctctcgacgaacttcagcgattcataaagtccgtgatacgcctcccgatatacgctgtcagccggcggcacgggggtcaggatcaaacgcccgtcgtcgccgagccgtccgagggattcggcgatgcggacggcgcggccgacctgcgagcgcacggccagccgttcgggttcgagcgacggcacgtaagcgaacgccgcgaagaccgcgaaagccgtcaggcagacatacatatagcgtcccgcgcgccggaagaggaacagcaccacgcaaagagtcatcagaccgccgcagacaagcaggtagatacgcggcgaggtaagcccgtattcgctcgtacggcgaatcgcaccgacccagaacagaagctgcgtcggcagcgagatcaggctgaaccggtcgaaaaaccagtcgtaaagccgcttccgcatcaggaactgcagcgccttcacggccagtgcgaaaagcgtgaatccgaacacgagataggcgacgcccccttcgggcagcgaccacgtaacgaggattttggccatgtagaggtagagaatggccgtatagatcagcagcgccggagcgacgatgtagttgagcaggatttcgagaatgcggttgctctcgtacccggcttcccgccagcggtccgccatcatcaggaagagtaccggcacggcgaaggtctcgaaaacgatcagcgcataggtccacacatggtcgatccacgccccctccagcccgaagatataggtcgtggagaagagaatcgccccgaacagtccgagggcggcattggcgaagaacaccgccagcacgcccgaccgcagccacaaaagcgcgtcgcagacgaaacgttcgttgtgcacggcgcggcggcacatcagcagcgccagcgggaccagtatgccgaaggtcaggaaagccggctccgagactatccacgcttcgagtcctccccagagcgacagcgggacgatcggcgtccagcttacccagtagacgcgccgccacgggccgcggcccgcaaggttattgacgaccagcgcgacggcgaaaaacaacgccgcgagggccagtttcggaagggagtggtcccaatccaactcataggtgagcaggcatccggcgcaggcgtatacagtaagcgcactctcgacgggatgcaggcgcagcatctgcagaaacccctcgcggagccagcgcaggtaacgttccagtttcgctttcatggtcttcggtcaattatacggttcgatgaattattcggcgattcgctggcgcaccgcttcgaacagcatcacggcggccgccgccgagacgttcagcgactcgatatgtccgatcagcggaatcgccagctgctcgtcgcagagtttcagcacctctttcgagatgcccgtatcctcggcgcccatcaccaaagccgtcggcttgcggaaatcggcgtcgtaaagcagtttgcggctcttctcggtcgcagcgacgatctggaatccctcggtttgcagcagtttgaccgtattgcggatcgaacccacgcggcaaaccggaatcgccgtcagcgcccccgccgacgagcggatcgcctcggcgttcaccggcgccgaattcttcagcggcgtaatcagcccgtgcgccccggcgcactcggccgagcgggcgatggctccgaagttgcggacgtcggtcaccccgtcgaaaatcaccaccagcggcgtttcgtcttcgggcacgcgctccagaatatcggccagcccgacatattcgatggccgagatctgcgccacgacaccctgatggttgccgcgcgtcaggcggttgagtttctcgaccggcacctcctgcacacgcaccttatgccggaagcagaggtctctcagctccgacatcaactgcccctcggcgcccttgcggatgtagagcttttcgatctgttttccggcctcgatcgcttcggccacgggacgtatcccgaaaatgatattgtccatatccgtatgatttactgtttttcaatcgcttatcccgaataccggaaacgcggccgaacaggctatccctgctcttcgactatttcaagttcgtacgacgccttctcccactcgtgcatctggtggtcgtagcgggctttcaggtcgttgtaagccttgtagtcggcttcgttgtattcggtcgcggcggcgaatttcgcatcgtacgccgcgatctgcttctcgatttcggccagctccgcttcgaccgtctcgaccgcccggcgcagtttgcggagctgcttctcctgctccttgtgctgctcgtaggtcagtttccccgacgccgcggtgtccctgttcgcagcgggctgcgcggcggatttcgccgtgagattcgccgccggttttgccggagcgtcgcggcgttcgatctcctgcagggattccagcttgcgcttttcaaggaagtaatagatgccgccgagatactccttcaccccgccgtcgcggaactcgtagaccttctgcaccatgccgtccagaaattcacggtcgtgcgaaacgaccacgaccgtgccgtcgtacttcatgatggcgttcttcaggatgtccttcgaacgcatgtccatatggttcgtcggctcgtcgagaatcagcaggttgcgcggttcgagcatcatgcgggccatcgccagacgcgcccgctcgccgcccgacaggaccttgaccttcttgtcgatgtcttcgccgcggaacaggaacgctcccagaatatcgcgcaggcgggtgcggatatcccccaccgccacccggtcgagcgtatcgtacaccgtgaattcgccgtccatcaggtcgtcctgattctgcgcatagtaaccgatattgacgttggcgccgagccgcaccgaaccctcggtcggcgtcagctggccgatcagcatgcgcgccagcgtggtcttgccctcgccgttgcgccctaccagcgcgatcttgtcgcccttttcgatgatgaaattcgcaccgctgaagacatgcttcgtcccgaacgacataccagcctcgttgatctcggctacgatctgtcccgaacggggcgcaggcgggaatttgatgttgagcgtcgaaagatcctcctcctcgatttcgagccgctccagccgctccagctgcttgatgcgcgactgcacctgattcgacttggtgggtttatagcggaacttctcgatgaactcttcggtcttttcgatcatccgctgctgattctcgtaagcggccatctgctgcgcccggcgctcggcgcgcagcacgacgtatttcgaataggagaccttgtagtcggtaaccttgcccagcgacagctcgaccgtgcggttggtcacgttatccagaaaagcgcggtcgtgcgagatgagcagcaccgccccgttgtagtttttcaggtactcctccagccattggatcgactcgatgtcgaggtggttggtcggctcgtccagcagaaagatcgaaggacggcgcagcagcagtttcgccagctcgatacgcatgcgccagccgcccgaaaactcgctcgtggcgcggccgaaatccgtgcgcttgaatccgaggcccagcagcgtcttttcgatgtcggcttcgcgggtgtcgcctccgaggatatggtagtggtcctgcgcgtcgttcagacgatgcagaagctgttcgtatccggcgctttcgtaatcggtgcgttcggcgatctcgcgcgtcagggaggcgatttccgcctccagccgcagcacctcatcgaaggctttggccgtctcttcggccagcgtcgtggtgtcggccacgcgcatcgtctgcggcagatagccgatcgtacattcgccgttcagggtcacatgacccgacgtgggctgctgttcgcccgtgatgatgcgcagcagcgtggtttttcccgcaccgttgcggcccaccagaccgatgcggtccttcgggttgatcagaaatgagatattgtcgaagagggtccagcccccgtagcttacagtaaggttgtctaacgaaatcatggtgtctgtaaaatcaccgcaaagttaatgatttaatccgacatatcgctatctttgcaagtcctaagataggatactccccggagaagcccgaaaatgaattgaccctgtctcccggttttcgctatctttgaaatccgaaacgaagtcctgccatggaaaaattgatccgatacctgcagtttatccgcgaagccgaacggctgaaaaacgtcctgcgcaccgcctacacctcggaaggacggcacgaaagcacggccgaacactcgtggcggctggcgctgctggccgccgtgctgaccggcgagcggcccgaactggacatgcaacgggtggtgctgatgtgtctgattcacgatctgggcgaagccttcgacggcgacgttccggccattgcgcagaccgcgcccggagtcaaagccgcctcggagctggcggccatggagcggctgacacgactgctcccgccggaagcgggagccacgatacgggaaatatgggaagagtacgaagcctgccagacgccggaggcacgctgggtgaaggccctcgacaaggccgaaacgatcatccagcacaatcagggcgccaatcccgccggattcgattacgcattcaacctcacctacggaagcgaatacttcgacgacggagcactgctaagcgatctgcggctgctactcgacgaagagaccggacggcacgtcaggcgttgagcatcttcacgatctcggcctgcgggtcctcggccccgaacacggcgttgccggccaccagcacgtcggcgcccgctccgaaaacctcgtgcgcgttgtgcgacgaaatgccgccgtccacctcgatgatcgtctccgtccccagctcgtcggccaatgcgcgcagctgcgcgatcttttcgagcgacgcgggaatgaacgcctgcccgccgaaaccgggttcgacgctcatgatcagcaccagatcgatctgcggcagaatgtcgcgcaacacctcgaccgaagtggccggcttgatcgacacccccacctttgcacccgcgttgcgaatcatttcgatacatcccttggggttgtaggtggcttcgtaatggaacgtcaccatgtcggcgcccgcctcggcgaagcgcgccacgtaacgttccggctcgacgatcatcagatgcacgtcgagacacttcgccgtcgccttgcgaatggctttcagcacgggaaatccgaaagagatattcggcacgaaaacgccgtccatcacgtctatatggacccattcggccgcactgcggtcgatcatctgcgtatcgcgctccaagtggccgaaatcggccgacagcatcgaaggtgctactattctgttcattgctcggttaatatcgtgttctacagacaaagatagtcatttttcgcagattcccgcactccggagcgggattgcgccgcggaatatacaattcggcaggctctgcggccatgcgtttccggacaaaccgcccggactgccgcgcctcagcgcctcacccgattcaggctattgattttccggcggatcgccgctccgttgaacaacgaaagcagaagcgcaagcgcaacgccgcacaaaaccgtaagccccaatcccgcaggccggtaaccctcctgcagggcggccagcgagggcaaatagcagagacgcaccagccacaccgccagcagagccacgcacagcacgcccagattcaatccgagtgtcagcagctgatagggccgcgccacacgggagggggcatatcccagcaggagcaggttctccattttgccgctgttcttctgcaacagcaggaagatactcagcatcaggatatagaacgacatcgcgctgaacaccagtcccacgccggccacgccgcccgcggcgatccgcaggaagcgggccgccctgccgtcgtcccggcggtccccctcggcttcatagcccttgcgggcgaggtaatccgtcacggccgcatcgaccggacggtcggtctcgacgataatccgcgccggctgtttcgcggctccgctcccgaagcgcccgttcgaccagcggatgaacgcatcgggcaccagaatcgtattcaaacggttggacaacccgacgatccgcccccggaactgctcccgatgtccgttacccgcaatctcgatgccgagtgagacccggcggaagatgccttccgatatctgcggcagtccctgcgaccgggcgaatccgtaattatagaggttcaggtagttgcgcgggatgatgatggggatgtccctgtccccggccttgtaatcccaattttcggccccgacgtcgaggaagcggtcgggcaccgactcgaaaaacaggtaggtcgaaagctccacgccgcccatgccgaccgttccctttatccggtaatcggcaggcgtgaaggccccggcttcgcgtacgaacggctgcgcccgcaggtcggccagctcttcggccgtaaagtcgctgctgcccagtccgatcgcctgaagcgccccgacctgcttcgacagcaccagataatcgccccgcatgaacgaatcgggccgatcgaaaaccggcaggacgtcgcggtatgcctgcaaagccgtcagcacgatcgccatgcccaccaatccggcgagagtgaatccgacggtctgggccatgctcagatgacagcgcagcaatttccaaagcaacctcatagcgtaaagattttatggtacggcagccggagccgactgccgaccgaggtgacgatcactcccgctccctgcgcctgcgcgccctccagcagcaacgcagagagcacctccccgttggcggcatcgagatggctcaccggctcgtcgagcaggatgaaatcgaagggctggcacaaacagcggatgaacgcgacgcgctgctgctgcccgaacgagagcttcccggccggagtatcccgcttgtcggcaatccccgcagcttcgagcaggcgctcgatccggtccggtgtcaaaaagtgggtaagttcgttcttcagcgcgagattctccgccacggtcagctccccgaacagacgcaggtcctgaaagagcatgctcagcgaccggcggcgcagttcgccccactgcgctacggaaagcgtccggcagtccgcagcgtcgaacaggatgcggcccgcatagtcggttctggccccgtacagaaaactgcacaacgaagactttcctgttcccgaagcggcttcgaccagataatactcccccttgcggaatgtcacgtcatgcagccacaagtccgatttcggcggctccggattgcccgcaaaggcgtcaggcagcacctgctgcaaagtaatcgactccatacatcatctatttcaggaaagaggctgtctaacaattctaacttaggcagcctcttttttatgtttgcaaataatataaccatcagccg

SEQ ID NO: 12073 - DNA, 439 bp, Unknown
  gut microbiota DNA sequence
ctttgagtttatcaactttattaaatatatcatttattgtgtctttgccaatagttgcacatattgctgcatctgttatctctgaagggacctgactccataaagcagagccatctgaaccctctaccttatttttaaggtagtccttgtatatagataatttatcatttgctcgcagataatggaatgccgatcttgttttaagagtattgcaagcatcttttttcatttcaatatgagctattggtgaaaatccggctttaataaatccttctgataatccaccagcacctgcgaacaaatctataaaagtatattctttttttatcattacttatgtcttttaattgttttgtagccttctatactttccctgactcgtccatccaacactcctgcaaacatttccatttcttttttgaatatacccaagcgtatt

SEQ ID NO: 12074 - DNA, 234 bp, Unknown
  gut microbiota DNA sequence
cagctcggcgacgtcggcgtcggtgaggttgcggaagatgttgtcgctgatgccgatttcgagcgccacgcggaattcgaggatgtcgcagagcgtcgattcgttcatcagcagcggattgatgcaccgcttcatgccgccgagcagcgacggctcgcccagcaccatgcctttcttggtgcgcgagacgatcatgccggtcatcttgaagcggctcagcgcttcgcgcagcac

SEQ ID NO: 12075 - DNA, 843 bp, Unknown
  gut microbiota DNA sequence
aggtagaaaactgcaacactggaaataacgcggtcaccagccgtttagtactccacagcaccactaacgcgatcacacacgaaaaaactgcctgtaaaacaacgttacagcaccagttccatttcccccatagacttgctgagtttttctttctccgcttttccaataatttcatcctcacatttaatttccagatccattgttaccaccagcaggtgaaccagattttcataccggcatttttccttatacatctgcaccacgtccaccttctgctgcgtctgcgctcttaaaaagcggtacaaaaacagatagaagctctcctcgtcatccactctgctccgcacaattcccgcatcttcctcactgtaccatgccacataatgcgcacatttctgatccatcagggaaaaggacagacctgccaccagtttcaggtatgcattccggtctgcaccagatttctttcctaaaaaatccgtcaggatcgtaatggcacatgcctttggcatactgtgttcctttaccatccacatatccgcttttgcactcagtttccagtgaatgttctgcacacggtcaccccgctggaattcccgcacatcaaaaagttccgacggatcataccccggtcgaaattcatcatacctgtccgcatctccgaaaaaattgcgcaccgcatccgtcagatgcaccggtacataacagatttccggtaacacatccacagatacacatttttttactttccgaaccacataaaaaaatcctgtcaaatcgtaaatccgcacttttttcagtccaaattcatatcttcccgcttgttttagctcatacggatac

SEQ ID NO: 12076 - DNA, 5770 bp, Unknown
  gut microbiota DNA sequence
cgtttttcttttcagaacctttcttcaaataaaaaagaaccttgaatgtcgatttcataactcaaaatttttagttgcaaaattagtttttacctctcattttcgagttatgcagactatggactaatatagtcattatcaggtcatttatggacaattcgttaccgtttttgtccggcagggaataggtaacgatttagtaacgaaactttgtcttttaccgtacttttgaagtcttggaagcaggactttcgggcaataaaaaaagccacaaatcattgatttgtagctttttgtccgtttgctgaccatttctgtccagcacgttcagcggagagagagggattcgaacccccggagcctcgcagctcaacggttttcaagaccgccgcaatcgaccactctgccatctttccggggacaaaagtagcacggattttccattctgccaaatctttatcccgtttattcccgacggagggcggcaaagttccaattccgcactataatttttgacttttaggaaaattgcatatctttgccaataggttaggaagagacgcaactttcacactcaaataatatgaacaaagcgcagttggtcgaggctatcgctctcgatgcgaacatttcgaaaatcgacgcgcgcaaagccgtcgatgccattatccgggtgaccgtacagtcgctccgcgaaggggagcgtcttaccctcacgggtctcggaacgttcagcgtgcagcagaaagccgcgcgcataggccgcaatccccgcacgggtgcggccgtgaagatcccgccccgcaaggccgtcaaattccgtccgacgatcgagcttgaatagtctcctgcgtcattcaaaaaccttttcacgcatgcccgaaatctcacaacgcgccgagctgatgccggcatctccgatacgcaaactcgttccgctggcggaagccgcccggtcgcggggaatcagaatctaccacctcaacatcggccagcccgatctgccgtcgccccagacgggactcgcagcgttgaagaagatcgaccgcaaagtactcgaatacagccccagcgacggttaccggtcgctccgcgaaaagctggcgggctactaccagcaataccagatcaaactttcgcccgaagagatcatcgtcaccacgggaggttccgaagcggtgctgttcgccttcatgtcgtgcctgaaccccggcgacgagatcatcgtgcccgaaccggcctatgccaactacatggctttcgccatctcggcgggcgccgtgatccgtccggtcgtctcgtcgatcgaacaaggctttgcgctgcccgacgtcgcggagttcgaaaaactgatcaacgagcgcacgcgcggcatcctgatctgcaaccccaacaaccccacgggttacctctacacccgcaaagagatggagcgcatccgcgatctggtgaagaaatacgatcttttcctcttctccgacgaagtttaccgcgaattcatctatacgggatcgccctatatttcggcctgccacctcgaaggcgtcgaacagaacgtcgtgctgatcgactcggtgtcgaaacgctactccgaatgcggcatccgcatcggcgcgctcatcaccaagaacaaaaaactacgcgacgcggtgatgaaattctgtcaggcgcggctctcgccgccgctgatcggccagatcgtcgccgaagcttcgatcgacgctccgcgctcctacagcaccgaagtctacgaagagtatatcgaacgccgcaagtgcctgatcgacggtctcaaccgcattccgggcgtctactcgccgattccgatgggcgccttttacaccgtggcgcggctcccggtcgaagacagcgacgacttctgcgcatggtgtctttcggatttcgaatacgagggggagaccgtcatgcttgccccggcttcgggcttctactccgacccgacccgcggccgcaacgaggtccgcatcgcctatgtcctcaaaaaagaggacctcgaacgctcgctgctcattctgggcaaggcgctcgaagcgtacaacaaccggaaataatccggcatggaacgaagactcaggtgcggcatgacacatgccgcacttttttcatgcggcagcgcatcccccgccccatccgtcctttcggccaatcctataccattcaggtcaattttcaggaattttaggccaaaaagtttgggcggcgggaatagtttttatacttttgccctcgatttttcgcactccgcagtgcggacagtataaaccaaaccaatacgttatgaaaaaaatcttcctacttctggccgccgctgccgccgcctccggagcatacgccgaaggatatcaggtgaacaacctctcctcgaagcagaacggtatgggccatgtgggtacagccatgaaactcaactccgaatcgatttggttcaaccccgccgccgcttcgtttcaggactccgagttcgacatttcggtcggcatcacgggtatcgcttcgaaggctacctatacgtcgctccccgactatacgggcaagaccaaaccgcagcactacacttcggacaacagcatagccactccgctttacgcctacttcaactacaaacccctcgactggatgtcggtcggtctggccttcaacacgccgttcggctcctcgatggactggggcaacaactggccgggagcgcagctcgtgcagtcgatcaatctcaaggcatacaacgtccagccaaccgtctcgttcaaactctgcgagcacctctccgtcggcggcggtctgatgatgacatggggtaaattcgacctttcgcgttcgctgctgcctatcggtgcggacaacgcgcagaacaaggcgctcatgggcgcattgcaaatgctcaatccgcaaatgcccaacctcttcgaaatggccggggacaaaaacctgatgtcgctgggcctcgaaggcaaagccaagatggccgtcggcgtaaacctcggcatgatgtgggacatcaacgaacagtggtcgctgggcttcacctaccgttcgaaactcaaaatgaaggtcaattcgggttcgatcgacctgcgtatgatcgacaacgcccagatcgctcaggcaatcggccagctcctgccccagctgggtctcgaccccgccaaactcacgtcggccgtcgtgaagaccgaactgcccctgccggcgtcgctgacgtggggcgtcagcttccgccccgttccgaagtgggaattcgccgtcgatctgcaatatgtgctttggagcgcctacgaccagctcgacgtccggattctcgaccctgacagcaatacgcccgtgctgaacattccggtcagcgacaagaaatactccaatacactggcgttccgcttcggcggccagtaccacgctctcgactggctgacggcccgcatgggtatgtacgtggacgaaagccccgtgcgcagcgactacctcaatcccgaaaccccgtcgatgaccaaactcgcctatacggccggcgtcaccttccgcccgatcaaatggatgaacatcgacatcgcctacggctatgtcaattcggccgatccggagcgcacaggctcctatccctacaccaattcggtgctgggcatcgtaaacgaaaaactgacggcggcaggcattcccgaaagccagctcaccagcccgatcgccgatttttcgggtaattacaccgcccgcgcccacacgttctcgatcggcgtaggtttcagtttctaaaaacgggaaaaattattatctttgcggtgcgcttcgtcggaggtgcaccgcttttttcagggtctcatagttcaagggatagaacgagggtttcctaaacattggggcagagcggaacacgacatccgagcgaaattacacacaactttttcgccggattatctataacagacgtaagcccttgtagttcaacggatagaacggcggtttcctaaaccgcaaatccgggttcgattcccggcgagggtacaagaagcgacggaattttccgtcgcttcgttcatttttgcacgcttcgtttgtatatttgctcgcaaatgttgtcaaatagttgtcaaaaacctgcaccatgccgaccacattcaaacctgttgtctacgccgacaataaacggcaggacggaacctacaacgtaaagatacgagtgacccatcgacggcagacattgaagctgtcgacgaatatgtacgtcgccgcacaccaaatgacgcgcgcgcttaaactcaaagaccaaagcataatcgacgaggcgaaacgaatcatcgacaactggcgcgccatcgtcggacggctcggagctgcggccgacgttatgaccgtccggcaggtagtcgactacatcaagcagacggagcagaacaacatggctttcgaactcgattttatcgcctacggacgcaaaaaggccgaaacgatgcgccccggaacgggcatcgggtatcagatcgccttaaatgcgttggtgcggtatatcggcacggaaacacttgacatcagccggataaatgcccgattccttacgggcttcgaacagttcatcgaggccgaacccgttctgacgcacagcagaaagggcgcaatccgccaactacacaagaccaagaaaggcggccgcgccatatcatcctatcttgcctgtgtccgccacatccataatctcgcaaaacaagagtttaacgacgaagaattgggcgtcatccgcataccgcaatcaccgttcaaaacctacaaggtcaagcaaccgccaaaggtcaaaaaacgagccgtcagccccgatatactccaacaaataatcaacctcggcgatgaaccacgccgcgctgggtcgatctctgatttcacgcgccgcgatcttgcccgtgattgtttcctcctatcgttcggccttgcaggcatgaacgcagccgacctgctgtcgtgtccggcgcagccgctcgacggcgacgttattatctacaatcggcagaagaccgcgagccgccgcgaggacgaggccgaaatgcacatccgcatcgaaccgcagatcgcgccactcgtcgagaaatacaaagaccctatgggaaagcggttgttccggttccatttgcattacagcacgggaaacacgttcaactgcgcgctgaatcaaggtttgaagcgaatagacgcggccctgcgggcgatccgcgacgccgaccaacgtcagaacgacgccacaggcgaagatcgccccctgccggaacatatcacattctatgccgcccggcacagctgggcaacgatagcccgttcggccgcgctcaaaatcgacaaatacaccgtacacgaggcactgaaccacgtcgacgcagatatgaaaataaccgaccgatatatcgaccgcgattggtcggtcatttggcaggcaaatgcaaaagtacttggcctgctcgattggtcggaactcaaaaaaagagaagaaaatcggaaataatcggcgggaattttgcataataaacaaatgtttattatatttgcattgtcaataaagccaaaaggatatgaaaaaaccaagcaaggaacaaaaggagttcgaagcagagctaatttactatttaaggctttacagcgaactaaaaggaagagagggagccgcaaaaatcctcgcttccattgaggaggaaatcaacaagctggtcgaaatcctcaaagaattgtaaaacacagctccccgccttgcggggcggggagcataaacaaaatagac

SEQ ID NO: 12077 - DNA, 8081 bp, Unknown
  gut microbiota DNA sequence
tgcgtcccatgacgggaactgtcccgtcctttttcactacctgacgcttgaggtagtagattactgaaaatgtactcttcattgtccttaatttttgggtttcaaaattagttggtgaagagtccggtgttggtacgcaaaacggggaggaacggcgcaatctttttccgtaacctgatttttcgcatgagttatggataactcactattccttagagccttgtttcgctattcgtacccgtttgtcgcattttcgggcatggttacgaacaagtaacgtagcggcgtcaggatttggcttcggcagggattgtaatggcttcacggattatcgccacttcaaccaaaacccttgtaactcaattctatcactatatctttccgcatttcacttttttgtagtaactttgcactgtcacataactgtttgtggaattaaccggagccttgtccgacgggaaatagaactcgtttattttgataataaaatttcggtttttcaatgctttcaatgcttgtatataaagcgcttccgatccgaatgtgtctgctttatttccgcccttttgcgccgcacaccctgccatcgccacaacaaggataattattgacagtgattttaatatggttttcataattgaaatgttaaaataataaaagctgctcaataataattgagcagcttaaaaaacatttatctgcacgttgcaaacgctttaacggcggcttcgctggcatcaagtatccccgaacctttaaatcccgttaagtttcgcccttcgttgagtagaaatcttgtgtattctctttctacggttgtcgaattgtggtatttaggatagagaatccgcacggtccgataccatgcgtattcgactgcttccgcatagcccggtgtcagtctgtattgcgaggaatttctaagttcgttgtaatacttcatggcacagggggtctcgtaccacggctccggtgcgaatttcggaaattttccattaggtaattcgattcggttataatcaaatcccgcaccaccacctcttcccgtgtcgaatcctacggtgttcttaatgtaatcggcaaatgtgagaatcaaaataccgtgactatcgctgtattcttctttacatccgggtctgccacaatgactttgccaacccgcatttagatcgaatccgcatttggaatctggacaggtccaatggaatgcactggatcttgttgcgaccacgtcatccggaactgtccgatcgacgggcagatcgtcattactgcaattgctcgaaagcaatccactacctgcaaccataaaggctacgaagaagctttttcggaatcctgaaagttttttcataggaaataagtgtaagtgggtggtgaatattatacaagctattcattaactttatgagcaatataataaaataaattgaaacaaactaataataaattgattatttttttatcgaaccgtccttttcggcgtcaaataccatcagtctgaacatcgctgctgcaaacacttcggttttttattgggaaagcaacaaaattagttatatttgtattccgaaaagtcgttgcgcatgatcccgaaatacggttgtctgctgctcggtctgctcaccgtctgcggtgccgcggcccagcatcccgatgacgaatattatccctacgccgcccggcaggaggagcgtacgccgcttctgctgaccgactcgacgctgttttaccgtgccgtgcagacgactcccgacctctatgccgaacataccgccttcaatctgccttacgtctccgtgaaacgccggggactgaattaccgcgacgaatccgcttcggtagggggcgtgcggctttcgtcgcgctatttcggggcgatgcgcctgttgggggccgatgaagtccgctatggcggtcttgccgcggcagacggcacgacgggcggtgccggcggcctgcgtttgttccgttttgccgacgattacccgcaggcgtcgcgctatgccgccgtcagctttacggaccgtaattatctggccggggcgcggctgtccgtcactgaaccgctcggccgcgattggagcggcacggcggccctcgacgcccgtacggggcgcgacatgcacgtcgaaggcgtcttcaccaatgcgctgactgcgagtctgcgcgccgcgaagcggttcggcgacgatcacaacctgagcctgacgctcatcgttccgccctcggtccggggtacgcgtctctcctcggccgaagaggcgttccggcttacgggcgaccggctctataaccccgcatggggattccagcacggcaaggttcgcaattcgcgcgtgcggcgggaattcgtgccgctggctgtcttctcctaccggatgccggtttcgcaatcgacgtcgtttgccgccgatttcagcgcggagtacggcacgcgcaaatacagtgcgctgggatggtacgacgcacgcacgccgatgcccgacaactaccgttacctgcccagttataccggtgaccgcgagaccgagcaggcgtggcgggccggcgacgcgcgctatacgcagatcgactgggacgaaatgatcgcccagaaccgcatggcggcgggccatgccgtctatgccctcgaagaccgcgccgagcggctcggcgacctgaacttcagcgccctgtttacgactgcgctcgacgcccggctgacactgcgttacgggctggttctccgccatgcgcggtcgcgcaattacaagcagatgcgcgacctgctgggtgcggagtatatcaccgacatcgaccagtatctggtggacgacgatacctacagcaaccttctggagaacgacctgcggcgccccggccgcacgatccgcaagggcggcaggttcggctacgattatgcgctgacgacgcgccgggccgatgcgcggctgcatgccgaataccgctccgaccgcttccgcgccgatctcgtcctttcgctgggcgccgccgcagtctgccgccgcgggtattacgagaaggagcttttccccggcgcgcagtcgtacggccgttcgcgccgggtgcggtttacgccctataccctcagggcgaccgccggctgggccttctcgccccgcagttacctcgaagcgtcggctgccgccgaagccgtgctgcccgacgccgcggaccttttctaccagccgcagtacaacaaccgcgtcattgacgatccctgtcccgaacgccgctatgccgccgaaatcaattacagccgtacgggcgaaacgctgaccctgcggttttcggcttatctcttggcgatgttcgacggcgtcgagacccgtcgttactacgatgacatggcgggcgtgttctgcgacatggctgcgacgcggatcggacgcatggcctgcggcgtcgaagccgccgccgacatccggctctcttaccgctggagtctgtcattcgccgcatctgcggggcgttacaaattcatccgcaacccgcggataaccgtgatctccgacgtcgacaattcggtcgtggacgcccgtgccgtgagccacctgagaggttgtacgtccggcggcgcaccgcagctgacggcctgcgccgaactgggttatttcggcccgaaaggatggggattcaaaacttcggcgggatacgccggcgcgcgttacgtcgaaccgtcgctgctgcggcgcaccgagcggatcgcccgtcagggcggcacgacgcgggagatgttcgacgccttcacccgccagcagcggctcggcgacgcctttaccctcgacgccgcgcttttcaaaaccttctggttcgaccgttcgcggctgacggcgtcgctgatcctgcgcaatctgctgggcgacggcgacatcgtttacagcgcttacgagtcgcagcgcgtgcgccgcatccgttcgggcgacacgctctgctatgcgccccatgcgacgcgccttacctatgcctatccccgttcgttctatcttacagtctcttaccgattttaggacgtaagtaaaaaaatggccgatttttttggatttcgacatggaattcgtaacttaaaggtcgaaaaaccattaaaacttcaaaattccatgattatcggtattcccaaagagatcaagaacaacgagaaccgcgttgctctcaccccctccggcgctcaggagctgaccaaacggggtcacaaggtttatgtgcaggcttcggccggtgtgaacagcggttttgccgatgatgcctatacggcggtaggggcggagatgcttcccacgatcgaagacgtctacgcccgcgccgagatgattatcaaggtcaaggagccgatcgcccctgagtacaagctgatccgcaaggaccagctggtcttcaccttcttccacttcgccagcagcgaacccctcacccgcgccatgatcgacagcggggcggtgtgctgcgcctacgagaccgtcgaacgggccgaccgctccctgccgctgctgatcccgatgtccgaggtcgcgggccgcatggccacgcaggagggccgctacttccttgagaaacctcgcggcggcaagggcattctgctgggcggcgttccgggcgtgaaacctgccaaggtcttcgtcatcggcgcaggcgtggtcggcacggccgcggcgcgtacggccgccggaacgggagccgacgtcacgatctgcgatatttcgctgcagcgtctcacgtaccttgccgacgtgatgcccaagaacgtcaaaaccctgatgtcttcggaatacaacatccgcgaggaactcaagcatgccgatctggtcgtcggctcggtgctgattccgggcgccaaggctccgaagctcgtcacgcgcgatatgctgaaggagatggaacccggcacggtgatggtcgacgtggccatcgaccaaggcggctgcttcgagacgtcgcggcctacgacgcacgaggaccccgtctattatgtggacggcatcctgcactactgtgtggccaatattccgggtgcggtgccctatacttcgacgctggcgctcaccaatgcgacgcttccctacgccatccagttggccgacaaggggtggcggcgggcctgccgggagaaccgcgaactcgaactgggactcaacatcgtgcagggcaaggtggtctacaagcccgtcgccgatgcatggggactcgactacgagccgctgacgctgtagtttctgccgtgcgatttctgccgtgcgatttctgccgtgcgatttttgccgtgcgatttctgccgcgtgatttttgccgtgcgatttctgccgtgcacttactccctacggcggttgcgccgcatccgtccgtcctgtatgccgtcggcaaggcgccggtccgcccggcgcacggagttcacagttcctgcgatccggcgtggcgtggcgcagcgtcgttcgtgcggcgggccgattcggacagccgtgtgcagttttattcgttcaaggatacggagaagccctgcttctccgttttttatgcgtatatttgaacgatgatccgccaactcctgctcatactccgtttttactactcggccatgtttttcttctgcgcggcggtgagcgtggcgcttgcgtggctggtcaaagtgcacggtccggagatcattccgatgtgcatgctcggcaaggcggcggtctatccgctgtatctctatgtctggatcgtacagcgttacggcgacgaattcttctattaccgcaatctgggcgtccggcggcgcgaactgctgggcgtaagctgcgccgcggactttgtcctgtgttatgtattgttgaaactgacggccctgttcctgtatgaacccctctgaaaaacataccctcgaaatcgactcggtcgaattgtcgttcggcgaccggcgtatcctttcgggcgtatatctggcggtcgagacgggcggcgtctcggccgttctgggccgcaacggttgcggcaagagctgtctgatgaagattctctgcggctccctgcgggccggtttccggtctatgcgcatcgacggcgtgtggcacgaccgtttccgggccgacgaagtgcgttacctgccgcagcagggtttcattcccggctggctgacgctggaccgggtgctgcgtgattacgacatgacgcgcggcgacctgctgaaatggtttccgctcttcgaaaaactgttcggaaccaagatttacgcgatgtcgggcggcgaacggcggattctggagtgttacctgatcctgcgcagccccacgcggttcgtactgctcgacgagcctttttcgcaggtcgcgcccctacatgtctctgcgcttaagcgactgatcctgcaggagcgggcgtccaaaggcatccttctgaccgaccatatgcaccgtcacgtcaccgacctcgccgaccgcctttacgtcatggccgacggccggacttacctcgcgcagggcgaagaagaccttgtcagatacggttatctgacgcatttatagcgattgtgcggccggccgatttgtttttgcgcccggcttgcactatctttgccgcaaacaaactccggcttagataggctgcgccccggcatcgcccaatgaatttggctttgcgcccggcttgcactgtcttcgcacccaatacggcacattatggcaggatcgaattttgtagattacgtaaagatattcgcccgttcgggtcacggcggagccggctcggcgcatttccgccgcgagaaattcgtggctttcggcggccccgacggcggcgacggcggcaagggcggcagtatcgtcctgcagggcgacagccagtactggaccctgatccacctcaaataccagcgtcaccagttcgccgaggacggccagtgcggttcgggcgcccgttcgtcgggcaaggacgccaaggacatcgtgattcccgtgccgctgggtacggttgcgaaacggatcgtcacgcaggaggacggcacggaaaccgtcgagacggtgggggaggttaccgccgacggccagcggctggtgctgctgcatggcggccgcggaggtctcggcaactggcatttcaaaagcgccaccaaccagacgccgcgctacgcccagccgggcgaagagggcgacgaaggggctttcattctcgaactgaaagtgctggccgacgtgggactggtgggcttccccaatgcgggcaagagtacgctgctcgcggctgtttccgccgccaaacccaagatcgccaactatgccttcaccacgctcgaacccaatttgggcatcgtggaggtccgcgaccataaatcgttcgttatggccgacattcccggcatcatcgagggggcgcacgagggccgcggactcggcacccgcttcctgcgccatatcgagcgcaattcggtgctgctgttcatgattcccgccgacagcgacgacgtccggcgcgattacgaagtcctgctgggcgaactgacgcagtacaatcccgaactgctcgacaaggagcgtctgctggccgtcaccaagtgcgacatgctggacgaggagctgatcgaacagatgaaaccccacctgcccgaaggcattccctcggtctttatttcgtcggtttcggggctgaatatcgcccggttgaaggatatgctctgggaagccctgcagcgttagcgaattcgacgcgccgctccgagacgcggagcgtgtatttcccgttgaaatagtctataattccatatacggaacccgtgccctgcggtacgggttccgttgcgtatgcgcatgtccccagcgtccggacccggaatgtccggccttgggcgtcggtcagcgtccgttcggaggtctgcggttccgaggtctccggatcggtgtcgcaccacggccccgcttcggtaaaccgtactccttcgaaacatacgtaggtgtctgtctgccgggggccgatggcgtcgaacgtacatacggccggccgcggccggccgtccttgtccggattgcggcgcagatagcgtcccagttcctcacgcggaatccgccctacgccgtaatcgccgtcgggcgcggttccgagctggatcttgc

SEQ ID NO: 12078 - DNA, 90596 bp, Unknown
  gut microbiota DNA sequence
gcagaagatagtgacggccgctccgaccgggtagtcgaaagcgagtcgggtgccgtcgatcaggagcgaaatcccgccgctggcatcctcgacgacgagcgtcttgtaaaattcgccgtagaaatcgttgcccgtgacgacgccttcgagcgtgatgtcctccgtcacggcgacgctgtttgcggtgcagcgcgccttgaggtccgcaatggtatgcacgccgccgggagcgccgccctcgaacgagagtttcgacgttcggtcgcaggccgccagcagcaggagcgccagcagtttaatacatgcagtcgttttcatcgcggagtttgagcaggtaacggcctttgccggcgtcgtcgtattgcagaatgcccgtgagcgaacagctctttccggcggggacctcttcgccggcgaacccggcgtaattgcggacataggtgtatatttcggctcctccggcgtcggtgaagcgtttgtaccccgcccacgtgccgggcgtaaggtcttcgggcgtgtaactcagaccgtcgatccgcaccagcgtcccgcaccgcttcggcgtgagttccgcaatcgtcagcagagcgggtgcgaccggctgcggggcttcgccggtgcgacttgcggcggcgtccagcgcggctttcgagccgaggtaatccgttgcgaagccgcttcccgcggcgggtttccgtccgacctgcaatatgccgcggctttcgcccagcgccagccccttcagccgcagcgtaacgcggcttcccggtggaaagtcgttgtgcagatggtcgataccagccattacctcaagtcctgctccatcttcctcgacgcagaacgtgcggtagaagttttcctccgcatcgctggtgttcacccgacccgacaccaccacgtcggtcgcaatcacgaacgtcgtcccggcgtacagttggcgcaattgggcgatggtcgccgttgttggttccggttcctcgccgccgctccgttccccgaaccgggagtcgtaacacccggtcagcagcagaaaggcgcataacagcggcaggcgtcgcataagctccgttattcgatgcgtgaatccttcagaccgaggaagtagaggatgccgtccagtccgatggtcgagatcgactgccgggcggtggccttcactttgggtttggcatggaaagcgatgcccagaccggcgagattgagcatcggcaggtcgttggcgccgtcgccgacagctaccgactgggcgatgttgatctcctcgaactggcagagcaggcgcagcagctcggctttgcggcggccgtccaccacctcgcccacgtagcggcccgtgagtttgccctcctcaatttccagctcgttggcatatacgtagtcgaatccgtatttctggcgcaggtagttgccgaagtaggtgaagccgcccgacagaatggccgtcttgtaacccacgcgcttgaggatggtcatcatgcgctccagcccttcggtgatgggcaggctgcgggcgatctcctccatgaccgagacgtcgagacccttgagcagggccacgcggcgcgagaaactctcgcggaagtcgatttcgccgcgcatggcgctggccgtgatcgcccgcacctcctcgccgactccggcgcgttcggccagttcgtcgatcacctcggtctcgatcagcgtcgaatccatgtcgaagcagatcaggcggcggctgcggcggtagatgtcgtccttctggaacgagacgtcgagaccgatctccgagagattcatgaatccctcctgcatggtgctgcgctcctcgtcggtgagcgacccgcgcaccgaaagctcgatgcatgatttggccgcacggtcatcctcgctgagcgggatgcggcctgtcagacgcttcatggcgtcgatgttgagtccgtgctcggccacgacgctggtcacctcggcgatatgccgagccgtgacggtgcgccccagcagggttatgatgtatcggtttttgccctgacggcccacccagtcctcgtatttccgctccgaaatcggcgtgaagcggatcatcacgcccagctccgaagccttgaacagcagctctttcatgatgtttcccgacttgtctgccgtggtcttgaacaggatgcccagcgtcagcgactggtggatattggcctgaccgatgtcgaggatgaaggcgtcgtagcgcgcgagtatttcggtgagcgaagaggtcattcccggcttgtcttcgcctgagatgtttatctggataatttcaacgttgttctgcatcgtttcctgtttccttttggtaaattcgtagacaaagttagtaaactttcttttttttggttatttttgcacgataaacttaaaaatcggactttatgtggtcttttctcgtgccgttttttacggaaacgcccgaagcgcctttgatcctgcccgacagcgtgcagaaagccaatctcgccgaagcggtgaataaaatcatccatctggacgtgggcgacatgctgcgctctctgctttccgaatccgtctggatactggtgaagatcctgatcgcgctggccatctattttatcggccgctggatcgtgcgccgcatcgtgcggctgctcgacgccgcattcgagcgccgtcaggtggacacttcgctccgctcgttcctgcgcaataccgtcaaggtggtcttcacgctcatcctgctgatgatcgtcgtgcagaccctcggcgtcaacgtcacttcgctcatcgccctcttctcggccgccacgctggccatcggtatggccctgagcggcacggcccagaacttcgcgggcggcgtgatgatcctgctgatgaaaccttaccgggtcggcgatttcatttcggcgcagggccagtcgggcacggtgcgcgagatcaaactcttctcgacggtcatcaccaccggggacaaccagacgatttatattcctaacaattccattgccacggcgatcatcgacaattattcgacctccgagacgcgccgcgtggactggacgatcggcatttcgtacggcgacgacgtcgatgcggcgcggagggcgcttctcgacctgctggccgccgacagccgtgtgctgaccgacccggctcccgtggtgtgggttgcggcgctcgccgacagctcggtgaacctttcagtgcgtgcatgggtgaaaaacgccgattactgggacgtgtttttcgagaacaacgaaaaaatctacaaactgctgccgctcaagggcatcagcttccccttcccgcagatggacgtacatgtgaaacataactaagtgaggagtatatgaaaaaattactgtttgccgcagccgcagtctggctgctggccgcctgcaacaaggagcttggtcccgaatacgagacgccgcccgttttcgacgaagtgactttcaccacggcgacgcagccggacaaaatcaccgaaccggtgaaggtggacgaggtcgtgtgggtgaatgcgacggtatcctgcccgtacaaggtcaaacaggtgtggcttgcctacttcgtggacggcgacgagtccaatgtggtgacgactaagcctttcaattacgacgccaccaccgttacgttcaaggagcggattccgggacagaaggccggagcgaaagtgtcgtttcaggtgcttacccgttccgattatgtcttcatgtggacccagacgtatacctacaaggtcgagggcggcgaagacgaagaaaagccgaatcccgacctgccggacgaaaactaatttttatcagagatatcgtttatggaattaaaagaaattctggccatttcgggccagcccggactttataaatacgtggcgcagtccaccaacggcgtgatcgtcgagtcgctgctcgacggcaggcggatgaacgcctcggcgtcgtcgaaggtcagctccctgaccgagatttcgatgttcaccgaaggcgaggacattgcgctggcggacgtcttcaccaaaatctatgcgcatacgggcggcaaggaggccatcagccccaaggaggcgcctgagaagctgaaagccgctttcgccgaggtccttcccgaatacgaccgcgaccgggtgcacgtatccgacatgaagaagtgcttcgcgtggtacaacattctggtcagggccggttttacggagttcaaactcccgtccgaagccgaatagaaaaagtcccgctccgagagcgggactttttcgttgtatccggtgtgattccggcttttttcatgccgccgaattcgcggtttatattatctttgtgcaatagcgaaacaaacattcaagcaactgacattatggaacgaaggacgaaagtgctggcattggttgcccacgacaacatgaagcacgatctggccgaatgggtggactggaacagcaaaaaactcggccgtcaccatctggtctgcacgggtacgaccggcaagatggtcgaaaagacgctgcgcgaccaccgggaagagtacgagggtggcgaggagatcgaagagcttcccgatctgaggatcacgctgctcaaatccggtccgctgggcggcgaccagcagctgggttcgctgatcgccgacggcaagatcgacgccctgattttcttctgggacccgatgtcggcccagccgcacgacgtggacgtcaaggccctgctgcgtctggccacgctctacaacgtgccgacggccatcaaccgttcgtcggccgattttctgatctcttcgccgcttttcgaggacgacgggtacgtacccgtcgtcaaggactacaaagcctatgtcgagcgcgtgctgaaataggctggcgcgccgttttacaggtcgtgcgacagcggggcgggaaccgtcccgcttacgtcgaagtcgccccagcgccgggcgatcgagtcgagcgtgtcgaacagttcggggatgtcgagcgacgtgacgagcttcaggcgcgtcggcttgaagtcgggcagtcccttgaaatagttggacagatgacggcgcatttcgaggatgcccacgaattcgccctttacttcgagcgacttgcgcagatgctccttggcgatttcgacccgttcgcacaccgacggctgcgggagcacttcgcccgtggccagatagtgcttcacctcgcggaagatccacggccgcccgtaggtcgcccggccgatcatcacgccgtccacgccgtagcggtcgaacatctccgcggccttcggtcccgaatccacgtcgccgttgccgatgatcgggatatgtatctgcgggttgttcttcactttgccgatcagcgtccagtccgcttcgccgcggtacatctgggcgcgtgtgcggccgtgaacggtgagcgcggcgatgcccacgtcctgcaagcgcaatgcgatctcctcgatgttcttcgactcctcgtcccagcccagccgcgttttgacggtcacgggcttgcgcaccgcctgcacgatccggcgcgtcatctcgaccatcagcggcacgtcgcgcatcatgcccgatccggcgccgcgcccggcgattttcttcaccgggcagccgaagttgatgtctatgatgtcgggaccggccgcttcggccatgcgggccgcttcgaccatcggttcgatcaggtggccgtaaagctggatgcccacgggacgctccgccgcgtcgatttcgagttttttgagcgacttggccgcgtcgcggatcagcccgtccgacgaaatgaattccgtgtagaccacgtcggccccgaaccgcttgcacatgtagcggaacgaagggtcggtcacgtcttccatcggcgccagcagcaggggcttttcgccgagttctatatcagctattttcatgggttctggttcgttttttccgatgtctcgcaggcgaggatcttgtctatgcgggcgccgtccatgtcgacgatctcgaacgtgaaggtgttccacctcagtttttcgcccgtctgcggaatatgccccagctcgtcgaggatcaggccgctgagggtgttgtagaggttgttcgggtagacgtcctccagcccgtagcagaccagaaaatcgtaaaacgggcactgcccgtcgatcaggcagctgccgtcctcccggtgaacgatgtccggctcctcccgctcttcgggaatcgagcctaccagcgcttcgaagatgtcgtgcagggtgacgatgccctgcgtcacgcagaattcgtcgcagacgatgccgtaggcgacctgctcgctgcggagttgttccagcgcggtgtacacttgggtctcctcgtggaagaattttgccggacgcagtatggatgcgacgtcgaaatcctcctcgccgatgtgtgtgaagaggtccttgaggtatatcacgccggccagccggtcgaggttgctgcgggcggcggggtagagcgtgtggggttccctgccgaccagctcgcggatctctgcgggcgtcatggcggggtctatccatgcgatttcgctgcggtgcgtcatgatcgaacccaccttgcggtcgccgagcgagaatacgcggccgacgatctgctgttcgacgatctgcacctctccgtcttcggttccctcctgaatgatcgacttgatctcctcctcggtgaccttgctctccgtatcccgtattccgagcaggcgggtgataagctcgatgctgcgcgaaagcagccatacgaagggcgacgtcaccttggcgagcacctgcatcggccgtgcgacgagtatggcgacccgttcggcgcttttcatgccgatgcgtttgggcaccagctcgccgaagacgatcgtgaggtaggttacgacgatgacgataagtatctgggcgaccggaacggccgtgcggagcggcatgcccagcgatgcgagcatcgcgccgaagcggccggccagcgcttcgcccgaatagatacccgtcaggatgccgatcagggtgatgcctatctgaatcgtggaaaggaatctgtccgggtcctgagccagctggagggctttggcggccgccttgttgccctgcttggcgcgtgccgtcaggttcgagcggcgcgccgagatcagcgcgatttccgacattgcgaaaagcccgttgagcaggatcagcaggataatgatgatgatttccatgaaaagcgtgtaatgtagcggcaaagataagcattgtttggaatttcgggggcgccgcggccgcaatttgtgagaattatggctttgcgggattggttattagccgaaaaacgctaaatttgcaggcaaatcttttgtgttatgaatattgaaaactttatttcggatgcggtccgccgttcggtggaggcgctttacggtccgctcgacggcgaacaactgcagattcagaagacccgcagggagttcgagggcgattacaccctcgtgacgtttccgttgctgcgacgaagccgcaagtcgcccgaagccaccgcgaccgagataggcgaatatatgacggccaacgtgccggaagtcaagtcgttcaacgtcatcaagggtttcctgaacctgaccctcgactgcgcgttctgggccgcgcgttttgcggagatcgccgccgatgcgaacttcgggcaggctcccgacacgggacgtacggtgatgatcgaatactcgtcgcccaacaccaacaaacccctgcatctgggccatatccgcaacaacctgctgggttactccgtggcgcagatactcagggccaacggccataacgtcatcaaggccaatctagtgaacgaccgcggcatccatatctgcaagtcgatgctggcttggaagctttacggcaacggcgagacacccgcttcgtcgggcatgaagggcgaccacctcgtcggcaaatactacgtcgagttcgacaagcattacaaggcccagatcaaggagctgacggcgcagggccaaaccgaggaggaggccaagaaaaacgcccctgtgatgctcgaagcgcaggagatgctgcgcaaatgggaggccaaggaccccgaagtctattcgctctgggagacgatgaacggctgggtgtacgaaggtttcgacgtgacctacaaggcgctgggcgtcgatttcgacaaaatctattacgagtcgcagacctacctgctgggcaagagtctcgtcgaggagggactccgcaagggtgtgttctaccgccgcgacgacaattcggtctggatcgacctcacggccgacggactggacgagaaactgctcctgcgcggcgacggcacctcggtctacatgacgcaggacctcggcacggcttaccgccgcttcgaggagaacaggctcgacgacatgatttatgtcgtgggcaacgagcagaactaccattttcaggtgttgaagctcatcctcaagaaactgggctatgccgactggagcgaccatatcacgcacctttcctacggcatggtggagcttcccgaaggcaagatgaagtcgcgcgaaggcacggtggtcgatgccgacgacctgatcgcagacatggtatccacggcccgcgagatgtcggacgagctgggcaagctcgacggctgtacggaagaggaggccgacgccgtttccacgatggtcggattgggggcgctcaagtatttcatcctgaaggtggacccgaaaaagacgatgcttttcgatccgcgcgagtcgatcgacttcaacggcaacaccggcccgttcatccaatatacccatgcgcgtatctgctcggtgctgcgcaaggccgccgaagccggcatcgacttctccggtgcggcgcaggcggattacctgcccgaagagatcgccctcgtgaaatcgctgaccgaatatccgtcggtcgttgccgccgcaggcgagaacttcgcgccttcgatcgtcggcgcctatgtgtacgaactggccaagcagttcaacggttactaccacgaccattcgattctcaaggaggagaatgccgaaacccgcagaatgcgtcttcagctggctcagcaggtcgcccgcgtcatccgcagcggcatgaaactgctcggtatcgacgttccggaacggatgtaattctccggaacggatgtaatttgccgcaccgtccgggcggaatgccttttgtgccgagaccggaacgaagagggtggggcgttgccgcggcagaatccggccgggtttccgccactttcggacgccgagcctgagcgcggcgtctcccggatgaatggcaaaaatctgggccgtctgtttctcggctatgataaaaaagaggaagaacgatcttcctcttttttaattatggcttccgcttgccgcgctcaactttttcggttcaccgttgttatgctttccctgcttgccgccctcttcccttcggcttgttgccctcttcccttcggcttgttgccatcatcccttctgcttgccgccgtcatccctcttcggcctgccgctttcaacttttctgcttccccgtcattatacctccggttcaccgttgtcatgctttccctgcttgccgctctcctcccttccgcttgccgccgtcatgcctcactttccggtttgtcgccatcatgttttccccgttggcgtccggcggctgtacttggctgcccgtacccgtcccggcgggaggggagtgtcgctccgatgccgctgcggccataaatatttagtgctcaaccgtggtatgaatcttgcgagttgtgcggcaggaattaaccaacactattatttgcgtgaaaacaatctttacaacattcgctctatctcttgcgttgtgtgccgctgccggagcgacggcccaagtcaggagcgcggcgccggtgcctgcggccgataccgtgatgctgtcggagaccaccgacggcgattatctcgtccgcaggttcatcgtcaaacgtcccggcgacaccgactactcggtccgctaccagatcaatctggcgaaactctcctcgacgctcgacggcaattcgcgggagctcggcgatctggacgacttcgtcggcaacctgatgaaagacacgctgatgagggtcaaatcggtcgagatcacgggatattcgtcgcccgacggtccgctgaaattcaacgagacgctggcccggaaccgtgcgcaggatttcaagaattacgtcgatcgaaagtatggtttttcaaataagtacgacgtgacggtcaatgccgtcgccgaagattgggagatgtgccgcgcattggtcgccaagtcggaggtgcccgacaaacagtccgtgctggatatcctcgacggcagccggtcgcccgacgccaaggagctggcgctcaaaaagatgccttcggcttggaactatatgaaaaagaatatccttccgccgctccgccgggtcgaactgacgatcaattacggcgaaggcagcgtcgtcgagcagcgcacgatgattccccggcccaaacccgcgccgcagcccgtttgcgaaccctgcggatgcgaggtgatcgacgagtcgataacgggcatcatcgtcgaaatgcccggatcggatgtcgattataaaaaggagcttcgcgaagcgaggaaaatcgtccgggagcaggagcgagccgcccgcaagacagcccgtgaagaggcaaaagccgccaaaaagagttacagggagttggaaaagatgtaaggccgaataatacggtaaaaaaggattccgcatgcggaatcctttttttttgcatgggccggcggggattatttcagcggcgtagggcataaaacgtttgataatccgaaagcttttcgtacctttgtcggagcaaatttttaaaacgcacaatgatatggcaaatttaaggaacctgaaaaaggagatcgactaccgtctggaagaggtggttttcgactgcgatatggcgatctgcttccagccctcgaaggaaaaagaggttttcgaagtgatgcaggaggccgttgccgtccgcaacgatctcttcacgaaggccaacaatcccgccgagccgcacaaccgttcgctcgtccgcaagcatttcgccgctctgcgcgtcgagatggtggaggcttatgacaagcttttcgagaagctgagcaagatcaacgaggcgaagaaataagccgttgtccgatttccggtatcgggccgagagcgcataaacgctcgcggatggatgccgatctataatttaagcgcgttcccccgacggggaacgcgctttttattcgtggtcgcagcaacagtcgcccggatgatgctccagcaccgtgtggggaatgtgcccgtgcgacacgagctgaatggggcagtcgtagttgcgcagctgctcttcggtgatgatgttcgagcggtggcggtgtacgcggcggttcacgcagacgatctccttcacgacgcttgagatggtgccgatgtcgtgcgacaccatgacgatcgccatgcggcggttcagttcgtgcagcgtgcggtagagttcgttttcgaatttgttgtccacgaagttggccggctcgtccagaatcagcagcttgggatcggaaatgacggccctgcacagcagcgcccgctgcatctgaccgcccgaaacttcgccgatagggttgcgggccgtatcggccacgcccgccgtttccagcagatcgagcgccttcgcgcggtctgctttcgtatagcggctgaaaattcccttgtgcccctgcaaacccgacaataccacttcgagcaccgagatggggaacgtgcggtcgaaatccgatagctggggcatgtagccgatcagccgctccttctcccggaacagttcgggtgcgagccgcacctctccggtatggggcaccgtgcccagaatcgccttcacaagggtcgtcttgccgccgccgttcgggccgatgacacccagaaagtcgttgtccgcaatctccagatcgacgtgctgcagggcttcgtagccgtcgtatgcgacgccgacgtcgcgtagcgttaccagattcatcgccgtgtgattatgtcggttatcgcatcgatattggcgatcgcgtcttcgcgcagcgggtccacttcgacatattcagcgtcgatgtcgcgtgcgatgatctccacggacgatgccgggaactgattctgatagaggatgcgccgcacgccgtcctcacgggcctgccggatgacctgcgtcagccgtttggccgaaggttccttgccgtcggcttcgatcgccacctgccggatgccgtaatcccttgcgtaataggtgagggcggggtggtagatgatgaagtattcgatgccgctctgcgcgatcttctcgccggtgcgggtgtccagcgcccgtaaatcggcctgcagccgcttgtagttcgtttcgtatttcgccgaatcgggataggcgcggcgaatcgcggcataagcgttctgcgccattttctgcaatgcgcggggcgatgtccatacgtggggatcgacgccgtgagcgtggctatggttgtggggttcggcgcaggaggtgccgtctccgccggctgcggcctgtttcgcaggcgtgtgcgcgtgcgaacaactgccggcgatcagttctatgccctgactgagattcacgaccttgccgcgctcctcgatcttggataacagcgtggtttcgaagtcgatgagtccgacgttgaagatcatctccgcccggttcagcccgatgaactgccggggcgtcggttcgaacgtttcgggacttgcgccgggaggtaccagcacttcgatcttgaaatcgtcgcccacgatttcccccacgagactgcggagcgggaggatcgagacatacaatgtcttttcgtccgcctgctggcgggacgtgcaagcgcccatcagcgctgcaataaatatgaaaacgagttttttatacatattgtctgttgattatcagtgtttttcctgaaatatggtagggtagtcccttccgtttcttgtatatgacgactaatgcgattgcgatcagcagcgtgcacaggcggaggccgttcgcccgcaatccgccgactgcgccgctcccgctcacgctgaacagcatccacggcgcgttcatcagcgtatgcagccaaattacgctccacagattgttttccgattccacatagatccaactgaaaaagatgcttccggcagccgtgacgccgaaagctgccgatgcggaaatcaggtcgtcaccctgatacagatgcagcgatccgaatgccaaagccgtcagcgtcgctgccggcagaaatccccaacgagctgtccggaacagctctccgaatacgaaacctctgaaaatcagctcctcgaagaatcccgcgacgactatgaacgtaaacatgtgatccggcggcgtttcccggttgaaactgccgatgaccgcatagccggcgaacatggggaccgtactcagcactccgaatagcaatccccggccgaatccgtgcgtcagtccgagcctatataatatggtatcgggtcggtgcagcaacagaagcgccgctgccggaattatacccgcaatcaggtaattcaatatgtagtgaattgatttgcaggtagataagaaatttgcaaatggccgaacgccgaggttgaaataccacgtcacgaagaacagcccgaaagccgtcaggataattgccgagcgttttatacagctgtcattttcagccatttgttccggatttgatattgcaaaagtagcaaaaattcggtgaagttatatatcgtccgattgcgggatatcgcttatatgctcaatttgccgaataatcgggatgtaatagtgtataaggattcgattatgaacaaaatggactctcgacttgcaataatttaacataatggtaatattacaccaaacattgcgccaaggaggttgattcctccctgtgactttgttgtcgggattgttgtcgggattgaataatattccggatgaaatgaaccggatttgcattgccgaagacggtgagattcgcgggaaaatggctatctttgttataccgggccgatttcggaaccgattctcagatcacggaacagattcggtccgcaccgcaacgatcgaatagcatattatgaagaagataacgaatccttggcgcggcatggacggttaccatattgctacggctgcgatccgaacagtccgcagggactgcggatggaattttacgaaaacggcgatgaaatcgtgagcgtctggcatcctcgtcccgaataccaaggctgggtgaatacgctgcacggaggcattcaggcaacgctggccgacgagatcagcagctgggtcgtattccggaagtttcagacgagcggcgttacttcgaagatggaggtccgctatcacaagccgattcacacgactgatgaccacatcgttttgcgggcatccgtgcgtcggcagcgtcgcaacatcgttgagatcgaagtccgcatctatgactggcacgaagtgttgtgcacggaggccgtatgcgtttatttcctgtttcccccggacaaggcgcgttcggaattccatttttgcgattgcggcgtcgaagcggccgaagaaaatccgttgaataaataaggcggcaagttgatgtttgcgccaatgtgcaagttaaggcggccaaattggatatttgcgccaatgtgtaactaaggcaggtttaaaaaacctgccttgctaatttgttgccggtggtcgagattgctgggattgtccgtggttttgccgtaaccctttgtccggttccgtttccttgaaatattacccggcttttttgcgctctgagaatcgagtattccgtcccgcatcccgcacgaatttttttaacgcattgtcgtcggcgtaaaactttcgaaggtctgatcgtcatacagtacgacgatccgtttgacgttggcggtaaacaatgctgccgggagttgttgttgcggtgccggatcgccggttgcgttttccgccgtttccggctgccgtttttcttcaagcggatgccgaccggaggcaaggccgaaaaggtcgccgccgggcgacgcgggctggctcatcggctgcggagctgacgattgggccggcggctcgtcgcggtacatcttatccgagtcgagcagcagccaatccgggttgatccggggaaacctccggagaatcttttgcaacagatcgaagcccggtttgtttcgtccggcgagaatatgggagattccggcgggattgattcccagcagttcggcgagctggcttggcttcaatccttcatttttcatcaaatcgagcaatttttccctcatcagcagaattttttacaaatataaatatttgttttttgtaaaacaagtaattttatcatttgtaaaatgttaataactgttgaaaaagtttacaagtgtaacgatcgaaatattgttaaatctgtctccggcggttgatgtaatctatttgttgatataatatgttataaatagctggttattaagtgatttttagagttcataattcctgtatttgcagtaattgccatcctttttcgcagcgtactcatgaatatcaattaaaaatacatataattcttttaaatgattgattattaaagtgtttattttgcatgtttaacgatttgactgcttgtctcttgcgcgtggaacgtcagatggtgccggttgccgggttgattataaatggatataaagacagctatatcaacacgaagtagttacatttgtaattacaattggaaatactcccctcttttgtttgttacaaatgtaaatgcactaccctattttaggaaaattttgatttttttaacgaatttccgacgactaatcaactgaattattagctttcgttgattctccatatattatgttaaataaataataggcggatagtgttgataacccactacccgcctatttttcagctgtttatataattgtaaacagcggtctattttgaaagttttgctgcgatttcttcgaactcttccggagtcaatttgagcttttcccggtgaaaatccacgtcattttcgctcttaatggggatcaaatggatgtgtgcatgcggcacttcaagccctaaaaccaccactgcgactctggaacacgctatttcctgcttgattttacctgcgacttttttggcgaacagcatcatgcctgccagtgtctgatcgtcgaggtcgaaaatatagtctatttcctttttcggtacgaccagcgtgtgtcctttcgtcagcggattgatatccagaaaggcgtaatagttttcgtcttcggcgaccttgtaggaaggtatttcgcctgcgataatgcgtgaaaaaatagatgccatatatttatcttttaaagtttcattgttaacacagtgaccgctgtcgcgggttgcgccgcaagtcgtatgccctcctgcatgatttgccgtgtttgtcgctcctcgttgcttatatagtatttccccacaaaataggccgtcggactttttttcggtacgttccgtgaaaaagtgccgacggagcgtttcccattgctttttcggtatgttcttgcaaatggtgctgccagagctttttgtcgcttttttgggcgtccccgcgcatagtgccgccgggaattcccgttgtttttcggggcctccggcgcccgcctgccgccgctttgcggaaatcgccgtttctcgtctctcggcaggctgctcttcgaagccttattcctcgttgaatttgggtttaagtatctccgaatagataacggccttgcgcaggtcgaaatcctccgtaatttccgttacggccttctcagtcgtatgtctgtcccctgctgcgtgctcttcgtgcaggatttcctcacggggagactgtccgtccgaggtgtttttgcgtccggcatgccgcccggagcttttgaaagcggccgttttgcgggcgacttcaccgaatccgggcgtcggtgccgcctgctgcattgcggaacgcagtcggtcggtttccgctccagatacggtctcctgactgtccgggtgccgcatttcatccgcagattgcgtgtcccatgagggccaagcttcgtgctgagtgtgcttttcggtctcgtgagcctgctttttcgcctttttgcgtgcctgcgaggtcgcgttgaacagcatggctgcgaaaatcgccacgacccatattacggttgaatagtcttccatatctcagcttaaagttcgtttgacactctcgataccttttatcttgcgcagtctcgtcatcacgtcctgcaggccctcggcgtccttgacatacagactgatgctgccttcgaagatgccgtcgtggctgtggatgccgacttcgcggatgttgatgctgaaatcggcgctcacgaccttcgccagatccagcaggattcccatgcggtcgatgccgcgcagctcgatggtgaccagatacgacatcgccttgtgctgcgaccatttgatctcctccttgacgatattgcggccgaactgggtcgcaagacggttcagctcgtcgcacgtggctttgtggacgataatgttgccggttcccggatcgcggtaacccacgaccttgtcgcccggaatcggtttgcagcactccgctatctcgaactggggtgcttccggctgttctttggccgggggcgctgcattcggcgccgtttcgcccgcgtcgttgatagccgccgggtcgtctccctcctcgtcttcctttttgttgatgaaaagggtccagaacttgagtatcttgcttttggagtttactttcaggactttgtcgaggtccttcaggtcgataatgccggctccgatcttgctgtatagctcctccttgttgttgctttcgtatatcgggacgatcttgcgcaggacacggccgctgagcttgatattcagcgacttcatcttctcgtcgagcatttgcataccccgctcgatgttgttctggcgttcgcgcttcaggaagcttttgatcgactgcttggccttggccgtggtcgctatttcgagccattcgggcttggggcgggcattgtcggccgtgatgatctcgatctggtcgccgctgttgatctgcgtggtgatcggttcgagtttgtggttgatcttggcgctgatcgcgctgttgccgattttcgagtggatgtcgtatgcgaaatcgagcgccgttgcgccgaacggcattttccgggcttcgccttttggtgtaaatactactatttcagaagtatacagcgataacttgaagttatccaagaagtcgactgcgttttccgtcgggctgttcagcgccgcgcggatctgcttcagccatttgtcgaactcgtcttcgtcctgcgaaatcgtggcgtgcttgtatttccagtgggcggcgaatcccctttcggcgatatcctccatccgctgagtgcgtatctgcacttcgacccataccccgtcgggacccatcacggtcgaatgcagcgcctcgtaaccgttggccttgggcatcgaaatccagtcccgcaggcggtccggcttgggggtgtaaatgtcggtgatcgtcgagtaaacctgccagcactgcgttttctccgaagggaacggcagcggcttgaagacgatgcggatggcgaacaggtcgtaaatctcctcgaacggaatctgcttgcgctgcatcttgctccagatcgagtagatgctcttcacgcggcccgaaatctcgtaattgatgttgtcgcggttcagcgcggcgatgatcggggcgttgaatttgtcgatgaactcccggcgcgacgcctccgtttcgttgagtttctgcgtgatttcggcgtattgctgcgggaagcggtacttcatgcagaggtcctccagctcgcttttgatcgagtagagtcccagccggtaggccagcggagcgaagaggtagatggtttcgcccgtaatcttgatctgcttgttcatcggcatcgcccccagcgtgcgcatgttgtgcaggcggtcggcgatcttgatgaggatgacccgcacgtcgtccgagagggtcagcagcaccttgcggaaatattcggcctgctccgaggtgtcggcgttgaagactcccgacattttggtcagcccgtccaccatcgaggctatcttgggaccgaagatgcgttccatgtcctccacggagtactccgtatcctccaccacgtcgtgcagcagggccgccacgaccgatttcacgcccagcccgatctcctcgatgacgatcttggctactgcaataggatgcaggaggtatggctcgccggagcggcgccttaccccctgatgtgcctccttggcaaggaaaaatgctcttttgatgaagttccagtcctcgtcgttcttgcagatcttcgtacacgagaggagcaggtcgtcccacttttccttgattattacctcatcctcggcagtataatccataaatacctatttttctttgggcgccttcatggcttcgcgcaccttgccttcgatctcgttgcggagctcctcgtcgtttttgagcagttccttgacggcgtcgcggccctgaccgatcttgcggtcaccgtacgagaaccacgatccggccttcttgaccacgccgtaatcgacgcccagatcgacgatctcgccgattttcgaaatgccctcgccgaacatgatgtcgaattccgcgcgtttgaacggaggcgccaccttgtttttcacgactttgaccttcgtgcgggttccgagctgctcctcgccgtccttgatgaccgacatgcggcggatgtcgatgcgcacgctggcgtagaacttcagggcgttgccgcccgtggtggtttcggggttgccgtagaccacgccgatcttgtcgcgcagctggttgatgaagatgcagaccgtcttggtcttggagatgctcgatgtcagcttgcgcagcgcctgcgacatcaggcgggcctgcagacccatcttcgagtcgcccatctcgccttcgatctcggccttgggggtcagcgccgccaccgagtcgatgacgatgatgtcgatggcgctcgaacggatcagcgagtcggcgatctccaatgcctgctcgccgttgtcgggctgcgagatcagcaggttgtccacgtccacgcccaatttctgggcgtagaaactgtcgaaagcatgctccgcgtcgatgaacgccgcgatgccgcccgccttctgcgcttcggcgatggcgtggatggccagcgtcgtcttgcccgacgattcgggaccgtagatctccacgacgcggcctttgggatatccgcccactccgagggcgatgtcgagcgtgatcgaacccgtcggaattaccggtacgtcgctgacttcctgcgagttcatacgcatgatcgaccctttgccgaagtctttttctattttttccatcactgcgttgagcactttgagcttatccgcatttacctgtactttttctgccattgtctttgtctgttattttttcttttttttatcttttctgctgcctcattctgtcgagggcttttaggttgtcgggccgcttgtcggctcgcgagtcgcgcggcagcgggaaccgcagggttcgggcgtccagcgcacggtcgggatacggactccagttgtcggccgaggtgttgccgacgctcatccgccacaggccgacctccttgctcatgtcgcgtttaggaaccatcggcacggcggtggccgcggctttctccgcgcggacctgcattgcctgccgcagcttccgccgggcgcgcaggagcgggtttacctcttcgcgcagccattggaggctgagcggttccggctctttgaacaacagtgtccgggcggcggcgcgggctttgagcgacaactcgtccggagtgtcggacacggggccggccggatattcctgagcatacggctgcaaggtgccggaaagacagcctgcgacgagtaatatgctccccaaccgcttcatcgccctatttgtatgcgtccagaatctgctgataatggttcttggtgtctaccttcgtgaaaaccttctcgatgcgtccttcggcgtcgatgacgaacgtcgtgcgcagtacgcccatgtacttgcggccgtacatcgatttttcggcccacacgccgtacgcttcgcatacgctgtggtcggtgtcggccagcagcgtgaaattcaggtcgtgcttcgcgcagaaattccggtgcgacttctcgctgtcgggacttacgccgacgatccggaatcccctccttgtcagttctgccttgccgtcgcgcaggctctgcgcttcgagcgtgcagcccgacgtgttgtccttggggtagaaataaagtatcgtgcgctgtcctttcaggtcggcaagcgtcagtgtctcaccgtcttgggtcgtggacttgaaatcgggggccatatcccccgcctgaagctgtgtcatgtgttttcgaaaaaagggtttattttttcaaagatagaaatttttcacggattttccatatttccgcgccgactttttgcgcgctaatcccacatgtaagtcacctctatctgctcgttgaactcctcctgcgtggtgttgagtttcttgaggcaggccgggcatcggatggctgtttcggtctcgacgtattcgccgcaacccacgcacatcggcaggatgccgtaacccggctgcatgtagtgctcgaactgcgctccgcagtggcggcacctgattttgtaagctgttcccataatcgtttttcttttaggttcacgttgcaaaggaacggcctttgtgtgacaggttgtgacacaaaataaaaaaaacgtgcgtttttttgtcaaaacacacgtttttcgttctgttttccgccggtcaatgcgcgtgctcggcttccatggactcctgctgggttttgtgtatcgtgccgtgaggatgctccgcgggagcgtagatcgaatagatcttcagcggtttgtcgcccttgttgacgatgttgtgccatttgccggccgggacgaagatcgcatagtcgtccttgacctctttcacgaagtcgagtttgtccgcgctgtcgcccatcatcacctgcgccgtaccttcctccacgcgcaggaactggtcgatgccgttgtgcagctccagcccgacgtcgccgccgacgggaatcgccatgacggtgacctgcaggttgccgcccgtccagagtacggtgcggaaattttcgttggcaagcgtgtagctttcgatgtcgagcacggtcggctcggctccgtagtccttgaatacgatcgtttcggtgacggcctgcggttccgtcgccgccggcgtctgccggctgcaggagcctgcggcgaatgccatgcacaatgctcccagcaatatactgcctgttttcataggtgttggtattttagtattcgtgcaagagcaaatgtagcgaaaaaacgcggctcaggaaatattcgccctgatataattgtgtatatatgtggtaagttcgggcgaatcgacgatgcggatgtcgtccagcagccccaccacgaagcggcctaccccggcgaatcccgccacttcggtgtccagcagccagcgtcccctgcccagcggccggacgtcgcgctcggccagcgggtactcctcgcagagcaggttgtaggccagcagtcccagctccagccgtacgcggcggcgcatgccgccgtgcatgcggaaggcgtcgatgaaaccttcgcggtgttccggttcgtgttcccacggggcttcggtcagctcggcggagccgatgcgcgaggttttgaagagcttgcaggcatgcgcttcgggatcgtagcaccacacctgcacgtaattggtcgtaaaggcgaacggctctaccctgcggtcgcggacttcgccgccgtgcgccgattggtagccgtgcaggatcacctgccgatgctcgtcgatcgcctcgatgagcgtgcggatattcggtgagtttttgccccgtacgaccgtgtccgccagcgttttattgtcgtataccgagtagagtttgcgcttgaggttctgtttgagcatgttcgtgtcgtcgatgttctcgatggcgcttttgagtatcaccgcctcctcctcggtgaagtggacgagctgcgagatgtcgcgaaaatggggcgactccttgtcgagacggatgcagttgccgctctttttgatgacgaatcccgcttcgcggaaggtgtcgatatagcggtaaaccgtccggcgcgacatctgcagccgctcggccagttggtcgatgtcgtatgtggtgttcgctgtcagcagtttcatcagccgcagcaggcgttcgagtttgggttggtccatgatgagttatcgtccgtatttttcgaggtattcgcaaagcgttgcgtataattcgtcccgcctgcaatggatggaggagggcgaaatgttgattgccgaacccgtgagccgttcgtcgagcctcctcagccataggcggagcctgttgtggcgctgcgctgccggcttctgcggttcggaggtgatgactgcgataaagggctgtccgttgatgtctgcttcacggaaggatcggatttcgtgccatttcagcgcgtactctctgccgttcggttggcggaccgtgagtttttcgggtgtgagtgtcagcgcttcgctgttttgcgccaaccgtcggaggacgagcagtccggcagcgaaacagcctccgaaaaagagtatgccggcatagcctgcgatccttacgggcaggttgtcgggatgcaggcggatgagcagcaagccggccgcaacgaatgcaggggcgcctaaaaggatcagggccgccgtccggagcattttgaagtgatagacttttctcatgccgcaaagatataaaaaagccgtgacatatcctgtcacggccctctgtttgggtgttacggtatgtgctgcactattgtgcgagtacttttttttcgatctcttcgacttggcggcggaatgccttgtctgtttcgatgaggttcgacacggctttgcacgagtggagcaccgtagcgtggttgcgccctccgatggccgaaccgatggtcgtgagcggcgctttggtgtgctgcttggagaggtacatggcgatctgccgcgcctgcgcgatctcacgcgtgcgctccgtcgagttgaagcgttcgaaatcgaggttcaggtactcgcatacgaccttgatgatgtggtcgatggtgatctccttctggtagagctgcacgtataccttcagtatctcctttgccagcgacgtggtgatcttgcggccgaggaacgaggcgttggcgaccagcgacgagagcgcgccttcgatttcgcgcacgttggccgagatgttgtcggccagataggccaccacgtcgtccgaaatctgggcgccgagtttctgggcctttacgcggatgattttgagcttcgtttcgtggtccggcgtgttgagctgggccgagagtccccatttgaaacgcgtcagcagccgctgttcgatgtccttcagctccacgggcggcttgtccgaagtgaggatcagctgcttgcccgccagctggaggtggttgaagatgttgaagaacgcgttctgcgtacccgtcttgcccgtcagctcctgaatgtcgtcgatgatcagcacgtcgatcatttggtagaagtggatgaaatcggggatttcgccgttcttgtaggccgtctggaactgcgcctgaaacttgttcatcgagacgtacagcacctgcagttcgggatggcgctgccgcacctcgtggccgatggcctgcacgatgtgggttttgcccaatcctgagttcccgtatatatataaggggttgaaggggttgttgcccggattcacggccacggacatgcctgccgagcgcgccagccggttgcattcgccttcgataaaggtcgcgaacgtcaggcccggattgagctgcgggtcgataattatcttcttgagtcccggaattacgaagggattctttatatttgcggtattggtctgcgtgttgaaacgcgagatggccgtggtgtcggcgtcggcggtgacgggtacggcctgagcggccgaacggggcacggcgtagtgcagccgggtctgctggccgtagagctgcgagatgatcgggcgcaggaacggaatgtagttcttctcgatctggtggacgtagctctcgttgggaacgcgcaggcgaaggttcgtgccgtcgaattcgagcggtacgatcggctggaaccatttcacgaactcctcttcggaggtctgggccttgattcggtcaaggcagttctgccacatatcgctatatgtttgcgcgttgtttaacatgataagggttgcactgtttttgatgtgacaaagttgtgaataattttgcaaaaagatttccgaatttatgttgcaatttcactttttttatatatagaaaaacaacggtttccggacaggcaattttaactccctgatattgaataatagaaatataattcgtatatttgcatataaattttttaaattatcatatacttaaattataagtaaaactaataatcttatggctaacgaattagaacaatcggtgctgaaaaaggcgcaggcatggcttgacggccactatgacgaagctaccaagaagcaggttaaatacctgatggacaatgatatgaaagaacttgtcgagagcttttacaaagacctcgaattcggtacgggcggcctgcgcggcatcatgggcgtgggttccaaccgcatgaacgtctacacggtaggcgctgccacacaagggcttgccaactacctgcgcaagaacttcgcgggcgagcagattcgggtcgccgtgggccatgacagccgcaataattcgcgtatgttcgccgagcgcgtcgccgacattttcgcctcgaacggattcaccgtttttctgttcgacgcactgcgtccgacgcccgaactgagcttcgccatccgcgagctgaaatgccattcgggcgtggtcgttaccgcttcgcacaaccccaaggagtacaacggctacaaggcttactggaccgacggcgcgcaggtgaccgagccgcacgacaagaacatcatcgccgaggtcgccaagattaccgacgtgaacatgatccagctgggcaagaacccgcagaacatcacgatcctcgacgagaagttcgacgaaatctatttaaataaggtgcacgagctgtcgctgtcgcccgaaagcgtcaaaaagcaccacgatatgaagatcatctacaccccgctgcacggttcgggcgtgcgtctggtgccggagtcgctcaagaagttcggcttcacgaacgtgaagctcgtgccggagcaggccgttatcgacggcaacttccccaccgtcgagtcgccgaatcccgaagagcgcaagaccatgtcgatggccatcgaccttgcggccaaggagggcgccgatctggtgctggccacggaccccgattcggaccgcatcggcgttgcgctgcgcaacaagaagggcgaatacgtgctgctgaacggtaatcagaccctcgtgctgctgctgagctaccagctgacccgctgggccgagcgcggcgagctggacggcaaccagtatgtcgtgaagaccatcgtgacatcgcagatggcgaacgccgtggccgactacttcaaagtgaagtgctacgactgcctgacgggcttcaagtatatcgccaagattatccgcgagaacgagggcaaggccaaatacatcggcggcggcgaggagagcttcggctatctggccggcgattacgtacgcgacaaggacgccgtgtcggcctgctcgctggcggccgaggcggcggcttgggccatggatacgatgggcctgacgctctacgagtggctgcaggagctttatgtgaagtacggcttcttccgcgagggcctcgtgtcggtcgtacgcaagggcaaggagggcgccgagctgattcagaagatgatggtcgaattccgggaaaacccgcccaagaccatcgtgggatcgcccgtggtgaagatcaacgacttcctgtcgctcgaaacgaccgacgtgaagagcggttcgaagacccctatcgaacaggataagagcaatgtgcttcagtggttcaccgaggacggttcgatcgtctcggtgcgtccttcgggaacggagcctaagatcaagttctacttcggagtaaaggctccgctcgaatcggtcgccggtttcgagcgggtgcaggccgaactcgacgccaagatcgaagccatcaagaaagacctcaaactggagtagccgcagctgcccagtccgacaaaagcgccccggtcctcaggccggggcgctttttgtcgtattaccccggttggaatttgcacttctaaaaatttagtattacttttactaaaattttagtagcttttgaaatgaaaaatatgtttatccgtacggcggctttggctgcggcatgtatatatatggggagtgcggcggcgcaggaacctctcagacccgaagcgcagctgcgcttcgacgaggcgcggcaggaagcgatcgccgatctgccctcccccgcttttgcggccgattcctcggccggcgcgcgtccgttcgcttataaactcaaccggcggcgtacgaccgaagccgcggcatacgacgcggtaacattgtggaacgtgcgtaaggtgaaggctaaaaaccgccggatgcggttgtcggacactacccggcgcgagaaagtgcgtttgctgaaattctttaccgaacgcaaccggaaaaaaggcgtacgtccgcacctgctgggcaacgttgcgggatatacgtgggccgacggcgtatacgacgagcccggacacaagtggcgcagtaccccaaagcatatcgccgcctacacgctgcgcgacgaatacgattcggtgcgcagggccggaggcgaggtctccatgttcaaggttcccaaggaactttggcggacgttgccgcccgacgccgtttacctgctcgacggggagcgggttccgggcagtatcttccagtttatcgacggactgatcctgcgcacgctcgaaatatacaccgacactgcgacgatggcgcgctgcggtgccggcaggggtgtcgttatcggggacatctatcccgaccgggtgccgctcgtggttttcaacggtgcttttttctcgatcgaatcgtggctgaagatgtgccgggccgatgccttctcggtgtcggccgaggtgccgatgcactatttctacatgcttcccgtcgaagccgtgcagacctatggcgtgcgggggaaatacggtgcgatctgcatcgacatcgtggagtgatttcggcccgaaggactgccgacgacgaagagctgctgccccacgtacgaaagctcgcaccaaatgcgctgtaccgtgccgggcacgttccgcaacaacagcggagcgggccttcgggaggttttaatccgcattgccgctccgcttgtgtgaaaatgtgctccgtcagagtttcggattgctgcggtgccgctctttgtcgcgcaaggttttcttggcgaagttggcttccatggccgccgtgaggtccacgcccgtctggttggccagacacgtcagcacccataatacgtcggccatctcgtccgcgaggttgcatttctcaccctccttgaacgactggtcgccgtatttgcgggccatgatgcgggccagctcccccacttcttcggtgagcacggccatgttggtcagttcgctgaaatagcgcactccgtactctttgatccacgcatcgacccgccgctgtaattcgcttagttccatttgtccgttgatttttccgaaaggtacgaaaaatcggctttccctcgttcggagaaagggggaaatgtcatttttcaatatcccaatcagttgtctccggcttactttatccgaatcaggttcaggccgtcccgcagcggtacgatcacgttttcgacgcgcggatcttcccggaccatgcggttgaactccatcactgcctgcgtgtggcggtcgttatgcgcgacgggctgcacgacttttcccgaccagaggatgttgtcggcgatcagcaccgagccgctgcgcaccagcggacagccgtcgtcgtcgcccatcagcatccggtagtagtccgggtattcgcgcttgtcgccgtcgatgaatacgaggtcgaacacaccgcccagtgcgggagctatatccagcgccgaaccgatgtggagccggatgcgggagccgtgcgcgctgcggtcgaagaacgactgcgccagctcctccagctcgtcttccacttcgacggtatgcagttcggcctccccttccagccctgcggccatgcagagggccgagtaacccgtgaaagtcccgatttcgagcacccgccgcgggcggagcatccgcacgagcatttccagcaggcggccctgaatatggcccgacagcatgcggggctgtatgacccgcaggttggtctcgcggtccagttcgtgcagcaactcctcttcgggcgaggtgtggtcgcggatatattgttcgagcgcgtccattactgcctgcagaatccgtatttgttgaacttgtacgatgcctcgatccggtcgggcgtgtcggccttgagcgcgagcaggcattcgcgggtgaattcgagatatcccgtgccgtttgccgtcacgacgttgccgtcgcgcacggcctgccgctcctcgtagagcgcttcgcccgtgtagttcgccccgccccactgtttcagcatctcgaccgtgttgcccgtatgccgcaccccgttcagcaggccgttggcggccatgaacgaaaccgcgttgcagatggcgccgacgagaatcccgcgcttcagcgcttcgcctgcgagcggcgcgatccgccgggcggcggccgactcccactgcatgccgccgaccagaatcagtccggcgcaactttccggcagcgtcgaagcgtcgtaatcgggcgttgcgcgcaatccgccgatcgaccggacggactctccgtcgggagacatgtattttgcggcgtacgaacccggacggcccggcatgacgcccgaacaaagggccggggcgaggaatgccgcctcccagtctgcaaattcgtcgagcaggacgaatacgatctctttttccataaccttatttataaatcagtctcgacatgccggagaatacctcttcggcgacttcggtcagctgcacggcggtcagcgaacgcaccttggcgtaaacctgttccatcgtgtccacgtcgtcgtgcgtcagaaaacttttcccggcgccgagcatgtagccttcgttgctctcgctcgaaatggcgagctgggcgatgaactgcttcttggccatcgacagctgacgcgctgacaggggcgtcgtgcgcagtttgcgcagttccccttcgatcaggtcgatgcactgcgccgtgttgccgttttccgaactgaagtagatggccacgatccccgtgtcgctgtagggcgtgtagctggcttcgatgttgtacgacagtccgtttttctcgcgcaccacgacgttcagcagcgaattggcgcacggcccgcccaaaatattggtcacgagggccagcggcaggcgtttctcttcgccgatgccgtacgcgcggccgccgatgatgcagtgggtctggtgggtatgcttcaccacggtcttctcgaacggcggccggggtgcggtcgcggcccggacgaatccgcgcgtcgtggccgcctgctgcgcgaaataacgcgccgcgacggtctcggccgtcttggccgagaagttgccgatcgaagagaagaccatctggtcggtcgtgtgcgtgcggccggtgaaggcgcggatcgcgtcgccgtcgtagcgcatgagcgcggccttgcggcccagaatgttgtggcccagctccgagccggcgaacagcatctcttcgaacgtgtcgtatatcaggtcggcgggcgagtccttgtaggtgttgatctcgtcggcgatcacctccttttcgcgctccagctcccggtcggggaacgtcgagcggaaggcgatgtcggcgatcagctcgacggccttcgggaagtcgccccgcagggtcgtggcgtgaatggtcgtgtcctccttggtcgtgaaggcgttcagttcgccgccgaggttttccagccggcagttcacctgccatgcgcggcggcgccgggtgcccttgaagaaggcgtgttccgtaaaatgcgccagcccgtactggtcggggtgttcgtcgcggcttccggcattgacgaccagcgcgcagtgcgccacgttgcttttcacctgacggtggatgccccggatgccgttgggtaatctgtatgtgaagaattccatgattataatttcgtacgcaggctgagaaatttgcccgtatagctctccgggcactgttccaatgcgcgcggagtgccttcgaatacgactcctccgccgcccgtacccgcttcgggaccgagatccacgacccagtcggcgcatttgatgacgtccatgttgtgttccacgatgacgatcgtgtgtccccgctcgatcagcgcgttgaatgccgccagcagcttgttgatgtcgtggaaatgaagtcccgtcgtcggttcgtcgaagatgaacatcacgccgccctgcgcgctgtccttggtcaggaacgacgccagcttcacgcgctggctctcgccgcccgacagggtcgaagaggactggcccagcttgatgtagcccaaccccacgtcctgcagcggtttgagccgctcgacgatccgtttgcaggtcgaatccttcttctcctcgccgaagaacgcgatcgcgtcgtccacggtcatctccagcacgtcgtagatcgacttgccgcggtatttgacttcgagtatctcgtcgcggaagcgtttgcccccgcaggcttcgcagaccagttcgacgtcggccatgaactgcatcgagaccttgatgaccccttcgccctgacactcctcgcagcggccgcccgcgatgttgaacgagaatgccgaagcccccagccccgtatgctgggcgtagggctggtcggcgaacagccgccggatttcgtcgtaggccttgatgtaggtcacgggattcgaacgcgacgacttgccgatggggttctggtcgatcatctcgaccgatttgagcagctgcacgtcgccgacgatgccgtcgaagtcgccgggcttgacgcccgtgtcgaagagcatgcgccgcagcgccggatagagtattcccttggccagcgacgatttgccgctgccgctgactcccgtgatgcaggtcatcacgcccagcggaatccgcacgtcgatattgcgcaggttgttctcgcgggcgccttttatgacgatcgaactgctccatccgcgttccgcggcgggcggggcgatcgcgcggcggcccgtcaggtaatccgccgtcaggctttttttgtttttcagaagctgcggcagcgtaccgctgaaaaccacttcgccgccgttgtaacccgccttgggacctatgtccacgatgtagtcggcggcgcggatcacctcttcctcgtgctcgacgacgatcaccgtgttgcccagatcgcgcagttgcctgagcaccttgataagccggttcgtgtcgcgcggatgcaggccgatcgagggttcgtcgaggatgtagagcgagccggtgaggttgctgcccagcgaggtcgagaggttgatgcgctggctctcgccgcccgacagggtcgatgaaagccggtcgagcgtcagatagcccagtcccacgtcggcgaggtattgcaggcggctgcggatttcgatcaggatgcgggccgcggttttcgtgtcgtgttcgtcgagctgcagtccgttgaagaatacgatcagctcgtccaccggcatcaccacgaggtcggcgatgttccggccgccgatgcggacgtaaagcgcctctttgcgcaggcggctgcccccgcattcgggacaggtcgtcttgcccgtatagcgcgccttcatcacgcggaactggattttccgccgctccgagtcgatgtaggcgaagaactcgtccagaccgtggaaatattggttgccgcgccacaacagccgtttctgctcctgcgtcagctcgtgaaacggcgtatggatcgggaaatcgaacttataggcgttctccaccagcttttccttccatttgcgcatggtctcgccccgccagcaggcgatggcgtcctcgtagatggtcttgcccttgtcgggaatcaccagatcctcgtcgatgccgatcaccttgccgtatccctcgcagcggggacatgcccccagcgggttgttgaagctgaaaaggtgttccgacggatgttcgaattcgatgccgtccgcctcgaagcgcgacgagaattcggccgcgcccttgtccgagatgacggtgcagatgccgtcgccgtaggagaaggcgcgcgccacggagtcgcggatgcgggtttgcgtgtcgtcgtccggcgcgatgcgcatgcggtcgatcacgacctgaatatccgcggctccggtcgtttcgtcgatcgaggggagtatctcctcgatcaggcgcgtctgaccgtcggtgtagactctcatcaggccgtcggagagcagcagcgtcagtttttcgatgattccctgcccttcggccagcacgagcggcgcggcgatgacggcgcggctcccctcgcccagttcctgaatgtatgtcgccacgtcgtccacgctgtagcagcgcacctcctgtcccgatacgggcgaaaaggtgtgtccgatgcgggcgaacagcagtttcaggtagtcgtatatctcggtcgtcgtgcccaccgtcgaacgggggttgcgcgtattgaccttctgttcgatggcgatggccggcgcgatgcccgtgatgatgtccacgtcgggtttgttgattttgcccagaaactgccgggcataggccgaaaggctctcgacgtagcggcgctgtccctcggcgaagatggtgtcgaaggccagcgtcgattttcccgaacccgaaaggcccgttacgacgaccagtttgtcgtgcggaatctcgacctcgatgttcttgaggttgtggacccgcgcgcctttgatatagatggatttttcgtgtgtcatttcgtatcgctgaaaccgcggaatgcggcggaccgcatttccggttttcgatttttaactttcgattctcaaatgtcctcgccggcgatgcttcctccggcttttttcagtttttcggtcagctccccggcgcggctttcgcggatggtgagcaccatcgtgcagaggttgtcgaactcctgcgatgcgattttaggctgctgctccttgatgacgcgcatgatgtcgttcatggcgatgtaggggaaatcgacgcggatcgtgcggtctacggtgcgttcgacgattcgggccgccgcgatcgcctccgccgccgattccctgtatgcggcgatcagccccggaacccccagtttcgtgccgccgaagtagcggaccacgacgatcaggcagtccgtcaggttgttcgaaagcagctgtcccagaatcggcttcccggccgttcccgacggttctccgtcgtcgttggcccggaatgcggcgcctcccggccccagccgccatgcgtagcaatggtgcgtcgcgtcgtagtatttcttgcgcagtccgtcgaggatttcgcgtatctgctcctcctgctgcacggggtaggcataggcgaggaacttgctgcttcgctccctcgacgacgcctcagcgggcgccgcaatggtcagatagctgtcctccggttccaccctaccgcacctttgtaaacagacggttccagcggatgttcgccgggaacgatttgttcgcgtcgagcgacagccagacgaacgaagccttgccgacgatatggtcttcgggaacgaagccccagaaccgcgagtcggccgaattgtggcggttgtcgcccatcatccagtaataatccatgccgaacgtgtagctgtcagcctccgctccgtcgatgaatattttgccgtcgcgctcttcgagcgaatgaccctcgtatgtctcgatgatgcggcggaacagcggcaggttctcggcggtcagctccaccgtcgcgcctttcttgggcacccagatcggtccgtagttgtcctgactccagtgcggctccttccactgcgggaacacctccgtattgggggagaagatgtagcggcggacggagatcacgttgtttagggcttcgattttcccggcggcctcttcggtcaggaacatgtcgtataccgagccgttgccccggtactccgtaatgccgagattctcgatggcgtactgcgaaaggggcgacgacacctgtactgcgtactggtactggatgcccggaatcccctcctgcggcgcaccgttcacccacacctgcccgttgcgtatttcgagcgagtcgcccggtacggccacgcagcgtttgatgtaattctcccgtttgtccacggggcggctgatgatggtgtatttttcggccagacgcttgcgtccctcctctttgccgaacgaatcctcgtagctgcgcagcacgtcgtaataggtggcgttctgattctccagaaggacggtgtcgcccgccgggaagttgaagaccaccacgtcgttgcgtttgattttgcgcaaccccttgagccggtggtacggccacttgacggcttcggagaacgattttttggtctgcgagaagggcatcgtgtgatgcacgaacgggaacgacagcggcgtgttgggcatctgcggtccgtaggtcaccttgctcacatagagatagtcgccgatcagcagcgacttttccatcgacgaggtcgggatgacgtacatctggaagacgaagatatgcaccagcgaagccacgaccgtggcgaagatgatggcgtttacccattcgtatacggtcttgtagaccttgctctgctggcacatacgcgcgttgtggcaccagacgtagcggtagaagaacttcgtgatgtagaggtcgaagatcaccgccagccccagcagcatccagagattgccggtccatacgacgaaccagagcgtgtaaagcagcgaggcgagcgcgaagccgacccatttgttgcggaagaatgccttgatttttcccatattcgtaaatttatttcagcaggtcgtccatcgagtagacgccctgcctgccgcataagaactcggcggctatgacagcccccattgctaacgtacggcggttcttaatcgtatgtttcagttccagaatatcgtctgccgattcgtaggtcacggtgtgtatgcccggaaccatgccttcgcgcacggagcggatttcgagctggtccgcggcggcgtccgccggagtttcgatccggttcgtcgcgtgttcgatccccggcgcgtagttcacccacgcggttttgtcgtgcagctccgagatgacgccttcggccagcgtgatggccgtgccgctcggagcgtccttcttctgggtgtggtgtacctcttcgatcttcgcgtcatagccgccgacgcggtcgatcatcgccgccagctgacggttgagacggaacatcaggtttacgcccagacagtaattcgatgcatagaacagcgccccgcccttctcgcggcacaattgctgcaactcgcccaagcggtcggtccagcccgtggtgccgctcaccacgggagtcgcgttttcgatgcaggtgcggatattggcgtaggccgtcgagggcatggtgaattccagcgccacgtccactccggcaagattcgcggcgttgaggtccgcggcgttgtcggtgtcgatcacgagcgtcacgtcgtgaccgcgttcgatgagtattttttcgatctcgcggcccattttgccgtaacctatgatagctgctttcatgctttccgtctttattgtcgtgcaaattcgtacaaagataatacaacccggccgcactgccaaatttttcaaccgccgccgcgggcgcgtttgtctttccaatggacgctgaacggacgaagaacgggaaaatatttttctgttcgggaaatatttattaactttcctgatagttcctgcgttgcgtttgcttgcccacactataaaaatagaaattatgaacctgcacctcctttttttcctgtcggtcccgttgctgtctgtcggcagtattgcggctcagcctgtttcccgaaacgaggagcgggccgttcataatttgtccgcccaaaccgaggtctttccacaggaaaaggtgtatgtgcataccgataaaccgtattacatggccggagatacgatttggcttcgcgcccatgtggtcgatgcctcttcgcatgtccggacggcgctgagcaaatacgtctatgtcgaactccggagcatggaaaagcctgccttcgacgagccgccttccgctcctttgcggatacggattcgggagcgggagggcgtctatgcaggttatctgccgctgcccatgaccgccaaaagcggtgattacaccctgacggcctataccgcttttatgcgcaatgcgggacccgattattttttccgtgcacccgtgcatgtctcggcgtacggccgccgttacgagcgtcaagcatcgaagcggaatgccgaacgggatttcgatgtctcgtttttccccgaaggaggttatctggtcgaaggcgttccgtgtacgctgggattcaaagcgttgaaacccgacggcaattcgacgtttgtttcgtgccggatcgtcgatgcggaaggtcgggaaacagccgcggccgaaagcctgcatgccggaatggggaaagtctctttcaccccgcagcatgccgggatttattatgccgaatgcagcaattctgagggcattaccaaacagtttcggctgcctgcggcccggagggacgtttgtgtcctgcagatatttccggcttccgaacgtttttccgtgcaggtcgctgttccccgcggatacgatcccggtccgctggccctgcttgtccattgccggggcgaactgtgctactataaagattggggtgcttcgaaggaacacctaacctttatgcgcaacgacttcccggacggcgtgctgcaatttctgctgctggatcgggaaaatcgtccgctgagcgaacgcctgctgttctgttacgacgaagaccggcagccgcaggttacggcgacgcaggataagccccggtacggccggcgggaaaaggtgtcgctgacattagacttcaaagatgccggaggcaatccgctgacaggtgatttctcggtgtcggtgacggataaccgcattgtcgcgtcccgtcgtccgaacgacatccgcacctcccttttgctggaatccgagttgaggggttatgtcgaagatccggctttttacttcgatgagcgggagcctgcccgccggcaggcggccgatgccttgatgcttacgcagggctggcggcggtatgatattcccgcagtcctgttgggcgaatatgccgaaccgtcggaaccgctggaaataggtcaggagatttcggggcgcatccgcaagaccggcatcttccgcaaacggaatttcaaggactaccgggtttcggccctgattccgcagttcgggcattttgcggtttccgaggtggacgctgcgtgccgtttcgtgctgaacggattcgattatcccgacagtacgctctatgtgctgcaggccgaagggccggacggcagggccgacgctgaacttatcgtcgacgaggaggattattccggttccgataacctcctgccggtcccagactggactgcacgtatgcggaactataacgacaacctgtcacagtttaccgacagtctgaaacatatcctgatcgaagaggtagttatttcgggtacgccgcggaaaaggatcgaatccccgtatgaggtgctggcgagcagttcggtcgattataaaaagatcaagcaggagcattacgggaatcttatggaggcattacgaagcaagcatggcgtgagtgtcagaaccacaccgaaaggagatgaaatatttgtttttgggagaagtgcgacatatgtgatagacggaataatctgggagccgtatgaaccgttgacgatagatccgacaatggcatcggcacctttaagtattgaaacgataccctcttttataccgattgatatgataaaaagaatcgatatcattcctccggtcaattcgactttattcggcatgcgggcgaaaggttccggcgttatagccattactaccaaaaacggctccgaacttctgaacgagaaacgggaaaatctcgaccggcttcatatgcaggtcttgatgccgctcggctatcagaaaccggctgaattctattccccgaaatacgagacgccgagacagcgcagcgctccggagcgggacttgcggacgactctctactggaatcccgccgtgaagatatcgccggaaggacgtgccgtgtttgaattttatacggctgacgacggtgccgactatacgctgcatgccgagggcgtagtgaacgatatcgacggtacggtccggcttgcggcattgagccgcgaaataggcgggcctgaaaaatgggcatcgggtttggatataacgaagaatcggcgactgccgattcgataaataacttttatgtaaacgatacatggaaaaagaacagaaaaagacacgcaccgagtgcgacctgcttgggtgtgttgaggtgccggaaaacgtattgtacggcgtgcagaccatgcgcgggctggagaatttcccgatcagcaagttccggttgtgcgagtatcccctctttatccgggggctggcgatcgtgaaactgggcgccgccgtcgccaatcacgacatggggctgctttcggacgagcttttcaacgccatttcgcaggcctgccgtgaaatcatggagggcaaattccacgaattcttccccgtggacatgattcagggcggtgcgggcaccaccaccaacatgaacgccaacgaggtgatcgccaaccgtgcgctggagatcatggggcacgcccgcggcgaataccagtactgctcgcccaacgaccatgtcaactgctcgcagtctaccaacgacgcctacccttcggcgatccacctcggactttatgccacgcacctcgaactgcgcaaacacctcatggagctgatcgcctcctttgcccgcaagggcgaagagttcgcccacgtgctcaagatgggccgcacgcagctgcaggacgccgtgccgatgaccctcggccagactttccacggctttgcgagcgtcctgcagggcgaagtcgagaatctcgaccatgcggcttcggagtttctgtctatcaacatgggcgccacggccatcggtacgggtatctgcgccgaaccgggctatgccgagcgctgtacggccgccatccgggagattacgggctgggacgtgaaacaggccgaggatctcgtgggggccacttcggacacggtctgcatggtcggctactcttcggccatgaagcgcatcgcctcgaagatgaacaaaatctgcaacgacctgcgcctgctctcttcgggaccccgctgcgggctgggcgaattcaacctgccggcccgtcagcccggttcgtcgatcatgcccggcaaggtcaatccggtgattcccgaagtgatgaaccagatcgccttcaaggtcatcggcaacgaactctgcgtgacgatggccgacgaagctgcgcaaatggagctgaacgccatggagccggtgatggcccagtgctgtttcgagtccgccgaactgcttgtcaacggcttcgacacgttgcgcatccgctgtgtcgagggcatcacggccaacgaggagaagtgcctgcagtacgtgcacaacagtatcggcgtggtgacggcgctcaatccgatcatcgggtacaagaattcgacgaaaatcgccaaggaggcgctggaaaccgggcgcggcgtttacgagctggtgctcgaacacggcatcctgagccgcgaggagctggacgaggtgctgaagcccgaaaacatgatccgtcccgtaaaactgaatatcaggccgcggcgttagaaaaatttttgtaaatttgcggaaacttcatcgatcgcaatgcgttattttctcgaacttcggtacaacggagccgcctactgcggctggcagcgccagcccgacatgccatcggtgcagcagacgctggagcgggcgctctctaccctgctgcgcgggaaaatcgaggtgaccggagcgggacgcaccgacacgggcgtcaacgcctcctattacgtggcgcatttcgattgtgcggaaccggtgcccgatccggcgcaggtcgtctacaaactgaatttcctgcttccgggcgacatcgccgtcgggagcatgacgcccgtcggagcggatgcgcacgcgcgtttcgcggcccgcgaacgcgaataccgttactatatcgaaccgcgcaagaatccctttacgcgggatgcgacgtggcagtattacgtgccgctggacatggaccggatgaacgaggcggcggcggcgttgttggaatacgacgacttcacctcgttcgccaagctcaattcgaacaacaagaccaatatctgccgcatcatgcacgcggggtggacggccgacgagcgtggcgtgctctgcttcacgatccgcgccgaccgttttctgcgcaacatggtccggtcgctggtcgggacgctggtcgatgtgggacgcgggcgctatacgcccgacggcttccgcgagatcgtcgggagccgcgacctttcgcggtcgagcggcggcgctccggcgcaggggttgtttttgagcgacgtggtctacccgcccggcgtattcgaacgaaaaatgttttactaaactctaatactttaaaattatgatcggaactatcatttggctgatcggtgtcgcctgcgcaatctggtgcgtcatggacatcttcaagaaaaacatttctaccgccggcaaagtcattgccgcgatcgtggtactgctgaccagctggctggggcttgcggtttattatttctacggccgcgaccatctggaagagtggttcaaataaactgcggagagtctcggaaacgggactctttttttgttccgggccggggatgcgtctcgtggttgcgctttaaggcgaggccggccgccgcggatacgaaaaccgcccctttcggcaggaaaggggcggttctttttcggcgcgatattcggccttacagatggattgctgcgcccatagccgcttcggccgcttccatgacgccctcgttcatcgtcgggtgggcatggatcgtgcgggctatccggtggctcgtcgcgcccagcatccgtgccagcgtcggctcggcgatcatctccgttacgttcatgccgaccatgtgggcgcccagcagcgtatcgtcctcgccgaagaggagtttcacgaagccgtcgcggtcgcctgccgccgtggctttgcccgacgccgtgaaggggaaacgccccgtcttgtaggcgatgccccgctcctgcgcctgctgctcggtcatgccgaccgacgccacttcgggcgaggtgaagacgcacgacggaatggtcgaatagtccaccggtgccgggttcaggccgcatatggcctccacgcaacagattccctccgccgaggcgacgtgcgccagcgcggggccgcctacgatgtcgccgatggcgtaaacgcccggaacgttggtgcggtagaactggtctacgactaccttgtcccgctcgacggcgacgcccagctcttcgagaccgatattttcgatgttggatttgatgcccacggccgaaagcacgatgtcggccgtcagggtttcagcgcccttcttgccctcgatctccacctcgcagcggccttccgcattgacgcggaccgactttacggtcgtcgatgtcagcaccgcagcgcgcagtttgcggaatgcgcgctccatggtcttcgatacctcctcgtcctccagcggcatcatgcggggcatgtactccacgacggtgactttgacccccagcgccgcatagaaccacgcgaactcgctgccgatggcgcccgaacccacgacgatcatcgtttcgggcagtttcgcaagcgtcagggcctgacgcgacgagatgacgcgctcgccgtcgatgggcatgaacgccatttcgcgcgggcgcgcccccgtggccagaacgatgtggtcggcttcgtactccgtgccgtccacgtcgagctttccgggggccgtgagccgtccgaatcccggtatgaggtcgatgttgttcttgcccagcaggaaggccacgcctttgctcatggtctcggccacgccgcgcgagcgggccacgattttttccagatcgggcttcacttcgcccgtgaggtcgagtccgtaatgtgcggccgatttgcagtaggtgtaaacctgcgcgcttttcagcagcgccttggtcgggatgcagccccagttgaggcacacgcccccggcttcggcccgctccacgagcgccactttgcggcccagctgcgaagcgcgtatggcggcgacgtagccgcccggtccgcttcccacgacgataatatcgtatttcataattcggttgaatgtttgttgtccgttaccgttcccctctcggtccggcccgtcgggacgggatttgccggaaggggctttgccgcattattttacgacccggaggatttctccgttgtccttcgccacggcgcgcttccatttctcgttgtaaccggggaactggatcttgtcgggaatgttcctgccgttgccgttgtccacgaagtgcgccggtccgccgtcgccgtcgaggaaggtcagcacgtcggctttctcgctcttgacgttgccgtccatatatttcaccagcaggtatttgtccagcttagaccaacggtcgaacaactgctgcgccgtcgccgtgctgaacgccgtgaggaacttgccgcgcgctttgggcgagagcgacaacgcttcggcgtccacctcgcgtacggtttccagcatgccgttctcccacttgtccacgactttgcggatgtcggccgaaatcatgtcgtaacgcatgtaggcgaagttggtgacccggttgaagagccagaacgccgccgtgggcgaatattcgagcatcgagccgttctgctcgctcaggcatgcgggaacctcctgcgccgagcagtagatcggcgtcaggcacgaagtcgccgcgtcgtccacgccgaaccagaggatgcccatgtcggcgggattccacggccgggcctgcgccacgaaccagaatccggtctgctgcgtagccgtcgcgcgttcgttgacatagctcacgccgtccacctcgaactccatcggacgccagcggtaagggcatgcgctgccgcccgcgccgatgtcggcggtcatgtccatcggggttccctcgtaatggtcgcgcatgcagtcgaagaccgttttgggcgacactttttcgcggggcatgacccacaggggcatgcggttcgcggcgttgtggcccatcgcataatccgcgtatcggtccatatcgtcggccaccgtgcggaagaaggcccacacgcgggcttcgcaggcgcgcagggcgccgaagtcgagcggcgcatatgcgtcgcagaagctgaaatccgcatcgggaccgtcataataccccatttcgcgggcgaacgaaacgacgtcgggcgcgtaaaggcagttttcggggtcgttcttcgggaaggtcgtgatgcgcgcctgattggcgtgtgccgaaacatatccgtcgggaatgcggcgtgcgacccatacgatgcctttattggcgttgccgcccttgccgtcggccttgtaacccttgccgatcagctccatgatccacgcttcgccgggatcgacgatcgagaacgattccccgctcgacgcatagccgtaggtgttggccaattcggcgatcgtggcgatggcttcgcgggccgtcttcgcgcgctggagcgtaatgtaaatcagcgatccatagtcgatcagtccggtcgagtcggccagttccgaacggccgccgtatgtcgtttcgccgatgatgagcgaatgttcgttcatgttgccgaccgtcgagtaggtctcgcgcagctggggaatgtcggtcaggtagcgtcccgtgtcccactcgtaaacgggcatcatggttccggccttgtagtttccgccgggagtgtggtacagcgcgccgtacagtgcgtgcgagtcggcggcgtaggagaccatggccgaaccgtcggtcgaggcgcccttggtgacgatgaaattggtgcaggccgctgccgcgccgtaggcgaatacggccgttgcagcaaggcaatagcggagttttttcatagatttctaaggttttgattccaaatgtacgaaacaaatcctaaacggcaaaacgccgcgcgggtgaaaagcgcgattttatttggatataagggcgttaaaccttatctttacgtcgaatgcgaaccggtcgtattccggcccctcccccggtgccggaggatgacaacagactgacgacgatgaagaaatacctgcttttgctgctgctcggaactttcctctgcgcatgcagttcggacgatggcgaaggaatccctttcgtaaccgacgtggtgatgccctccgaggcgcggacgttcgcccccggcgacgaggtgaccgtttcggccaaaggattcgaagccggcgacgacatcatgctgcgcatcgcgtggcccctgaccaacgcggcgatcagcgaaggctacgccgacggcgtctggggcgtagtgacctcccgcaccgagtcgagcatcacgttcctcgctcccggcggctatcctgcgggtacggccgaggtgaagcttttccgccgcggcagagccatgccgctcggcaggatctccgtttccgacggcacgccgcctgcgtcgtatacgctctacggggttcgcaatgacgatacgggcgaggtcgcaatcagcgaattcgatatgcaaacgggcgaaatcgtccgtaccgaacggttccccggcagccacttcatccatccggtgaaccgccccggttcgaactgcatcttcggactctcgctcgacggcggaaaacggtcggccgccttctatgacctgacgatgcgctatttcagaaattccggcggctaccgtgtcgtgacgaccggcgtgctgcccaattcggaagccgcctacctgttgtgcgaagacaattactgcatcattctgggcatgaccgaaacccgcaccagcgtcgtcgtgccgccttcgtggcggatgccggagggtatcggcgccgaaatgctgaccggcagtcccttcgtgatgaacagcgacggctacgtgatgctctccgtgaacaacgccgagggatgctatacgccgatggtgttcggcaggcgttcggcaggcaccgaagcgcggctcggcgatccggtctatgccgacgggatgatccccttctggatcgtggaatccgcgtccgatgccgccggaccgaaacactccgtctgctgcggctatgccgtggtgaaggacggcgcgacggaactccggctgtacgatcccgcggcgatgaccttcggagaggtgctggcggcggtgccggccgccgtacgctcggtaacggccgtgaccttccccgacagcgatattcaggatcgtatttacatgctctgcgacttgggcgacggcggaagccgggtgcaggtctacgaccgtgcggcgaagtcgctcgacattttttccgggaccgtttactgtacggaaatcgtgctggtgcgctgatcctgcggtaaaataacggcatgcaggcccggaatttttccgggcttgttccgtcttgtacgaattttgcgtatttttacgcatcgaaatcaagcttactatgtctatagcatgtcaattatcgttcgtgcgcagcacgctgcccgaagacgtcacgctggtcgccgtgtcgaagacccaccccgtggaggcgatacgcgaagcctacgacgcgggacaccgcgtcttcggcgagagccgtccgcaggagctgcgcgaaaaatacgaggcgctgccccaagatatcgagtggcacatgatcggccacctgcagaccaacaagatcaaatatatcgcgccgttcgtctcgctgatccattcggtggacagcgcgcgtctggccgaagccatccagcgcgaggccgccaaatgcggccgcacgatcgagattctgctggagatacatgtcgccgacgaagagaccaagtcgggctgggagatcggggagcttatgcggtatgtcggcacggcgcccttcgcccggatgcccgatgtctgcgtccgcggcgtgatgggcattgcgaccaataccgacgacggggaggttatccgccgcgatttcacggagctgaaacgctgtttcgacctcttgcagccctatttcggggcgcggttcaacgtgttgtcgatgggcatgtcgcacgactaccccttcgccgtcgagtgcgggtcgaacatggtgcgcgtcgggtcgctgattttcggggagagggactacgcgaagtaaacggagaagccgtccgttccggccgtgtaaatccccggaggcgcgcaggagcgggattataaacggcggacagccggaatgaagcctaaatttgaaaaatgaatcgtattatgaaggtaggatttatcggattcggaaatatggcgcaggctcttgccgaagggtttgccgcgacgggggcgttgaagccctgccagatcggcgcctgcgcccgcgaccgggccaaactgcggcgcaatacggagccgaaaggctttctggctttcgacgatgccgcccgtgtcgcggagttcgccgacatggtgatcgtagccgtgaaaccccatcaggtcgaagcggttttgtcgcctgtgaaggagctgctggccgggaaaatcgtcgtttcggtggctgccggcatgacgttcggaaagtacgaaaccatacttgcgcccggaacgcaccatctcagtacggttcccaacacgccggtcgccgtcggcgagggaatcgttgtctgcgaacgcctccactcgctctccgatgccgagtggaaagagacggagcggctgttttcgcacgtcgggctggtgatgcaggtcgatactcccctgctgggacttgccgggacgatctgcggctgcggtcccgcattcgtggcgatgttcatcgaagcgctcgccgacgccgccgtcaaacacggcatcgcacgcgccgacgcctaccgcatggtcagccagatggtcgtcggcacgggcaaattgcagctggcgacgggacagcatcccggcgcgatgaaggatgcggtttgttcgcccggcggcacgacgatcgtcggcgtcgccgaactcgaacgcaaaggtttccgcggcgcggtgatcgacgccgtggacgcgattcagaacaaaaagtaatcggattttatctaaaaaagcccggaccggacgtccgggcttttttgtctgtcatgtcagtgtgcaggagcgccgcggaggacgtgtcgtgcgcgttcgaccggacttggatgccggcgcttgtcttgtgactgcggcgggggtatgtccggagcggacgttactttgcggtacgcgggtttgcgaccgagtcgcggacgatcctttcaggcggcagttgcaactgcgtccggcagcgtacctcctcccggatgctctccagcagcagcctgacggccgtttttccgatctcttcgacgggttggccgatacgggttatggccggaaccagaaaatccagatagggattgtcgtcgaacgacaccacggaaatatcttcggggatccgcaaacccgattcgcggatggctttgaccgcgccgagcaggatcgtattgctcagggcgaatatcgccgtgggacggtcgggaccgtccacggcgagcttggtctgccggtagccgttctccagcgagaatgcgtcgccggttatgatggcttcctcctgcagtcccgcttgtcggagcgcgtcgagataaccctgcacgcgccggcggttcggcatcgaatggggaactccctgtatgcaggcgattctgcggtgtccgctctgcagcagaatccgggttgcctccacgcctccgcggtagttgtcggtgcagacgtacggcagcgaggttcgctcgaaactgcggtccaccagcatgacgggcaccgagcggtccaccttttcgaggtggtcgggcgtccggccgcacggaacggccacgatgccgtccacccggcgcgaaagcatcgtccggatgccctcctgctcgttttcttcgttctccatggtatcgaccaccattaccgtatatccgtggctgcgggcttcccggatgatggcgctggcgatgtcggcgaaataggggttcgacacctgcggaatcagtaagcccagcgtattggtgcgcttcatgcgcagtcctttcgccagaaggctcggcgtgtagtcgcaccgtctggcttcggcgaggatcagctcgacggttttccggctgatgcggtatttctccgcctgtccgttcagcacccgcgaaacggtcgatatggcgaatccggtccgtttggatatggtgaccagcgtctctttcatgcggcgttctgttatattattttatggctgccggaacccgtatggctgccggaacccgtatggctgccggaacccgtatggctgccggccccgtttccggtccttccggtctgctccccggtctgctccccggtctgctctccggtctgtcctcggtctgctctttaacccgctctccgacctgcttcccgacctgcttttcaaccggctctccggccggcagtcccgcctgcccgaataggccggtgcgtattgttgcccggtttttgttccgagcaaaagtagccattttttcggatgcggcaagaaaataatgataggcatatgaaaaaataccataaaaaagcttgcaattttcttttattgtctttatacttgcatatgcgattgcacaaacgattgcgcaatacctgatattgataatctgaaattataacctatggaaaaaattgtgattgtcggcagcgccaataccgacctgatcgtccgggccgaccggattccgtcacccggcgagaccgttctcggcggcgaattccggatcgtttccggcggcaaaggcgccaatcaggccgtcgccgtcgcgcggctgggcggcgacgcccttttcgtggcgcgtatcgggaccgaccttttcggagatgaactgatggcccgctacaccgcggaaaagatggatacttcgcatgtcgtccgcgattcgcaggcccctacgggtgtggcgctcatcacggtcgataattcggccgaaaactgcatcgtcgtggctcccggtgcgaatgcgcggctttccagaaaggatatcgacgacgtccggcccgaactggcgaaggccggctatctgctgatccagctcgaaataccgctcgaaaccgtggaatacgcgatacagaccgccgccgaattgggcgtgagggtgattctcaatccggcgcctgcggcgcagatcgacgaaaagtacctgaaatacgtctacctccttacgcccaacgagtcggagtgcgccctgcttacgggacgtcccgtactgaacggaacggatgcggcagccgcagcggagacgctgttgaacaagggggtgaagaacgtgatcgtcacctgcggttcgcgcggcgcgctcgtgaaaaatgccgatacctgcgccgtggtgcccgcatgccgtgtttcggcggtcgatacgaccgcggcgggcgacgttttcaacggggcgctgaccgtagcgctggcggaaggcttgccgctcttggacgccgcgcgcttcgccacccacgccgccgccctctcggtgacccgcatcggggcgcaaagctcgattccgacgcgccgcgaagtggacgacgcccgttttgcgaataacggccgatccgccgaccgaatgacaaccctttaaaacttcgaatatgtttgtagtaaacgattatgcgacggccgtgatactctgcattgtcacgatgttgtgctggggctcgtggggcaacacccagaaactggcaggcaggacatggcgttatgaactcttctactgggactatgtcgtcggcatgctccttttttcgctgatcctctgctttacgctgggcagcatcggcagcgaagggcgtcccttcctcgaagatctcgcgcaggctgcgcccaaagccctcggcagcgtactgctcggcggcgtcatcttcaacgcctcgaacatcctgctttccgcctccgtgtcgctggccggactggccgtcgcctttccgctgggcgtgggtctggcgttggtgctgggcgtggtcatcaattacttgggagcgccgaagggcgaccccgtcattctgttcctcggcgtggcgctgatcgtcatcgccatcgtctgcaacggaatcgcttcgggacgggtccggaaggagccgggttcctcggcgcaaaaccgcaaaggcattctgctggcggtgctggccggcgtcctgatgtcgtttttctaccgcttcgtggccgcggcgatggacctcgacaacttcgaatcccccacccccggcatgctgacgccctattcggcgatcttcatcttctcggtgggcgttctgctgagcaacttcgttttcaacacgctcgtcatgaaacggcccttcgtcggtacgccggtcggttacgacgcctatttcaaaggctcggcccgcacccatttggtcgggatgctgggcggcgcggtctggtgtctgggtacggcgttcagctatatcgccgcaggtaaggccggggccgccatttcctatgcgctgggacagggtgcgccgatggttgccgcggtctggggcgtcttcgtctggaaggagttccggggcgcgggccgctcggtgggctggctgctggcggtcatgttcctcttctttattctcggtctggcatgtatcattctctccggaggcaactgaataacctgaaacgatgaagaaacttttgattctggcggcgcttgccgccctctgtacgccggcggtccgggcgcagcagacgcccgccgcacccctgcgggtgattttcgataccgacatgggcaacgacgtggatgatccgctggcgctcgatatgctttacaaggcggtggaccggggtgaaatcatcctgctcggcatcctcagcagcaaggataccgaattctcgccccgctatatagatatgatgaatacgtggtacggctatcccgaaattccggtcggaagggtccgtgacggcgtggtgctcaaacgcgacgactacgcgcgcgccgtctgcgagtcgggacttttcccccgcagccgcagggaccgggactacggcgatcccgtaaccctttaccgtcgcctgctggccgagagtcccgacagctcggtcgtggtcgtctccgtcggtttctcgaccaatctcggccgcctgctggagagccggggcgatcggtattcgccgctggacggcatcgaactggtgaagcgcaaggtgaagttctgttcggtgatgggcggaagcttcggcgacaagccccgcgccgaatacaatatcgtgaacgacatctccaacgccaagcggcttttcgcgctctgtcccgtacccgtcgcggtcgtgtcgctcgaactgggcaagacggtgaattatcccggagccagcatcgaaaccgattttgcgtgggccggaaagcacccgatggtcgagggctacaaagcctaccgcaagatgccttacgaccgtcctacatgggacatgatgtcggtgctctatgtcctgcgtcccgaaatgttcggggtgtccgaaccgggaatcatctgcgtggacgatcagggatacacctatttcacgctgacgccgcgcggaaagcatacggtgctcaccctgacgcccggacagcaggatgccgtgctgcgattcttcgtgcgggagctgtcttcgaagcctgcgaagtacaggtagacacccctgcggttcgggagacggctccttggggcgcggtcttttgacgaaataagccggagtccgagactccggcttatttcgtgtccggggcttgggtccccgtatgcggtacgccgccctacctcacccgcagcgagcggccgatgcgcagcaccgtggtcgatttgatattgttcatgcggcagatgttgtttaccgtcgtgccgtatctgcgggctattgcgcccagcgtatcgcccgacttgatgcggtgatacttcatggcggccttttcggcggcctccttcttgtcctgctcctcgttggcgatctcgtcgtcgaagtcctgccccgcgttcgaatagatgctgaagaacgatttcttcagcaggaacgtttcgcggctcaggatgccgttcttgaagtcgatcagccgttcggggtcgaacgactggccgtaatagcgcgtctcgaaatggagatgcggacccgtcgagcgtcctgtcgagccgcccagaccgatgatctgtcccgcttcgacccactggttcggctcgaccatgcgctccgaaagatggccgtaataggtctccagcccgttgtcgtggcggatgatgaccagattgccgtacccgcccttgttgtattccgagattcgcacccggccgcagaacgtggcgtaaaccggatcgcccgtcttgagcggcagatcgacgccctgatgctggcggcgacggcgcggaccgtacttgccgcgcggatgcaccgaaccctgatacgggcagtggtagccggtcagcgagtcgatcaggtcgatgaccaccgactggggcatcgacgacatgtctacctccttgtaggggaagagcgtcttcgtatcccagtatttctcgaagatggtgctgtccttggccacttcgcggttgcggacgtatttccatgtgttgttgctgtagagcaccacctgcaccgcgtcgttgcctgagtcgagcgtgtcgaggactacgacgtcgttggtgtcgaaaatcgactcgatctgcttgggagccagccgcagtcgcagcgcggcgatggaatccaccgctgcggcctcttcgggcgacagggccgcgacgtgcagcgaatcggttttctccgcagcctgcggttcggcggccgcggccgtgagcgccgctacggcggccatacatgtaaggcagtattttttcatacgcagtctattgttgtctgataagttcctcggcggcttccagcgccttgtaaaattcctcgccgaagcgtcgcacgatcggctccctgagcgccttgtagaccgggattcccagtttccgtccgcactcgcgcgccggggcgcacaccgaccagcggtggtagttcaaccctaccgtgccgttcgaaaaccgcatgagccggatcggatataaatggcatgagatcggcttgcggaacgccgtcttcccctccagccacgccttttccacggcgcagagcgtgatgccgttctcccggtaggtataggcgcactcggcgccgtcgaccagcggcgtggtcaggtccccgtcctcgtccacgaccatgaagccctgccgctcgacggcttcgatgccttcgggtgtcatatagggcctgtaggcttcgtattcgcgttcgagaatatcgacctcttccgcttcgagcggcgctccggcgttgccttcgacgcagcagatgcccttgcaggccgctatgtcgcatgcgaagcactcgcgcagcaggtcggcgcttacgattttgtcgtctatctcgatcatttgcggcaggtgtcggcgataacgaggtcgaacatctcccccagcgtcatgcccatggccttcgcctgcttgggcacgatgcttcccgcactcatgccgggaatggagttgatctctatcatatagggtttgccttcgggcgtgacgatgaaatcgacgcgcaccacgcccgaacagcggcacgccttgtaggcgatgcgtgtcatgcggtgcagctcctccgcgatttcgggtgcgatctgcgccggggttatctcgtccgaatacccttcggtgtatttggcctgatagtcgaagaagtccttcttggagacgatctccgtgatcgggaacagatactcccggccccccgccaccatcatgccgcagcccatttcgcggccttcgatgcactcttcgatcagcacttcgtcgctttgggcgaaagccgcttcgacggcgggcagcacctcgtcgcgcgtgtggaccttcgtcacgccgaacgaactgccgctggcgtttggcttgatgaaaagcggaagcccgaattcggcgattacttcgtccgggtccgcggtctcgcccttgcagaggaaaatttcacgggcgaggttgatgccgcggcccgccacggtgcgcttggtcgtgactttgtcgaacgtgatgaccgaagaggtcatcgaacacgacgaatagggaacgcccatcatgtccagataaccctgcagcctgccgtcctcgccgggcgtgccgtggatgatgatcagcgcatagtcgaaaaccttgcgttcgccctccaccgtcagcgagaagtcgttcttgtccacctgccattggcggccgtcgggggccgtgtagtgccagtcgcggtggtggaggtctatgaccgtaatgtcgtatttttcgtggtccagcgccgattcgatctgcgcggcgctctgaagcgcgatttcccgttcgggcgaatcgccgcccgccatgagggcaatcttcaaacgtgtcattgtcaggggttgtatatgtctttgtatctgaattccagtatttcctgcaccatctgcacatactgccgcgcttcggcgtggctggcgtccagctgcagtacgcggttgaagtcgttgagcgccgcgccccactcgttgagccggtaatggagtttgccgcgctcggcgtacagttccgtattttcgggttctgcggcgatctgcgccgtcagtgcggccttgcgcgccgccggactccaaagccctttgcggcggatgtactccgcgactcccgcgtcgagcatccgcgagacgtcctcgccccgctcgatccgtccgcgcacctccgtcgaggaaaaatcctgcagcggagcatcctccagcacggtgacgcgtccggcgaaacgcccgacctgctcgctgcggcggggatagacgtatatcgggtattcgagtattttttcgtactccttccagccgtcgagccgttcgagctggtcggcgcccatcaggattgaaaactccatctccgcgccgtggttctcggtcagatagcgcagcgtgtcgatcgtgtacgagggtttgggcagcagaaactccaccaccgaaggtttgatccgctccggcaggcgcgatgcggcgcaggccctttccgccatctcgaagcggtccatttcgggcgccagttcggcggcccgcttgtaggggctttggggcgagacgacgagcaccgcttcgtcgcacaatccctgcttcacgacatattcggccaaggcgatatggcctttgtgtacggggttgaacgacccgaaatagagcattacgcgcttcatgaccggccggctatgaattcttcgatgatgcgggtggtctcggcgatggcttcgtcgagcgagtcgttcacgacgatgtgatcgaattcgggggctttcgtcagctcgaattcggccttcgccacgcggcggtcgatcacctccggagcatccgtgccgcggccttcgagcctgcggcgcagctcctcgaccgaaggcggcatgacgaatatcgaacatgcgtcgccgccgaagatacgcttgaggttgatgccgccgatcacgtccacgtcgaagacgatgatgttgcctttggcccagatgcgctcaacttccgagcgcagcgtgccgtagcaggtgcctttgtagacctcttcccactccacgaaccggttttcggccacggcctgcatgaactcttcgtgcgtcatgaagtggtagtcgcagccgtgccgttcgcatccgcggggtgcgcggctggtcgccgaaaccgaaaattcgaactgcggaaaacgcttcagcaattcgcgtacgatggtggtttttcccgaaccgctcggagcggagaatattacgaccttgcccattataatatgttcagtacctgttccttgatcttttccagctcatccttcatcttgactaccagaatctggatgttcgattcgttggccttcgaccccatggtgttgatctcgcggcccatttcctgcgcgatgaagcccagtttgcggcctgcgccctcttcgcccgcggccacttcgcggaagtatctgcagtggttcgcaaggcggaccttctcttcggtgatgtcgagcttttcgaggtagaagatcatctcctgctccagcctgttgcggtccacgtcggcctgcagcttttcgaggttgtccagaatccgggccttgatggtctccgtgcgggccttttcgaaaggcatgacctcttccttgtagctttcgatcctgtccacgcggccgagcaggtcggcgatcaggatggcgccttcctgcatgcggaatgcgtcgagccgggcggcggcggcttccgtcgcggcgatcagcgccgcatgctcctcgtcggatatgctctccgtctcggtcgataccacttcgggcagacgcatgatgacgggcacgatggcgtcgtagtcggcgtcgatgcccgcgaaggcaagcgtgtcggtcatctggtgcaggtattcgcggaacacctctttatttatacgcgccggcgtctccacggcctgcgactcgacggtcacgaagacatcgaccttgccgcgctggatcgtgcgggcgatgatgttgcgtatttcgtattccgactggcggtatacggccggcagccgcagtccgaggtcgagctgtttggagttgagcgagcggatttctaccgtgatctttttattttgcagagcggcttcgcctttgccgaagcccgtcatcgattttaccattgcggcggatgttaagtttcggcaaaagtaataaaaacaattcaaaaatgccgggtgttcgggacgccgggtgaaatttctttgaacaagttttgcacaagtgttgtattctcaggaatattttatttatatttgtgttagcaaactaacagaatggagttccgaaaccctaaattcacatcagaatattatgaaaaagcacaatttcaacgcgggaccgtcgatccttgcagacgaagtacttgaaaatgcggccaaagcgattatcgatttcaacgggtcgggcctttcgctgctttcgatttcgcaccgcaccaaggatttcgacgacgtgatggccgaagccgacgcgcttttccgcgagatgctcgacattcctgagaactacaagattttctatatcggcggcggcgccagcaccttcttttacgaggtgcccgccaacttcctcggtaagaaagcaggttacgtgaataccggcgtctgggcgaagaaagccatgaaggaggccaagcgttacggcgaagtggaattgctggcgtcgtccgaagaccgcaatttcacctacattcccaagggtttcgccattccctccgatctggattacgtgcatatcacctccaacaatacgatctacggcaccgagtaccacgaggacctcgtttcgcccgttcccctgatcgccgacatgtcgtcggacatcctttcgcgtccggtcgacgtgaccaagtacgccatgatctacggcggcgcgcagaagaacctcgcccctgcgggcgttgcattcgccatcatccgcgaggatatgctcgacaagatcgtgcgcgacctgccgacgatggtttcgttccgcacccatgtcgagaacggctcgatgttcaatacgccgcccgtgttcccgatctacgtgctcaaggagaccctcaaatggctcaagtcgatcggcggcgttcccgaaatctaccgccgcaatcaggccaaggccgcgctgctctacgacgagatcgaccgcaacccgctcttccgcggcacggtggacaaggaggaccgctcgctgatgaatatctgtttcgtgatggccgacggttacgaggagctggctcccgaattcatggaggccgccaagagccgcggcatcgtgggcatcaagggtcaccggctggtgggcggtttccgcgcttcgtgctacaacgcactgcccgtcgagagcgtcagggtgcttgtggagtgcatgcaggagttcgccgccaaacacgcgaaataacatccgcccatggcgcatttctttacctttacaccgaggaaacgtgcggcgtcggacatagattttattcatttaatcgaaaatacaggtatgaaaatattggttgcgacggaaaagccctttgccaagaaggccgtagacggcatccgtcagatcgtcgaaggcgccggatacgaactggccctgctcgaaaaatataccgacaaatcggaactgctctcggccgtggccgacgtggacgcgctgattatccgcagcgacaaggtgacggccgaagtcatcgaagcggcgcggaacctcaagatcgtggtgcgtgccggcgccggttacgacaacgtggacctcgcggcggctaccgcacgcggcatcgtggtgatgaacactccgggccagaactccaacgccgtggccgaactggcgctcgccatgatgattttcatggcccgcaacggcttcacgcccggcacggggtccgagattcagggcaagaccctcggcatccacgcttacggcaacgtgggccggctggtgggccgcaagggcagggcgatgggcatgaacgtgatcgcctacgatccttttatcaccgattcggccgttttcgaggccgacggcgtgaaaaaagtgaattcggtcgaagaattgtataagaactcggactacctctcgctgcatatccccgcgacggagcagaccaaaggctcgatcggctacgacctgctgatgtcgatgcccaagggcgcgacgctggtcaataccgcccgcaaggaggtgatcgacgagcagggagtgatgaaggccctgaccgaacgcgaagacttgaaatacattaccgacatcgccgccggcatccagtccgagctgaacgaaaaattcggcaggcgggtgttcgccacggcgaagaagatgggcgccgagaccgccgaagccaacatcaacgccggccttgccgccgcgaatcagatcgtggatttcttcaagaacggcaatacccggtttcaggtgaacaaatagtgtataacatatgaatcataacatatggtaagaatcaaacctttccggggaatacgccccccgaaacagtacgcttccgaggtggcgtcgcgtccctatgacgtgctgaactccgccgaggcgaaggccgaagccaccgagcgttcgctgctgcacatcatcaagcccgaaatcgacttcgaccccattgcggacgaacattcgcaggaggtttacgacaaggccgtcgagaatttccgcgcatggcgcgaaaagggctggctcgaacaggaccctgaagagtactattatatctatgcgcagacgatggacggccgcacgcagtacggcctgacgatgtgctgcaactacgaggattacctttcgggcgcgatcaagaagcacgaactgacgcgtcccgacaaggaggaggaccgcatgatccacgtccgcaaccagaaagccaatatcgaaccggtgttcttcgcctaccccgacaacgccgagatcgacgccatcgtggccggcgtggtggaaaacaacgctcctgagtacgattttacggccgccgacggcttcggacacaaattgtgggttatccgtgacaggaagaccaacgaccgcattacggagattttcaaggatattccggcgctgtacgtcgccgacggccatcaccgcacggccgccgcggcgcgtgtgggacaggagtgccagcgcaggaatcccgaccatacggggcgtgaggagtactgctacttccttgccgtgaccttccccgcgggccagctacgcatcatcgactacaaccgcgtggtgaaggacctgaacggtctgacctccgcccagctgctcgaaaagctggccgaaaacttcaccgtcgaggacaagggcgccgaggagtaccgcccttcgggactgcataacttctcgatgtacctcgacggccgttggtacagcctgacggccaagcccggcacttacgacgacaacgacccgatcggggtgctggacgtcacggtgctgtcgaatctggtgctggaccggattctggacatcaaagacctgcgcacttcgaagcggatcgacttcgtgggcggcattcgcggtctgggcgagctgaaacgccgcgtggacagcggcgagatgaaggcggctttcgccctctaccccgtctcgatgcagcagctcatcaacatcgccgacacgggcaacatcatgcctccgaagacgacgtggttcgagccgaaactccgctccggcgtggtgatccactccttcgaggagtagccgccgtccgcgttcgattgaaagacagcccgaaaaggctgtctttttttgcggatgcgccggaatcgctatcttgcagtaatgctggtcttttccgtgtggagcctctttttcctcgtctggttctgcatcggcggccataggggccaaaataaatacggacccgatcccaaggcggaataaaacctccgaaatgttttgtgtgcagtgcgttcgggatgctggattccggccgcactgctttcacttatccgtttttcgtgataagatttgttgcattcgtttagaatcttcgggatttttttatatatttgtaaggaacttaacaaaactacggcttatggctaaaataaaaggaacagtcgttgtcgataaggaacgctgcaaaggatgcggagtgtgcgtcgcttcgtgtccgtgcaatgtgctgggcatgtcggctgaggtgaacagcaagggctaccccgtggcccggatggcaaatcccgacgcctgcataggctgcgcttcgtgtgcggtgatttgcccggacagcgtcatcacggtttatcgtcaaaaaatcgagtaagctatggcagagaaagaggtaaaactgatgaaaggcaacgaagtgatcgcccatgcggcgatccgttacggttgcgacggatatttcggctacccgatcacgccccagtcggaggtgatggagacgctgatggaactcaaaccgtgggaaaccacgggcatggtcgtgctgcaggccgaatcggagatctcgtcgatcaacatggtctacggcggcgcatcgaccggcaaacgggtgatgacctcctcgtctagccccggcatcagcctgatgtccgaggggcttagctatctggcgggcgccgagctgccctgcctgattatcaactgccagcgcggcggtccggggctgggcaccatccagccttcgcagggcgactatttccaagcctgcaagggcggcggtcacggcgacttccacctgatcgtgctggcgcccaattccgtgcaggagatgcacgaccacgtggccgtcgcgttcgatctggcgttcaagtaccgcaatccggcgctgattttggccgacggcgccatcggacagatgatggagaaagtggtgctcgcgccgcagcgtccccgcaagaccgacgaggagattgccgccgagtgcaagtcgtgggcgacctacggcaaacccgccgaccgtcagcgcaatatcgtgacgtcgctggagctgcagtccgagaagatggagatcatcaacaaacgccttcaggagaaatacaaggccctcgaagagaacgaggtgcgctacgaagcgatcgactgcgacgatgccgattatgtcatcgtggcgttcggctcgtcggcccgcatctgctcggccacggtcgagatggcgcgcgccgaaggactcaaggtcggcctgctgcgtccgatcaccctctatccttttcccaagaagccgcttgccgaactggccgcgcgcggcgtgaagggcttcctctccgccgagctgaatgcgggtcagatggtcgaggacgttcggctggccgtgaacggcgcggctcccgtcgagcatttcggccgtcagggcggtatgatgttcgcccccgacgaggtgcttgccgcactcaaggaaaaactgattaaaaagtaaagactatggcagaggttgaaatcaaaaaggagaatctggtttatgccaaaccgaagctcattaccgacaacgtcatgcactactgccccggctgtagtcacggtacggtacacaaactgattgcggaggtcatcgaagagatgggcctcgaagagaagaccgtgggcgtttcgcccgtgggctgctccgtattcgcatacaactacatcgacatcgactggatcgaagcggcgcacggacgtgcgctggccgtcgctacggccgtcaaacggctgcatcccggcaatctggtcttcacctatcagggtgacggcgacctgtcggccatcggcaccgcggagtcgatccatgcggccgcccgcggcgagaatgtcgtggcggtctatatcaacaacgccatctacggcatgacgggcggccagatggctccgactaccctgctgggcatgaagaccgcgacgaccccctacggccgcgatccgcgtctgaacggctatccctacaagatcgccgagatgatggcccacctcgacggcgctaccttcatcacgcgccagagcgtgcatacgccggccaacgtgcgcaagtgcaagaaggcgatccgcaaggcgttcgagaattcgatggccggcaaaggcttttcgctggttgaggtcgtttcgacctgcaacagcggctggaaactttcgcccgtcgcgtcgaacgagtggcttgagcagaacatgctgcccttctatccgctgggcgatatcaaggacgtgaaataagaggaccgatatgaaagagactttaattatcgcaggattcggaggacagggcgtcctctcgatgggcaagatactggcctattcgggtgtcatgcaggatttcgaagttacgtggatgccctcttacggtcccgaaatgcgtggcggcacggccaacgtgacggtgatcctttcggaccggaagatttcgtcgcctatcgcccatgaattcgatacggcgatcatcctgaaccagcagtcgatggagaaattcgaaccgatggtaaaaccgggcggcgtgctgatctacgataccaacggcatcacgcgccaccccgtgcgtaccgacatcgaggtttactcgatcgacgccacggccgaatgcgccaaaatgggacaggccaaactcttcaacacgatgattctcggcggttacctcaaggtgcgccccgtggtcgaaatggagaacgtgatggtcggcctcaagaaatcgcttcccgaacgcgcttggaagatgcttcccgaaaacgagaaagcaatccatcacggcggcgagatcatcaagaagatccgctgaccgcagcgacgcttatggaaaagccgtccggagagatccgggcggcttttttcggtccgtaactctgtccgtacgccgggatattcaaaaacgttgtttgtatagacacattcgcgccggagcgcgaaacggacaatgcaaattaggataatctcccgaaaaacagtaaattggtagacgtaatcccgatgtttagtctgcagggcatcaactttgcgtgcccggtcatatacattaaattcttcttattatggacaagaacgaacagcaactgccgcgtctgggcgaacccgttccggcattcgaagcgatgacgacgcaggggaaggtcagcttcccggccgattacaaaggcaaatgggtgattcttttcagccaccctgccgatttcacgcctatctgcacctcggaggtgcttactttcggcgcccgcactgcggagttcaaggcgctgaactgcgagctgatcggtctttcggtggacagccgcaacagtcatatcgcgtggctgcgcacgatccgcgaaaagatcgaattcaagggcatgaaagatataaaggtggaatttccgattatcgacgacgtgtcgatgaaggttgccaatctctacggcatgatccagcccggcgaaagccagaccgctgccgtgcgcgccgtgttcttcgtcgatcccaagggcgtgctgcgggcgatgatctattatccgctggcgctgggccgcaatttcgacgaaatcaagcgcgtgctggtgggcctgcaggccatcgacgcgttcggcgtggcgatgccggccgactggcgtccgggcgacgaggtgatcgttccgatgaagggcgaggagatgaacgaccagcccgaaggcgtgaagtgctacgactggttcttctgcacgcgcccgctgccgaaggaagagatcgaaaagaagctcggcaaggggtacgaaatcaaaggataatcgcaaggggcttccgcaagccccttttttttattgatatatttcggccggtaattttcccgccgggactgccttgttgtcggaaccgtccagcagtcgtctgctttatcgccggaactgtctaattgtcggtactgttcacctgtcggttgttttcctgccggactgtcccgttgtcggctgtcttgcggtcggaatttttccgccgccggagaaggcaaatcccggtctttcgcaacgaaagaccgggatgttcttattacggcagccgtctttgtaaaacggaactgcggcggccgaatgattgcgccggatcgccgggcgaggttatttctgaaaccggtactgtccgatctcccgcagtccgagcagcagctcgcgcaccggaagccgttttttaccggctatctgcaactcgccgagggtgatccacccgtcggcgcatgccacgcggataaaggtgcgtccgtcgctttcgacggctcctgccgcttcgttgtgcgccgccgcttcgaacgccgccgcataaattttcgccgtgagggatgccgtttcgccctctttgcgcatttcggtccatgcggccggatagggcgaaagcccgcgcacgaagttcacgatccgccgtccttcccacgaccagtcgatccggcagtcctccttgaagattttgggtgcaggatgcaagcggctctcgtcgattcccgtctgctccatgggctggacatcccctgcggcgatgcggtccacggtctcggtcacgagcgccgttccggtgtgcatcagtttgtcgtacatcgtgcccacgttgtctttcggaagaatcggcacgcgcacctgcgcgatgatcgcgcctttgtctatttcgtggttgagcaggaacgttgtgacgccggtctcggtttcgccgttgatgacggcccagttgatcggcgcagccccgcggtactgcggaagcagcgaggcgtgcaggttgaacgttcccagccgcggcatggcccagatcacttcgggaagcatgcggaacgcgatgacgatccccagatcgggtttcagcgcctgcatggcttcgacgaactccggcgctttcagcttttcgggctgcaataccggaagtcccagttcgagcgcggccagcttgacctcgctctgatgcagtttctggccccgtccggcgggtttgtcgggtgtcgtgaccacggccacgacgttgtagcccccggcgaccagcgcccggagcgacggtacggcgaattcaggcgtacccataaatacgatgcgcagctctttcggattcattcttcttcgtgtgttatatttggaatgcgggccttctgagccgggttatttcttgtccagtccgagcgtgtggtgcatgcgctcctccttggtcttcaggtagcgcaggttgtgctcattgggggcgatgaccaccggcacgatctcgtcgatccgcagtccgtagccctccagcccggcccttttgagcgggttgttggtcatcagccgcatgtgcttgatgcccatttcgcggatgatgctcgcgccgatgccgtagtcgcgctcgtccacgccgaagcccagctgcacgttggcgtccacggtgtccagtccctcgtcctgaagcttgtatgccttgattttgttgcagagtccgatgccgcgcccctcctgctggaggtagatgatcgcgcccttcccctccttttcgatcatgcgcatcgcttcgtgcagctgatcgccgcagtcgcagcggcacgagccgaagatgtcgcccgtggcgcatgacgagtgtacgcgggtcagcaccggttcgtcctcggtccattcgcctttggtcagcgccacatgctccagcccgttgctcttctggcggaacggcgtgatgcggaaatcgccccatgcggtcggcaggtccacggtttcgcccttctcgacgatggattcctccttcagtcggtatgagatcagcgacgcgatcgagatgattttgaggtcgaatttcttggcgatctcgatcagctgcggcagacgggccatcgtgccgtcttcgttcatgatttcgatcagcgcgcccgcgggctgcaagcctgccagccgcgcaaggtcgatcgccgcttcggtatgtcccggacggcggagtacgcctttctggcgtgcgcgcagggggttgatatgtcccggacggcccaagtccgtggcccgcgtggccgggtcggccagcgcgcggatcgtcgccgcacggtcgtggatcgagacgcccgtggtgcagtcgtggcccagcagatcgacggtcactgtaaagggagtccccagcagcgaggtgttgttctcctccatcatgttgaggccgagttcggcgcagcggtcctccgaaagcggtgcgcagagtacgccgcggccctccttgagcatgaaattcacgatttcgggggttattttctccgccgctacgatgaagtcgccttcgttttcgcggtcttcgtcatcgacgacgatcactattttgccgttgcggaaatcttcgataacctcttccacactattcagaatcgtgctttttgccatttcgtttgagttttatagcgtttttcaatttgttgatcgcgggtcgcatgcgttcgtagagcgccttgaattttccggcgtaccagtccgtgtcgagcagcgccgagtcgttcgtggccttgtaggtcaggtagatcgctatgggcgtgaggatgaacgtcgagagccacatgccgtatacggcgtcccagctcccctccttggccagtttctcgcctgacagactgatgatgtagtagatcacgaagaagatgatcgacacgacgaccggaagtcccagtccgcccttgcggatgatggcgccgagcggtgcgccgatcaggaagaagatcatgatcgacaccggcagcgacatcttcttgtgccattcgactttgctgcggtagagctggttgagcgcctcttttgccgccgactcgtcgaacgagaacatgttgcgggagttcttggccagcgtgcgcgcctgattccatacgcgctccttttcccgcatctgcagcgtagcgatggagtccatcgccgccatgtcgcggaaccggctcttgtcgatgcggagactgtcgggctgcgggagcaccgagttgtcgcgggagaaaatctgctccttgagcagcggttcgtacgagcgcgtcgtcgcgctgttcaccattttttcgagcgagtcgatgtcgtgctgcagctcgttgatattcttcgtctggctgttcgaaaactggttggcgtcggtgcggcccatcgcgaagccctccatcgggatcacctgatcctgcttttcgaagatatggtggcgcagtttgctctgggtaaaccactggctgctgcgggtctgctcgtaggtctcgccgttgaaaagcgtcaccagcaggtatttcttgtcgtccgaaagacggatgtatcccgaatcggccacgatggtgttcatgtcgccgttggccgcgcggttgtcgtatatcagcacgtcgtgcagcagatgcgtttcgggttcctgcctgctgacgcggatcgacatgttgtcgatgccgttgaagaacagtccgtcctgaaattcgagactctgtttctgctggcggatgtcgtacaggatgctgaacacctttttgttggcgtacggcacgaggttgttgccgatgaagaagctgcccacggagatcaggctcaccagaataatcagcggcttggtgatgcgtatgagcgacatgccggccgacttcatggccagcagctcgtagttctcgcccagattgcccatggtcatgatggccgccagcagcatggcaagcggcagtcccagcgggatcatgttggccatgaagtaggtcatcagctcgatgatgatgcctgcgctgagtcctttgcccaccagctcgtcgatgtaacgccacacgatgttcatcatcaggacgaacatcacgatgaagaacgtgaggaccatcggccccaagtaggctttcagtacgagtttatggatggttttcatgcggcggcaccggcttttttgttacgcaaaggtaatagttttactacaataagcgtaagagtgagtgtaaatattatggctgctccgggcggaacttcgaaattgtagcttgcgacgagtcccgcgacgttgcccgccacggcgaccagcggcgcgcagagcgcgatggtccggtacgagcgcgagagcgaattgacgatggccacgggcatcgtgagcagcgaaatcagcaggacgattcccatgatgcggatcgagaggacgatcgtcacggcgatcagcgccgccatcacgtaggagatcacgcgggtcggaatgccccggctgcgggcgaagtcgcggtcgaaggccacgtacatcaccggccgcagccatagcagcgctccggcgatgatgaacagcgtcagaacggtcagcgccgcgacgtcgccgtgcgtcacggtgacgatgctgccgaacaggtatgcggagagatcgcccgacgtgtagcccggccgcaggctcatgaagagcgcgccgacggccatgcccaccgaccagatgatgccgatggccgaatcttcgcggatgcggcccctgctgccggcccattcgatgcccagcgccgagagtactgcgaagatcatcgctccggcgatcgggtcggtgccgaggtaaaacgcgatgcccagcccgccgaacgaggagtgcgtgatgcctccggcgaggaaaaccatccggcggcatacgacataggtgcctatcacgccgcacgttatgcccgaaaggacacacgccgccagcgcgttcgacaagtagccgtattgaatcaggtcgctgaaaaattccatgcctcgctccttatattgcgcgcaaatttacgcttttttctcggaaaagccctcccttttcgcacagttttcgtaatttcgcccggtaaataacgacaatttatgcaacaacgcagagtaaatttccacaccctcggctgcaaactcaacttttcggaaagctcgaccctcgcgcgggagttcgagcgcggcggtttcgtgcgcgtcgcacccgacgccgaggccgacatatgcgtcatcaacagctgttcggtcacggaacacgccgacaagaaatgccgcaacctgatccgcaaactccaccgccgcaatcccggtgccatcatcgccgtgacgggctgttacgcgcagctcaaaccgcaggaaatagcggcgatcgaaggtgttgatatcgtgctgagcaataatgataaaggaatgttatataaacgggtggtcgaactctccggcaagggccgtgcgcagatttacagctgcgataccgaatcgctcacttcgttcttcgcggccttttcgagcggcgaccgcacgcgcgctttcctcaaggtgcaggacggctgcgactacaagtgcgcctactgcacgatccactatgcccgcggcggcagccgcaacatgccgatcgcggacctcgtcgccgaagcccgccagatcgctgcggccggacagaaggagatcgtcatcacgggaatcaacacgggggatttcggccgtacgacgggcgagcgtttcatcgacctgctgcgtgcgctcaacgaagtcgaaggcatcgaacgctaccggatttcgtccatcgaacctaatcttctaacggacgaaatcatagcgttttgcgccgcgtcacctaaattccagcatcacttccatattccgctccagagcggttcggacaaaattctcggactgatgcgccgccgctataccacggcgcgtttcgccgaccgcatcgccgccgtgcgggcgctgatgcccgacgccttcatcggcatcgacgtcatcgtcggctttcccggcgaaaccgaggaggattttcgcacgacgtacgattttctggagggactcaagcccgctttcctccacatatttcctttttcggagcgtcccggaacgcctgccgtcgatatgcccggcaaggtgcagccgtcggtggcgacgcgccgcgtcgccgaactggaagaactttgcgggcggctgcacggcgcattctgcgccaaagccgtcggctccgaggataccgtgctgttcgaaagcaccctgcgcggcggcatgatgttcggctatacgggcagctaccgccgggtgaaggccccctacgaccggacgcgcatcaacgccatttgccgggtgcgcttcggggcaatggacgaatctcacgatctgatgggtgatattctcgattaattcactatatttgcattgataaaatcaaaagaagtatgacgggtatgcgcagaagagtgacgatcggttttttgagtatcgtctgcctgctgtttttttcggggatggtctcgttcgtggaactgagccacctgagccgcgatacgggcgaaatcctcaaggccaacaagcgtaacatcgagctggccaaggagatgctcgacgccgcctatgagcagaacgtggcgcttatccgcctttcggtgttcggagacaactcctacgacagcctttgccggtcgagtatggagcggttggagaacacgctgctcgtggcccagagcgaagccctcgacaagtcgtttctcgactcgctggctttcgcgacgaccgagctgcgcctgctgaccgacaactacctcgccttcggagcgcatgccgcggcgaatccggccgcgcccgattcggtgggccgcagctggtatgacagcgaatacgaagtcctctacggccgtctgaccgctgccatcaagaactatatgacctcgacgcagagctcgctggctccgcgtgccgagcagatgaagaaaaacgcctaccgggccgttacgccggtgctgatctcgctcgtggtgatgatcgccatcgtgctgatgctctactacttcatgtcggtctactgcgtcaaccccattatccggatgaacaaggggctgggcgactacctctcgttccgcgtgccgttcgccgtcaaggccgactgcaaggacgaggtcttggagctgaaggagaagatcgagaccctgataaccgtttccaagcagccaaaatcctgattgcgatgcgagtagacgtggttttgcgatatgtcggggtcgtgatgcttttcatcgcgctgttcatgctgttgtcggcggggatttcctttgtcagcggcatggattcggcgttctatcccctgctgctcgcgtcgctgctcacggccctcttgggggcgtttccgctgatcttcgtcgaacgtacgcagcagatcaccaacaaggagggattctgcatcgtggtcggctcgtggctggtcgcctgtctggtcggcatgttcccctacctgatctggggcggggagttcagtctggtgaacgcttggttcgaaagcgtttcgggctttacgacgaccggatcgacgatcctgaacgatatcgaggtgctgccgcgggggctgcagttctggcgcatgtcctcgacgtggatcgggggtatgggcgtggtcatgttcgcactgctgatcctcccctcgctggggcgcaacaagatgacgctgtcgagcgtcgagctttcgaccttggccaaggataattaccgctaccggacccagatcatcgtgcagattctgctggtggtctatgtgggccttacggtgctgacgacggtgctgctcaaaatggcgggcatgaactggttcgattcgctctgccacgccatgtcggcgtgcgccacgagcggtttttcgaccaaaaatgccagcgtcgcctatttcaacagtccgatgatcgacacgatcctgatcttcgccatggctacggcgggtatccacttcggactgatctatgcgacggtgaccggcaaacgcaacaacatattccgttcggaggtgacgcgctggtacctcgtcatgctgctgggcggcggcctgctgatcgccgtcagtctcttcgccgccaacatataccctacgttttcggccgcgttccatcatgcgcttttccagttcgtgtcgcttgtcacgacgacgggattcgccacggccgactccaaccagtggacgtcgtttgcggttatcctgctgattttcggttcgatcgtgtgcgcctgcgcgggttccaccgcaggcggcatcaagaccaaccggctggtgctggcgatgaagatgatgcgcacgcgcctgcgccagcagcagcaccccaacgcgatcatccgcatcaagctggacggggtcattcaggaaaacgaagcgctccattcggtcatgatatttatcgtcgcatacctgatgctgattctcgccggcacggtgctggggacgatgttcggcgtcgatctgatgaccagcttctccggctcggtggcttcgatcggcaacgtcggtcccggattcggccaagtcgggtcgatggataatttttcgtccgtgccgggcgttttcaaaatatccagttcgctgctgatgcttctggggcgtctggagattttcgggcttatacaactctttttcattaaatggtggaggtaaccggaatgttggttcgtaaaacttgcatattgtttctgttcgcggcgcttctgggcgccggaagcctgcgtgcgcagcagctttcagtcgaagcccgcatcgcggggctcgaaagcaacgaggagtatatgtcgcttctgcgcgaggatgcgcagctgcagatgcgcgaagattcgatcgtcaatgccgtggaacgcgcccggcggcagctgcgcgagaacccggcggcccgccagcagtattcgcaggatattctgcagctcgaaagccggatattcgaaatccgcaatgccaagggccgtctgatcgaccgtatcaacaccatcgagcaggagtgggtgctcgccaacctgaacggcgcggcgtcgcagccggcggggcctgccgcggaaaatcctgcggcggagattcccgattcgctcaaggtgcgcaatctggtcagcaatccctatttccgggaacagctcccggaggccgactatgccgcgctcgtcgaagcgcagcggctggaactcgatgccgtggattacgtgaaccgctattttgccaattacggcacgatttccgagctggccgaagcctacgccgcggcgcaggccgaagccgatgcggcggagatttacgacaaatacaagaccctgcagggcttcaaccgcgtgctggccgattcgctctccgacgcatggaactacatcttcgacaacaagagctatgcttacggttacctgatggacaagctggggcgggacgagattctttcccgcgaggaggagcggctctcggaggccgcccgtcagctctcggaactgcgcggcgagaccgcttcggacgccgtgaccgactatttcctgcgcaagaaggtgctcgtcgggtatgaaacctccgtggccgatatgctggggctgacctccgcgcgcgactcgctgcggggggtgacggcgcagctggagggcatcgacttccggctgccccggatcgacgtcgcagagcgttatttcctcgattacgacagcgtttccttctcctcgacgccgaagtacagctatcagcatcccattcccgaatgcaaggtctacgagcacgggacgatataccgcatcctgctcggcacgttcaataccaagcgcgccgtatcgaccttccggggcgcttacccgctctcctatctggtcaacgacgacaggaaatggtgttactacgccggaggtttcgccacgagggaggaggccgaagcggcccaaaagctgctgaaggcccgcggtttcgtccgccccgaaatcgtcgtgtggaccgacggcgagtaccgcaatctttcgaaggatcccgaagcgcagcatattgcctaccgggtcgagatcgtcagctccgaagcgctttccgacgcggtgaaggcggcgattacggatacggccgaggggtgcgagctttcgcgcgtgggacagcagctcttcgtcgtcgggacgttcgacgacaaggccgtggccgaccgcgtggcggccgcggtgacgcagaccgacccggctttggaaataaaagtcgcggaaattgcggaataattgattttaattcctatctttagtccaatattcaacaacttccctatgacgatgttctatattgtactccttatctttttcggactgctttttctggtggcggagctggtcctgctgccgggcgtgtcgatcggcgcgattctggcgctggtctgctacggcagttcgatctacctcgcattccgcgatctcggccccgtcgccggttcggtggtcgtgctggttattctggtgttgtcgctgatcgccaccgtcgtttcgctgcgcgccaagacgtggcagcgcttctcgctcaaacagaaaatcaattcgtcgagcatgcctaccctgcccgaacaggagctgagcgtcggcgaccgcggcacgaccctctcgcgcctttcgccgatgggcaagatcgaggtgaacggacggacttatgaggccaaatccttgggcgcctatgtggacccccggaaggagatcgaagtcgtcgggttcgagaatttcagcgtcatcgtaaaaacaaccaaataaaaacaaaaaactatggattttcagggtggattgatcgttcttataattttcgtgagcctctttgcgatttggctcatcttctattttatacccgtaggactctggttctcggcgttggtgtcgggcgtgaggatcagcctgctgcagcttatcctgatgcgctggcgcaaggtgccgccctcgacgatcgtctcttcgatgatcgagagcacgaaagccggcctgagtctcgatcccaacgaactggaggcccattacctcgcgggcggcaacgtcaccagcgtcgtgcatgcactggtatcggctcagaaagccaacatcatgctcgacttcaagatggccacggccatcgacctcgcgggccgcgacgtgttcgaggccgtgcagatgtcggtgaaccccaaggttatcaacaccccgcccgtagcggccgtcgccaaggacggcatccagctgatcgccaaggcccgcgttacggtgcgcgccaatatcaaacagctagtcggcggcgccggcgaggagaccgtgctggcgcgtgtcggcgagggcatcgtctcgtcgatcggttcggcggcttcgcataagatcgtgctggagaatcccgattcgatttcccgcgtggtgctcgaaaagggactcgacgccggcacggcgttcgaaatcctttcgatcgacatcgccgatatcgacgtgggcaagaacatcggcgcccagctgcagatggatcaggcgcaggccgacaagaacatcgcgcaggccaaggccgaggagcgccgcgccatggccgtcgctttggaacaggagaacaaggccaaggcgcaggacgcccgcgccaaggtgattctcgccgaagccgaggtgccgctggccatggccgaagcgttccgcaacggcaatctggggatcatggattactacaaaatgaaaaacatcatggccgacacgacgatgcgcgagacgatcgcacggccggagaagaaataacccgtaacgggccgattcgggggtacgtctgtgcgtaccccttttttgtcgccctgaaatgttgcgaaccatgaagaagatttttattatgttgtttctcggagccggcgcctccgccgctgcgcagacgccgttcgccgactgttttttcgacaaaacgatgcgcttcgactactatcacgccggagacagccgctcggaggagtatttcttcgacgcgctgaaggaggagccttactgggccgggtcgaaggtctcgctggtcgatacgaccggatacggcaaccagtttttccgcatcgtggaccgggcgtcgggccgggagatctattcccgcggcttctgcacgcttttcaacgagtggcagagtacgcccgaagccgacagcgtgcgccgctcctatcccgaatcggtagtgttcccctatcccaaacgtccgtgccggatcgagattttcacccgcaacggcaaaggacgtttcgagaagcgtttcagccagaatatcgaccccgattcctattttatcgagcggttcacgccccgctgcgagacgttcgaggtgatgtattccggcaattcggcgcagcgtgtggacatcgtcctgctgcctgagggctacggtgccggcgaacgggccaaattcgaatcggcctgccgcacgttcgccgacgaatttttcagctattcgccctataaggagaacgctgcgcgcttcaacgtccgcgccgtgtggactccctccgacgattcgggcgtgaccatccccggtgaaaacgtctggcgcaatacggcctgcggcgcgagtttctacaccttcgattcggaacgctaccagatggttaccgacttccagcgtctgcgcgacatggcggcgcatgtgccttacgattatatctatgtgctttcgaacacccagaaatacggtggcggcgggattttcaacttttacggcatcagcgccgcgcaccaccccacgcgcaccggaaaaatctatgtccacgagttcggccatctgctgctggggctgggcgacgaatatgtcggcacgacctcctatgacgacatgtacgcgaaaaatatcgaaccgtgggaacccaacctgacgacgctcgtcgggttcggggataaattctggagccggatggtggcggagggaactcccgtgccgacgcccgacacggaggagtacgacggtgtcgtgggcgttttcgaaggcggcgggtatgccgccgagggcgtctaccgcccgtggcggaactgcctgatgaacaacctgcacaaaacggacgagttctgtccggtctgcagcaaggctattgtcgattatatcgacttcctctgcaaataacagagacgcattcccgcaaggccggaaagcctgcgggaatctgcgtttccgggattgtgccggattgaaatacgaagagaggaccgtacggacggtcctctctttccgtatcgtggaagatgctgctgcgggatcgcaggcggccctgccggataacgccggagccgggcaccggatttcccgtttcggatgccgggggcgttacggcgcggaagcctctgtcccctcgctgccggctcagtacacctcttcggggagcgtttcgccgaccggttcgccgttgagttcgtcccgccacttgattgcggcatgcgtgccgtcgcagtaaggcttgttggccgactgtccgcagcggcatgcgacgacgcggttgcggatttcgtacgtctgcccgttttcgcgccgcatgggaatgccgccgcgtatccacaaaccgccgctggcgccgatcgtaatgtcttcgatcaggccgagactcggctcgaaccggaattcatagggtttcatcgtctctttgtcccatgccatgagacggccgctgggacacatcgaagcttcgcggacggccagcctgcgcgcttcgggatcgtcggactgctcggtgagcgaccatgcgtcgccgtgcggatggcagaagcgtgcgaagacgcagtatttttcgttgtccgtcatctgaagcgtgccgccgtcgatcacttcggcattgtcgagcagcgcgtcccgctgcgccgtgagccgcggatcccagctggctttttcatggctgccgtcgcagtagggcttgcggcgggaggctccgcagcggcatagcgccgtgggttccgattcggtcgagaagtgcctgccctcctgaaaataccagctgtcgttggactcgtcgggcatgatgaactgttcggccagcggcggccgcccgtataccagataggggcctgtttcggttacggtgatgctgaaccgctcctctgcgggggagcttcccgtttcaattttcaaattggacatgttggacatactatttgagtttatatttcgtttgggtgtaggcggcaataattattcccaaatcctgacggatgaaatatttgggatgcctttataggatttatcccgctttttggtatctttgcagagatttttttaactgacataaagtaaatttgggcaatatgaaaggattcgtaaaactgatagccgtggtcgtgactgcggcggcgtttgccgtgtcgtgcagtaaggacaaggattcgggcgccgtatcgttcgacaaacctgcggtcttcatcgacgcgcccagcggcatggctacagtgggcttcaccctgcggaacatcaagacgctctccgttacgagccagcccacgggctgggacgagccgatgctcgaccaaaccacgggcatgcttacggtcatagctccttcggccacggctctcgaagagggtacggccgtcgaatcgggtacggtcgtgctggccggggtcactccgggcgggacgagcgtttcgggcgtgcttttcgtcggcgtcgtaaagaccgtggacctgagtgcggcgggtgtggccaacagttatatggcatccgtgaaagagaccaactacctgttcgacgtcatgcacaaaggcgacggttcgccactggcgacggatcatctcggcgttatctggaaatctgcgtcgggactggtgcagtatctgcagatggaggacggcaaggcgtcgttctacatcggagccgacaccgaagacagcgacaagatcctcaagggcaacgccgtgatcggcgcttacgatgccaacgacgaactgatctggagctggcacgtctgggcgacggattacgatcccgaaggcgaaaacgggtcggtcgagctgaacggctatacgatgatgacccgcaatctgggcgcgctggccaacggcaatgcgacgacgtccgagatactggcctcctacggtctttattaccagtggggccgcaaggatccgttcatcggtccgagcacctataagatctccagcggtcagggcgccgccatgtataacgacagcggcagccgcacctatgtgacgatggtcgcgtcgagcgccgagaccggaacgatggattatgccgtcaaacatccgcttgcctttgttacgggcgtcgccgagtcgaacaacgactggctctggagcaagtccgatgccggctggtcgtcggacggcgatgccggcgcaaagagcgtgaacgacccctgcccctacggctggcgcgtcgctccttcagccgcttttgccgggcttgagatcgtcggaactcccgccgcgggcgacgaggagaaattcggctggacgctgaccgacggaaaagccgaatcgttcttcatgggcggcggacgccgccgctacgacgacggcaagattcagaatatttatattccgaaggatgaagcgaagatgaagttgtatacccgtgcggatatcgcgcagccttgggagggactttactggactaccgccgtggacggcacgcagtcgaacgcgcttcatttctggtacgagaagctcaccgggacgggcggcatcgcgcctgccgaagcgtatgcccgcgccaacggcatgcaggtgcgctgcgtgaaggtggagaatatgtagacgaccgatatgcaagacaagacaacgggccggcatgctgctggcccgtttttgtttggtataacagttgcggtgtgggacggtaaactaccgggcaatgaaaatcaaaacaggaaaaggtacgatctcgcttgcggtattgctggcgatctggtccgtgtcggcgatcgcctcgctgccgggacttgccatatctccgattctgggggatctgaaccggatatttcccaaagccaccgacctcgaaattcagatgctgacctcgcttccgtcgctgcttatcattcccttcgtgctgctttcgggacgtctctccgtgggcagggacaaactccggattctcaccgtcggactggcggtcttctttctgagcggcgtcgcctgcatctttgccaagagcatggcgtggctgatcgtcatcagctgtatcctcggcatcggcgcaggcatggtgattccgctttcgacgggactcgtggtcgattatttcacgggcgattaccgcgtgcgtcagctgggctacagttcggcgatcaacaacctgaccctcgtgctggccaccgtcgtcacgggctatctggccgatgtgaactggcatctgccctttctggtctataccctgccgggcgtctcgctggccctgtcgtttttcctcaggagcggtcgctccactcccgaaccggagcagagcatccagatgcgccataagataatcgaccgccgcaagctcgtcgggctgatgctgttctatttcttcgccacctacgccgtgctggtcgtgacgttctacgcctcgttccttgtcgacgactacaagatagacagctcgttctccggcgtgctgatctcgcttttctttctggcgatcatggtgccgggactcttcatcgacaagattatccggcggctgacgcgcagcgtcaatctcgtctcgctcgcattgatctgcgccgggctgctctgcgtgggtattttccgcgacaagacgatgctcgtcgtcggggccttgtgcgcgggcttcggctacggcgtgatccagcccgtcatttacgacaaggcggcgacgatcgctccgccgcgctcggcgacgctggcgctgtcgttcgtgatggcgatgaactatctggccgtgatggtctgtccctttatcgtggaccttttccggcatctgttcggaacccacagcgaccgtttcccgtttttcttcaatgcggcgctggtgctggcgctcgcgctcgtcacgttccgccgccgggacgatttcattctcggactcgacgaatcctattacaaaaattagcggaaacacttggtaataatgtaaaaaggtttatttttgtactgaaaagtcactttttacgattatcaagagatgagaaagattttgttcatggctctggcggtcctcattgcggccggctgcgcggagtccgagaaaggtacgctttgcgtgaagatcgctccggctatccgtacgcgcgtcacgggtctgcatttcgataccggcgaccgtataggtttgacgatctccaaagggagtgccccgtacgccgagaacgtgccgatgacctacgacggcacggcttttacggcgtccgggctgtcgtggtacaacgacctgaatgaaaagtccgtattgacggcctattatccctatgccgaaggcggaagacccgacgaattcaccgtctcctcggaccagacgcagggcaacgggccgtccgacctgttggcggccgtgaaaaccgacgttacgcccgtttcggcgcctgtcggcatgattttctaccatgtgatgtcgcagctgacgatcgtgatctccaacagttcgagtgcggcggtgaccggagtcagcgtcggcggactcgttccgacggccgagatcgactattcggcgccgaaggcggcggctaaaagcggtgtcgccgctgcggaggtcaaagcctgcgaggtgaagcccggcgctacctatcgcgcgattctggtgccccagcaggctgccctgaccgtcacggtcaccacggacgacggcaggagccacactaaaaccctctcttcggcacagctcgaaagcggcagacggtacgatatgtcggttctcgttaccaacgaggagatccaaatttcgctcagcggcgatatcggtgattgggaagacggcggatcgctcgacggcagcggcagcggtgacggcggcgacgacgattcgcagacgctctcctacggcggcgtgacctaccggacgacgactgtcggggagacggtttggatggccgagaacctgcgctatgtgcccgacgaagcgctgctgacgaaaggcatttggtatcccgacggcaacgaggatgcggagtacgtccgcgaacacggcatgttatacagctttactgcggcgctgggcggcgcacaggccgtttccggcgctccggtccggggaatctgccctgcgggctggcatgtaccttatatcgacgaactgcaaacgctggccgcgggtcccgatttcggatttacgctcgccggcatgtggaattccgtttcaaagaactatgtctcgtcggctaaaagcggttatctgatgagtgccacgactgacgacggaggaagcagctacagtgcgctgttgttctatgcgtccggcggcaatccgtcgccttcgtcgctgccggcgggtaacggagtctcgcttcgctgcgtgaaagacgcgaaatagtgcgctgaaccgctgcaacgaaacaaaggtccccgttttcggggaccttttctgtagtgcggttgcactgcgttttttgtgttttgcccggtcgcgcccggcgtcagtcgcggttcaggaagaagatcggaatattggccacgaacacgtcgtcgccgcagagccggtcgcgtttggcgatcagttcgctcagcaggatgtcgccgatgacgtagttgctcttttcgctggtgtactgttcgtgaatcttcgtgaagttcaggatgccgtgaatgtcggtatccgtgtaccggacgtatattttcagcgtgatgtcggtcgtatagtcgggcttctggatatagctcagtttcttgtattcgtagcggtagccgtgcaggcgggccatgatgtcgctcaggatcgacgaagccgtcggaaggcttccggcccccttgccgaacatgaactgccggtcgtagcactcgccgcggatcaccacgccgttgtactcgtcgtcgacgctgtagatatacttggcgggcgtcacgaactccggcatgacgaacatcgtgaagtgttcgtcgcttaccttcacgacctgcgccaccagtttgattttgacgttcttctcgcgggcgtactggatgtccgcatcgtgaatcgtcgagatgccgtacgtgaagatgcgctccggcgcgacataggtgcccagcgcgtgtaccgtgatgattaccagtttgaacagcgaatcgtagcctccgatgtcgaacgacgggtcgctttcggcgaatcccagcgcctgcgcctgtgcgagtgcgttggcgtacgaatccttgtggtcgaaaacgcgcgagaggatgtagttcgacgaaccgttcaggatacccttcacttcgagcagcaggtcgttgtcgtaatactcttcgaggttgcggatgaccggaatcgaaccgcacgacgaagcgtcgtaaagcagcgccacgttgtgctttttctggatttcgatcatttcgggcaggtggtgcgccagcatcgtcttgttgcccgaaacgacgggaatccctttcagcagggcgcttttcacgatgtcgtacgacgctttggcgtcgtcgatcacctcgacgatcaggtcgatttcgggattgtcgaggatctccgccggggagtccgtgaagtgcgaacggtcgatcgaacggggtttgtcgagcgagcggacgcagattttgacgatttcggcattggcgttcttcgatttgcggaccacttcgtaaataccttgtccgacgacgccgaatccgaacaggccgattttaattttacccatatgctgcatgtttgttgattattcgttattcatgaacggacggaggatgtcgttcagctgttcgtgctcgaccagaaatccgtcgtgtccgaacggcgagtctatttcgtggtagacgcttccggcgatcatgccctgcagttcacgcatctcggccggagtgaagatgatgtcggtcgtaatgccgacgacgatcgtgcgggccgcgatccgactcagggcggccgctaccccgccgcgtccgcgtcctgcgtcgtgggtgtcgaatgcgttgagaatggcgtaataggagtaggcgttgtagcgtctgcagagcttctctccctgatactgctggtagctcgatgcgcggtgcacggccggaagctcctcgcggtcctgctgcgtgaggttgtagcccagcgatcccctgtaggtcagcaggccgatggcgcgggccgccgcaagaccggccattcccgcgtcgtcgcgcggctcgccgaacgtccggtcggcttcgatggccatgcgctgcgtctcgtcgatggcgatgctccacggcgacgccttggccgaggtggcgatcagcaccagtttgccgatgcgctgcggctccgtgacggcccattcgacggcctgaaatccgcccaccgaacttccgaccagcgcgccgatgcgtccgatgccgagggcgtcggccagcaggatgtgcgcccgcacgatgtcgcggatcgtgaagggcgggaaatcccggtagtacggtgtgccggtttgcggattcgtgtgaagcggtcccgtcgtgccgtagtgcgagccgaggatgttggcgcagacgacgaaatgacgcgccggatcgaggaatttccccgtttcgaccgtgtgcggccaccagtccgcgacgtccgaattggccgtcagcgcatggcagacccacaccacgttgtcgtgcgcggcgttcagttcgccgtaggtgtgataggcgatcttcagctccggcagcgtgtgtcccgtttccagccggaacggttcgggggatatgtaaatgcggggttccattacagatgtttcagcgcttcgttcaggtcttcctttatgtcgtcgatatgctcgatgccgagcgaaagccgcagcaggttgggatatacgcccgaagcggccagttcctgttcgccgagctgggcgtgggtggtcgatgcggggtgtatgagcagcgttttcgcgtcgccgacgttggccagatggctgatcagaccgaggttgtctacgatcttcgacgcctgctccgcactgcctttcacacggaacgtcagcacgccgccgaaaccgttgcggaggtatttcttcgccagtgtgtggtacttgctgcttttgagtcccggatagctgacgtgttcgatcttgggatgcttttccagccactccgcgaccgcaagtgcgttgtccacgctgcgctgtacgcgcagcgagagcgtttcgagtccctgcgtcagcaggaacgcgttgaacgggctgatgcaggggccgatgtcgcgcagcccttcgcagcgggtgcgggtcgcaaaggcggttttgccgcactctttccagaagttgaagccgtgatacccctccgagggttcgctcagcagcggatatctgccgttgccccagtcgaagttgccgccgtccacgactactccgcccagactcgtgccgtgcccgccgatccacttggtcgccgagtgcgtcacgacgttcacgccccattcgatcggccggcagaggaatccgcccgcgccgaacgtattgtcggtcaccaccgcgatgccgtgtttgtgcgccagcgcgacgatgggttcgaagtcgggtacgttgaattcgggattgccgatcgtttccagataaaccgctttcgtacggtcgtcaatgagtgatgcgatgcttcggatgtcgtcgccctgagcgaagcgcacttcgacgccgatgcgggcgaacgtatgcttgaactggctgaacgtgccgccgtagagaaacgacgtgctgacgatattgtcgcccgcttcggccagattgctgaacgccagatactgggcggccatgcccgatgcggcggccacggccgccgtgcctccttcgagcgcagccatgcgctcttcgaaaaccgaggtcgtgggattgctcagacgggtgtagatgttgccctcttcgcgcagggcgaagcgggccgcgccctgttcggcgctgtcgaaaacataggacgtggtctggtagatcggcagtgcgcgcgaaccggtcacgggatcgggctgctggcctgcgtgtacctgcagcgtttcgaatcggtagtttttcggagtcatatttcgctgtttgttcgttacaaaaaaatccgacctcaaaggaagccggattgtgtcgttcgtgcatacggaaaggttacacccggcggaatcggctgcgcatgcacatcatacccatggtcatcataccgcggagtgttccgcggtacgtgctgtcgtatgtgttcattgcagtcatttcagcttcggatctgtttccaatggtgcaaatatagcggtttttttgagttttacgctcgccgcgggatatttttttggaaaaacctttcccgcggtcggaattttgcatgccaaagatgcgattgcgacccgttttgttaaataaatgagcggaaatgatttggaattgaaaataatgtttatctttgtctcgaagaatgtgcgcaatgcacaagggatagactaaaattatcagatttatgaaacgacttttcgctgtcgcattgtttgcgacaacgtttttggctatttcatgccaaaaagagacgagcgaaggcgaaggcggcggacagcaacccgttgctgccgtgcctgcggacttcgattggaaaatgacgcgcgacgtatcggctgcggtcggtatgccgagcgtcagcggactcgctcccgactatgccgtcgtacgcatctattcgtcgcccgtgctggccgacggaaatatcgttgcgatgggtgtcgtaaaggcttcgcagcctgttttctcgacggccatgacgctgcccgccggggtcaggaacctttatgtgcagactaccctgcccgacggtaccgtgtcggtcagcatgcagccggtttccgcgacactcaacgttgcgggcgccgtaatgaaaagcgccgaagcgccgaaaatccgcatttccgcggctacacgcagcgaaagctcgtcgatgcccggctatccgacgctgtcggtcaaggcggaaagcgacttcgccgagggtgccgttatccgccagacgccggcgggcaatatcgacctcggagccagctggatcgccaaaccctatgccgcggcggcggaatattacattcccgcgggcgccgagattacgggcaatatcaatttgaacggcaagttctcgccccattccgctccggttctctacgtggcgggcaaactgacgctcgacacgtcggttaccgtcgggcaggcgacgcttgcggtgcttccgggcggcgaggtatatatcaaggaggcgaaagccaacctccagcagaatgcggtcaatccggccatctatgtattcgagggcggtacttttacgaccgacaagacgagtttctcctgcaagaccgtcgtcaacgaaggcacgttcgttgtcaacggactgttcaacgtcaacacctcctgcgagttctacaacggagcgacggccgcattgcaggcgggtgaagtcgaggtcaccaacaaggcgaagctctacaacgacgggaagatcgaaagcgccgatttccagctcaacacctatgccgagcttcacaactgcgagaacggcacggttgccatcgacgggaccttctacgtgaccaactattcggtgacctaccagaaaggtgtggcccggatggataggctcgaagcccgcggcggcggtacgctctacgtgaactgccataccgcagcggacgacgtcattgccgaaggggcgaagttctacatcgcttcgggttcgggtctcgacgccggaacggtctatttcaacagcaatacggagctgtatgccgcagccggctcgatcttctcgatggacgagtacaatgcgagcagatcgggcggcaacgtgcgcatcgtcagtcaggcgcaggccgaccagccgatggccgtggtcgtgatccgggagaagggcgtcagttcgcgttattacggcaccaagttcgagggtcttatggaggtcgtctacgacaatgcggccgatgcgaaatacgtcatcgacgccggcagcctgattgacggcgccgtgatgcgcgacaggcagacggtcgtgattgccgagagcaaatgcaacggaggcaaggagcctgtgactcccgacccggagccggaacccgaaatcatcgaggtgatcggtgcgccctacacctattgtttcgaggacggctggccgtggatcggcgattacgatatgaacgacgtggtcgtcgtgaccggcatcgaccggctcgtgaacaaggaaagcggcaaggtgggttccatccgcatcaactgggagctgaaagccgccggcgccgcgcacctcaatgcgttcgccgtgcagctggacaaggtcgccgcttcgcaggtcgccagtgtcgagacgacgaacacggccttcggcaagggggcattcgctggaccgggtctcgaatccggcaacgaatatgccgtcattccgctcttcaacaccgcgcaggagattctcggcgaaggcacctacatcaatacctccaaaggtacggcgcccgttccgaccgtgaagcatacgacgaccgtgactttcacccggcccgtcgatgcggctgcggtgctggaatcggccgtcaacgcctttatcgtcgtcaattcgaagagttcgggcgtattcagccgcgataccgaggtgcatatgccgacctacaagccgaccggattcgcggttgtttcgggcaatacgttcaccgaagccgagccttacaaatacttcgtgtcgaagggaacgggtatgaaggacaactacatgatgtgggcgctgatgattccgggcgagttccgctaccctgccgagcgcaaggacatccgcaccgcctatacctatttcaacgcatgggccgcatcgggcggcgcccagcacgtggattggtacgaggacgaagccgacgaggatatgctctattaaagattcgtatcggttattccgaaccgcaaggccgcaggtttttcctgcggccttgttttgtgtggggagttctccttctccttctccttctccttctccttctccttctccttctccttctcc

SEQ ID NO: 12079 - DNA, 38218 bp, Unknown
  gut microbiota DNA sequence
aaaacactccgcaacgaatagttgcggagtgttttgatattggaaaatacgaattatcgttttttgtcgatgagttcgatgccctgccgggtcgccgcgccgcgcagaatcgttcggcaaaagaggtaaacctcctctcgcgtggcgttgttgagccgcagttccagaatcgtctccagtatgcggtccgcaaaacctgcggcttcgatttcgggaagcagcaacccctcctccttgctggcttcgaggtggtgtgccagttcgcggcgccagaactcgcggtgttcgtcgaaatggtccgcataaattattttatggcgcaggtccgacaagaaactgctttcgaccatgtagaggttggcgatatattcgtacgccagcttgaaagtccgctgcaaggcactgccgctgcgccgtttccggtacgttgcaatgcgtgcgcgctgctggctgctcatagagtcgagacaggagcttatcaactcgtctttatctgcgaacatttcatacagggtgcgcttggagatacccagcgtctggacgatctcatccacccggacggcacggatgccgttccgggcgatgagagtctgcgtaatgcggatgatctcctccttggtcgctccccgcttcattatttcgcctcctcagccatgtcacgaccgccgccgagagcctgatagaggttcacgacgccttgtatttcgtcgaagcggtcggctatctgagacagctgggccgaaagcagcgactgctgggcggtcagcacttccagataggtcgtgctgctatgcttcatcagcagttccgtgctctccacggcgcgctccagcgcctcgatctgctgtacccgcagatcggccttcgcgcgggccgactgacactgcgtaagggcgttgttcacctcggcgccggcgttgagcagcgcctgctggaacgccagcttggtctcctcctgctgtgccttggcgatcttcacgcgggcgcggttggcattggcgttgaagatcggctgcagaagcgatgccgccgccgaccaaaggatcttgccgggatctttgatccccatgccgctgttgttggtccatccgagcgtgccgctcagcgtgatcgtgggataaagggccgagcgtgcttcgctggtggcgtagtaagactgcatgagcgaatactcggcgctgcggatgtcgggacggttcgaaagcatctgcacgggcacgcccaccgtcaggtcgtcgggcagccgctgtccttcgagccggccgcgctcgatctggtgcgggccttcggccagcagcgtgcagagactgttctcggccatacggatctggtattgcagatcgtgcagcgacgcttcgatcgaaaggcaggtgccttcgtactgggcgacggcggcttcgttggccatgccggcctccttcatcgcccgcattgtgcgcacgctctcgcgccatttcacggcggtctgctcggttacctcatattgcccgtcgagcatcagcagcgtgtaatagaggtttgcaatgcctgagatcagctgcgtcttcacggcctgctcgtactcccggctctgggcgtagagcgctttggctttgcgcttggcattggtcagaccgttgaaaatgtcgatctgccagcttgccgtcacgggaatgttgtaggttttcgacggcgtcgcccagtcgaaactgctcagattgccctgcggtgcgaagttgaacgacggcaggtaagccagacgcgccgatttaagcgtcgcctcggcctcctttacccgccactgcgccgactgcaggtcggtgttgttctccagtccctgccggataagcgtctgcaggtagggatcggagaacatctcttcccagccgatattgccgatcgtcatcgtatcggcggtttcggccgtgccgtagagtccgtcggttttcacttcgggacgcgtatagggcttgtagatgccgcagccggtcatggccgctgcggccagtatgataataagctttttcatcttgttactctttctcgtttttacactcctccagctcggcgcgcacggcccactgcggatcgggatcgaactccagcggcttgaccttctcctgcagggtctggaagacgatgaacagcgtcggtacgaggaacagcagcgccagcgttccgacgatcatacctcccacgacacccgaaccgagggtggagttgccgttggcgcccacaccgtgcgagaacaccagcggaatcataccgaatacgcaggtgaggacggtcatcaggataggacggagacgggccttggcggcggatacggcggcctgcgtgaggctcatgcccgcggcgcggcggtcggcggcgtactccgtaatcaggatggcggtcttcgaaagcagaccgatcagcatgatgatacccgtctgcaggtagatattgttctccagccccatcatcttggcgaagaggaacgaacccagcagaccgcacggcacggagagaatgacggcgaacggaatcaggaagctctcgtacagagcgctcaggatgaggtagatcagcaggagacagatgccgaagatgatcgtcgtgttgctgcctgtctgcgcctcctcgcgggtgatgccgtcgaagtcgtaaccgtagcctttcgggagcacctgcgccgcgacttcctgaatggcgcggatggcgtcgcccgacgaatatccgtcggcggcggtgccgttcacggcgatcgagctgtacatgttgaagcggttgagcacttcggagctgtaaaccctcgtcagatccacgaactgtcccagcggagccatctccccgttgttcgtacgcacgaagacgttattgagcgactcggtgttgagacggtatttcgggtcggactgaatcgtcacatagtacatcttcgagaagcggttgacgttcgaaacgtactggccgccgtagtatcccgaaagcgtcgagagaatcgcgttaggcgatacgccggcgcgtttggccttcgccgcgtcgatgcttacgacgtactgcgggaagttgatgttgaaggtcgagtaggccattgcgatctccggacgctggttcagcgctccgatgaaccgcaggtagatgttgtagaagtcggtcaggctgccgtccgacttatcctgcaggtgcatggagaagccggttgaggtgccgtaacccgaaatcatcggcggcgccacggcgaagatctgcgcgttcttgatatcggccgtgcgtccgtagatctgaccgatgaccgcgtttacggcatccgttttttcgggacgttcctcccaatccttcagcttgatgatacacataccgtaggacgaaccctgaccggcgatcataccgtatccggccacctgcatgaagtccctgatctggggaatggccttgatgcgggcggagacctcttccatgacctgatgcgtttcggcgagcgaagtgcccggagccgtcgtgacgttgaccatgatcgtaccttggtcctcgtcgggcaccagacccgtcttcgtggtattcatcagtaagacaagggcggcgaaggccagtccgagcgtggaccacatcagccatttgtgcttgatgaagagcagtactccgtgcttgtatttgttgatcatggcgctgaatccgctgttgaaagccttgcggaagcgtgccgcgaagttgtcgcgcatttcgccgttctcgtcgagatacggtttgaggagcagtgcgcagagggccggggagagcgtaagggcgttgatcgccgagataccgacggccacggccatcgtgataccgaactgcgtgtagaatacgcccgacgttccgcccatcatggctacgggaatgaacacggccatgaagaccagcgtcgaggtgatgatcgccgaggtgatacccgacatggcgtcgatggttgccatataggaggacttatatcccacgtcgaaacgcgcttggacagcctccaccacgataatggcgtcgtcgacgaccgtaccgatggcaaggacgagtgcgaagagcgtcagcaggttgatcgagaatccggccaccgagaggaacgcgaaggttccgaccagcgccacgaggatcgagatcgtggggatcagcgtcgagcggatatcctgcaggaagacgtataccacgaggataacgagcaggatggcttcgatcagcgtcttgatcacttcgttgatcgaggcgtagaggaagtcgttcacgctctgcaggtgtgcgatggcgacgcctttgggcagttcgctttcgacctcttcgagcagtgcgttgatctcgttgacgacctgcgtggcgttcgaaccggcggtctggaagaccatcgtgctgacacccggatggccgttggtgtagcccttgtaggcataggattcgctgcccagctcgatgtcggcgacgtctttcaggtgcaggatcgtaccgtcgggttgtgcgaggagtacgatttccccgaattcctccggagtcatcagacgtccgcggtacttcatcgtatactggaacgtgttctgcgagttttcacccagcgtaccggttgccgactcgatgttctgctcggcgagggccgccgttacgtccgacgggatgagcttgtactgggccatcacgtcgggcttgagccagatacgcatcgagtagtcggctcccagcgtgaaggcttcgccgacgcccgcgatacggagaacgcgcggctcgatgttgatcttcagatagttcgacaggaacgtctcgtcgtaggagtcgtcggggctgtaaagcgagaatattttcaccatggaggtctggcgcttcatggtggtcacaccgatctgcgtcacctccgagggcagctgtccggtagcgcgcgatattcggttctgcacgttgacggcggccatgtcggcattgattccctgacggaagtaaaccgttacggatgcgctgccgactgcggcgctggaggtcatgtaggtcatgtcctccacaccgttgatagcttgttcgagcggtacgatgaccgatttctggatggtctctgcgctggctcccggataggaggcgtgcaccatcaccgtcgggggagcgatgtcgggatactgctcgacgggcagcgtcgcgagaccgataagaccggcgattacgattacgatggatatgaccgacgccagtacgggtcgttcgataaaatgtttcagtgtcataggttattcctccttttcggtttgggttgcggcctcaggagcggcctgcgctgcggcgccctgtcccttggcgacgataggcgtaccttcgcgcagcaggcccacgccttcggcgacgatcacgtcgcccggcgtaagtccggacttgacgatatactctctgccgttgttgatcttctccacgtcgatcatcgacgatgcggctttgccgtcctctaccttatatacgtataccttgttctgcagttcgaaggtcgcaacctgcggtacgactacgcagtctttgtggatgttgggcacgatcacgctgccggcgccgccgctatggagcaggccgtccgcattggggaacacggcgcgcagctgtacgctgcccgtcgaggtgtcgatgacgccgctgatcgactcgatgcggcccgtccggtcatagaccgaaccgtcgttgagcaccagctgtacgtcgggcatgttcttgagcgtgttggcgatcgaaccgtactgacgggtcaggttgagcagctggttctcggtcatcgagaagtagacgtatacgtccgagttgtccgatacggtcgtcagcggctgcggaatcgatgcgcttaccagcgcgccgacacggtacggcagcgttcccaccacgccgttggccggagccttcacgaccgtataggagaggttgttggcggcgtttacgcgctgcgcctcggcctgcgcgagctgggccttggcagtcagcagcgtgttttcggccgtcagcaggtcgtactgcgaaaccacgttcttggcgtaaagctcctttttgctgtcgtaggtgagctgcgccgtggctacgccggctttggcagccgccacgttggcttctgcggtctgcagcgccgctttgtacggcacctgatctatgatgaaaaggggctggcctttcgaaacggtctgaccctcgtttacgcagagttcgaagatggttcccgaaacctgcggatagatggcgatgtcctgacgtccgcggatggtcgccgagtagttgatcgggatttcgcggtcggtagtggctatggtcatcacggcgtattccgcggggcccattgccgtcggtgcctgtccgcacgaaacggctgccatgaagcaggccatgacggctgctttcacaaatgtttgcttcataattctcctcttttttaaactaaaaaaactttttacggtgcaaaagtaccgtaaaaaggccgacgatatgccattatattgcgaacagtgttggtgtttttcggaacaaaatttaggaaattaatgaaaaaagcgttaaatttgttcgaaaaaagaattgttatgtcagcgactaaccccataataaccacaccggaagaacagttcgtcgtcggagagtccgatttcgcctttttcggcaattatgcgagccgctgcgaaggcggggcgatcctctactgccgcaagggcagcgccgaggccaccgtgaaccaatattgcggtcaggtgcgccgcaacacgctgattctggtgctgcccggctcgctgctgatgctgaccaaccgcacggaggatttccggatgaccttctgcgccttctcgcgggaccttttcgccgaagccggcttccgtctcgaaccgtcgtttttcaggatgctgcgcgaaaatccgatcacctatccgcccgcccgcatcgtggaaggcgccagtacttggtttcagatggccgcatacacctaccgcgaccgcaacaatgtgttccgcaatacgatcatccgcaaccgcctgcagaacgtgctgctggagatttacgacaaattgcagcgttacgccaacatgcaacagcagacgcccgaaacgacgacgcgccagacggagcttttccaccgtttcgtcgcgctggtgcacgaacacagttcgcagcagcgcgaggtgtcgttctatgccgacaaactctgcatttcgacacgttatctctcgaccatcgtgcgcaatatcgcgcatagctcggccaaggagttcatcgaccgctcggtgctgctggagatcaagatgctcctgcagtcgacggatctgtcggtgcaggagatcgcctaccgcctgcatttccccgaccagtcctatctggggcgttatttcaagaagcatacgggcgagtctcccaccgagtaccgcaacacgaaaaaataagctgccccgataccggggcagtttttgtttcgcgccggctgtcgtgtttggaccctgaattgcagggcatgtcgtaaaatacgaaagattatgagcaagacgattgaaattcttggggaaaaggccgaatactacctttcccatgtgtgccggaccatcgataagaaactgctgtatcttcccgcgcccgacaccgtcgaccgggtctggatggagtccgaccgcaatatccgcaccctcggcagcctgcagtggatactctcccacggccgtctggccggtacgggctatgtgtcgatcctgcccgtggatcagggcatcgaacatgcggccggcgcgtcgttcgctccgaatccggcctatttcgatccggagaacatcgtgaagctggccgtcgagggcggctgcaacgccgtggcttcgaccttcggcgtgctgggcgccgtggcgcgcaaatacgcgcacaggattccgttcatcgtgaaactcaaccacaacgaactgctctcctaccccaattcctacgatcaggtgatgttcggcaccgtgcgcgacgcttggaacatgggcgccgccgccgtcggcgccacgatctatttcggctcggaggagagccgccgccagttggtcgagatcgccgaggcattcgactatgcccacgagctgggcatggcgacgatcctgtggtgttatctgcgcaacgggagcttcaggaaggacggcgtcgattaccacgcttcggccgacctcacggggcaggcggaccatttgggcgtgaccatcaaggccgacatcgtgaagcagaagcttccggagaacaacggcggtttccgcgccatcggtttcggcaagacccgcgacgaggtttacacgaagctgaccaccgaccaccccatcgacctttgccgctatcaggtggccaacggctatatgggccgcgtggggctgatcaattcgggcggcgagtcgcacggcgcgtccgatctgcaggaggccgtcatgacggccgtggtgaacaaacgcgccggcggcatgggtctcatcagcggccgcaaggctttccagcggcccatggacgaaggcatagccctgctcaacgccattcaggacgtatatctcgatcccgaagtgacgatcgcgtaataacggcccggcgtataccgttctatattaagtaagaaaaagataaaatcgtgcattatgaaaataaccttcttcggcacgcagccctatgaccgggagtcgttcgaccgcgccaacgagcgttacggattcgaattcaattaccaccgcagccacctgaacggcaacaacacttcgctggcgcagggggccgatgcggtctgtatcttcgtgaacgatacggccgatgccgccacgatacgctctttggcggcgatggacgtgaagctgatcgccctgcgctgcgcgggattcaacaatgtggatctgaaagccgcggcggaatacggcattcccgtcgtgcgcgttcccgcctattcgccgcatgccgtggcggaatacgccgtgatgctgatgctgacgctcaaccgcaaggtccaccgcgcctattggcgcacgcgcgacggcaacttctcgctgcacggcctgctgggattcgacatgtacggcaagacggcgggtatcgtcggcaccggaaagatcgcccgcgaactgatccgcatcctcaagggattcggcatggaggttctcgcgtacgacatctaccccgacccggaatatgccgtgcgggcgcagatagaatacgtgtcgctggacgaactttaccgccgctccgatatcatctcgctgcactgcccgctgaccgacgaaacccgctacatgatcgacggcgccgccatcggcaggatgaaacccggcgtcatgctcatcaatacgggccgcggtcagctgatccacaccgaagcgctgatcgaggggctgaaggagaagaagatcggcgcggccggactggacgtgtacgaagaggaggccgcttatttctacgaggatacgtcggaccggatcatggacgacgacgtgctggcgcgcctgctctcgttcaacaatgtcgtcatgacctcccatcaggggttctttacacgtgaagcgctggataatatagcgcacaccactttgcagaatatcaacgatttcgccgagcaccgggagttgcggaacgaggtgcgcgccgaaccggaaaaaacgatgaactgaacgatgaaaaaagttgttttgctccgccacggcgagagcacatggaaccgggaaaaccggttcacgggatggacggacgtcgatctgagcgaaaaaggcgtcgccgaggccgaaaaggccggccggctgctgcgcgaggagggtttcctgttcgggcatgcctatacctcctacctgaaacgggccgtgaagacgctcgacgtcgtactcgacaagctggatcaggactgggtgccggtttcgaagagctggcggctcaacgagaagcattacggctctttgcaggggcttaacaaaaaggagacggccgagaaatacggcgacgagcaggtgcacatctggcgtcgcagttacgacgtggctccggcgccgctcggcgaagaggacccgcgcaacccgcgcttcgatccccgctaccgcgacgtacccgaagcggagctgccccgcaccgagtcgctgctcgacaccgtcggccgcatcatgccctactggaaatgcgaaatcctgcctgcgctcgcccgccacgactccctgctggtcgtggcccacggcaacagcctgcgcggcatcatcaaacacctgaaaggcatctccgacgaagcgatttcggagttcaatctcccgaccgccgtgccttatgtcttcgaattcgacgacgggctgaattatgtcagggactatttcctcggcgaccccgaagagatcgccgcgctgatggccgccgtcgccgatcagggccggaaatagcgcggcgcgaattccggcgcgggaaggtcggattcccggccttcatgttttagctcccgctcattgcgagcgggggttttttttcggcgcgggtgatgcgattctctggggtggctccggttgccgccgcctgaatgcgataatgcttcgttgcggcgtcagttcgtcgtccggtattcgttgggcgacatgccgacacacttcttgaacaaccgggtgaagtgctggggatagcggaaaccgagttcgtaggcgatttcgctgatcgatttcgtcgtgtcgaatatccgctccttggcgatgtcgatcaccttcagctgaatgtactcctgcgccgatttgccggtctccttctttatcaggtcgccgaaatagttggccgacaggtgcagctgttccgcgcaccagcgtaccgaaggcaccccgtcgcgctggggcgtgtcgcctttgaaatagtcgttcagcagccgttcgaaccgggacagcgcgtctttgttgacctcgctgcgcgtgatgaactgccgctcgtagaagcgtatgctgtagttgagcagcagttcgatgttcgatacgatcagccgtctgctgtgcttgtcgatggcatggttcaattcgcccgttatgttctgcaggcattcgagcaccacgagccgctcctgctccgagagatgcagggcctcgttggcttcgtacgaaaagaaggtgtattcgtccatgctgcgtccgagcgacgtgccccggatcaggtcggggtggaacagcagcgcccagcctttgggctgaaacacctcgccgttgtcctcgatgccgaccacctgccccggtgcgatgaatacgagcgttccctcctgatagtcgtaatagtggcgtccgtagcgcatgtcgccgcatttgacgtctttcaggaagacgcagtagaatccgtacatgcgccgggcgtgccgggccttcgggcatttcgaaaagtcgatgacgctgaccagcggatggagcgtctcctgccccatcatttcgttgtactggtagacgtgctccatttttacgatctcgtccatatgcttcgattattgttgtctgtcacaaagttaatgcttttttccatgcccgccgcaccttcgcggccgaatcggtaataatggtatgacgaaccgtaattcgggtaatgacacgccgccggaatcgccctacttttgcagtgtgaaacggacccgaacccgataaaccgggaaaacggaaggtggttccgtcggtcggaatacgggtttgaaatcaataaaaggagaaaaaatggagcatagaattttaaacaacggcgtcgaaatgccggttctgggtttcggcgtctatcaggtcggggagacggtctgcgaacagtgcgtacgcgatgcgattgcggcgggttaccgttcgatcgacaccgcttcggcctatctcaacgagcgggccgtgggccgggcgatccggcggagcggcgtaccccgcgaggaacttttcattacgacgaaactctgggtgcaggacaccgggtacgagagcacgaagcgggctttcgccaagtcgctcgaacgcctgcagctcgattatctcgacctctacctgatccatcagccgttcggcgacgtctacggttcgtggcgggcgatggaggagctttaccgcgaaggggccgtccgggccatcggggtgagcaatttccagccggaccggctggtggacctgatccttcacaacgaggtggtccccgccgtcaatcaggtcgagacgcatcccttctgccagcaggccgaagcggccgcggtgatggcctccgagggcgtgcagatcgaatcgtgggcgccgttcgccgaggggcgcaacaatctgttcggcaacgggacgctggtgtcgctggccgtgaaataccggaaatcggtcgctcaggtcgtcctgcgctggctgatccagcgcggcgtggtcgtgatcccgaagtcggtgcgtccggagcgcatggccgaaaatatcgacgtcttcgattttcacctcgcgccggaagacatggacctgatcgcaacgctcgacacccggcggagctgttttctgtcacaccgcgatcctgagaccgtgaagtggctggggacgatgaaatacgagatggactgatcggcaactgaggatatgatgaaaacgcgaaacgatgaagcaactaatttttataattgcggccgcactgcttgcggccggaacgtgtaaccggataaatgctcggaatatggaaaaaccgaagaaaatcagtgcgttccccgtcggggacaaactgcccgaaacattctcgaaatattttgtcggtcaggcatatctggcccggctgacgcggaacggggcgctcaactgcccgatttcgaacgttacgttcgaacccggatgccgcaacaactggcatagccatacgggcggccagattctcgtcgccgtgggcggccggggatattatcaggccgagggcgagtcggcccgcgagctgctgccgggcgacgtggtcgaaatcgctcccgatgcggtgcattggcacggcgcggctcctgacagctggttctcgcatctggcgatcgaaaccaatccgcagaccaaccgcaatacgtggctcggaccggtggacgacgcgcactattccgccgcgaccgccggggctgccgcgatcgcctccacacccgcctctgcgaccgctcccgccgccgggattgctgcgactgccgaatcctccgccgcggccgtttccgcggcaatgtccatgtcctccgcagcgcccattcctgcggcaatgtccatgtccgcaacagcgcccctgtcctcggccaagagcgcggctccgcgcctgcgcgccgcggccgtcgagacccgtgcgcagctgttttccgggtgcgaatcggaacttgcggcgaccgatcccgaattaatcgaaatttttgataactttgcgttcgctgaagtactcggctacggcgatctcgacgttaagacgcggatgatgtgcatcctcgcgtcgtgcattgccggagccgcgcagaccgagtttcggacgatgctcgaaggcgcgctgaacgtgggtgtgacgcccgtcgaagcgaaagaggtggtctatcaggcggttccctacgtcggcatggcgcggacggtcgatttcgtgcatatcgtcaacggggtgctgacggcgcggggcgttgcgcttccgctcgaaggccagtcggcgacttcacccgaaacccgcttcgaaaagggactggcggtgcagaaggctattttcggggagcggatcgacgcgatgcgcgccgccgcgccggagaaccagaagcatatgcaggactacttgtcagccaactgtttcggcgattacgtctcccgcggcgggctggatgcgaaggtgcgcgaactgctgactttctcgatgctgctcacgctgggcggctgcgagtcccagttgcggagccatattcagggcaacttgaatgtcggcaacgacaaacggacgatgttggctgtggtgacccagctgctgccctatgcaggctatccgcgtacgctgaatgcgatcgcctgcctgaacgaagcgatacccgaaaacgaataaaaaagaagaaaacgatatggcgaagaaagtattgatcctctcctccagcccgcggcgcgggggtaactcggatctgttgtgcgaccggttcatggccggggcgcagcaggccggacacgacgtggagaagattttcctccgggataagaagataaattactgcacgggctgcggcgtatgctacggcggggcgaagccctgtccgcagcgggacgatgcggccgaggtggtcggcaggatgatcggcgcggacgtgatcgtgatggctacgccggtttacttctatacgctctgcgcgcagatgaagaccctgatcgaccgcacctgcgcccgctatacggagatgggcggcaaggagttttacttcatcctgacggccgccgaagagagcgttgagatgatggagcgcaccgtggagtgtttccgcggatttctcgactgtctcgacgaccccgaagagcggggcgtcgtttacggcgtcggagcttggcaggcgggtgaaatcgaaggaatgcctgcgatggacgaagcctatgagctgggccgccgggtgtaaacctaaaatagagaacaaaatgaaacggattgttttgatagcgattatgacgatgttcttacccgatatgaatacacaggcgcagaccgcatccggcacgaaggtgctggtggcctatttctcccacagcggcaatacgcgcgccatggcgcggcagatcgccgaagcgacgggcggcgatcttttcgagatcgttccggccgcggcctaccccgccgaatacggagccgtcgtggatcaggccaagaaagagatcggcggcggcgtccgccctgcgctgaaaggcaggctgcccgacgtcggggcgtacgacgtgattttcgtcggttcgccctgctggtggtccacggtcgcgccgccggtggcgacgttcctcgcggactgcgactgggcgggcaagaccgtcgtgccgtttatgacccacgaaggcagccgcatgggccgcagcgaagaggatattcggaaactttgtgcgggcgctaccctgctcggcgggcttcccctacgcggcggggccgtgaaagactcgcgggacgccgtgcggaagtgggttcagggattgaatctgacaaaataaactataccagatgttgcgaaaaatcagaatcgcggccgcggccgttttctttacgatgattacgctgctcttcctcgatttcacggggacgctgcatgcgtggttcggctggatggccagagtgcagttgctgcccgctgttttggcggtcaatgtcgccgtcgttgcggcgctcttggtgctgacgctgttgttcggacgggtctactgttcggtgatatgcccgctgggcgtctttcaggacgtcgcttcgtgggcgggcggcagacgacgtaaaaaccgtttcacctattcccgtgccttgccgtggctgcgttacggcatgctggcgctgttcgttgcggcgatggttgcccatatcaagcccgtcgccgaactgctggcgccttacagcgcttacgggcgtatcgcgtcgaacctctttgcgccgctctaccggtggggcaacaacctgctggcctatgcggcagagcggatcgacagctatgcgttctatacggtggacgtttgggtgaagagcggcgtgacgttcgccgtggccgccgcgacgttcgcggttctggccgtgctggcgtggcgcaacggccgcacctactgcaatacggtttgtccggtcggcacgctactgggcttcgtgtcgcgttttgcggtctttaagccccgcatcgacacctcgaagtgcaacggctgcgggctttgcgcgcgcaactgcaaggcctcgtgcatcgacgccaagtcgcacgaaatcgactacagccgttgtgtggcctgcatggactgtatcggcaaatgccgtcagcacgccatcgccttttcgcgcaaaccggtcgcaaaacccgcttcggagacctccgcgtccgcagcggcggaggctccggcaaagacggaccgcgtcgttgcagcggaatcttcgtcaaaggcggaccgtgacgtcgccgcggacaggcccgccgacccttcgcgccgcaaattcctcacgattgccggtgttttggcctacacggctaccgtgaaggcgcaggagaagaaggtggatggcggactggcgctgatcgaggataagaaagtcccggaccgcgccgtgccgatcacgcctccgggatcgctggcggcccgcaacttgacggcgcactgtaccgggtgtcagctgtgtgtggtggcgtgccccaatcaggtgctgcgcccctccggcaagctgatgaccctgatgcagcccgaaatgtcgtacgagcgcggctactgccggcccgaatgtacgaagtgttccgaagtgtgtcccacgggggccatccgtccgatcacggcggccgagaagtcggcgacgcagatcggccatgccgtgtggatcgccgacaactgcgtcgtcaataccgacggcgtggactgcggcaactgcgcacgccactgtcccacgggagccattcacatggtgcataaggatccggataaccctgattcgccgcttatccccgccgtgaacgaggagcgctgcatcggctgcggagcatgcgagaatctttgtccgagccgcccgttcagcgcgatttacgtcgaagggcatctgcgtcacagaaccgtttaacagtcaggagtatgaaagagaagaaaaagatagaccgccgggaattcctgaaggtgctcggcgtaggagccgccgccacgaccgccgcgttgtacggctgcaaacccaaaggcggtgcggcgggcgacaccgccgccgtgggagaagtcccgaccgaccggatgacctgccgtacgacgcccaccacgggcgaccgcgtgtcgctgctgggctacggctgcatgcgctggccgacgcgtgcgaagagcgacggttcgggcgatgagatcgaccagcaggccgtcaacgaactggtcgactacgccattgcgcacggcgtcaactatttcgatacctcgccggcctatgtgcgcggctggtcggagaccgcgacgggaatcgccctcaaacggcatccgcgcgaaaaattcttcgtagccacgaaactttccaatttcgacccttctacccatagccgcgcggcctcgatggagatgtaccgcaactctttccgggccttgcaggtggattatatcgactattacctgctgcacggaatcggcatgggcggcatggagtcgctccgcagccgttacctcgacaacgggatgctcgatttcctgctcgccgagcgcgaagcgggacgcatccgcaatctgggattctcctatcacggcgacgtcgaggtgtacgactacctgctttcgcgtcacgaggagataaagtgggatttcgtgcagattcagctcaactatatggactggaaacatgccaaggagcttaatacgcgcaataccgacgccgagtatctctacggcgaattggagaagcgcggcattccggccgtcatcatggagccgctgctgggcggccgcctttcgaacgttcccgaccatatcgtcgcccacctcaaacagcggcggccctcgtcgagcgtggcttcgtgggcgttccgtttcgcggggtcgttccccggcgtgctgaccgtgctgagcggcatgagctacatggaacacctgcaggacaacctgcgcacctattcgccgctcgacgaactgaccgacgccgaccgggaatttctggaggagacggcgcagctgatgctgcgctaccccacgattccctgcaacgactgcaaatactgcatgccgtgtccttacggactcgatattccggccattctgctgcattacaacaaatgcgtcaacgaaggcaacgtggccgcttcgtcgcaggacgaaaattaccggaaggcccggcgggcgtttctggtgggctacgaccgcagcgtgccccgtctccgacaggcgagccgctgtatcggctgcaaccaatgcgtgccgcactgtccccagaacatcaagattccgcacgaactgcaccgcatcgaccgctatgtcgagcatttgaaacaggaaaatctgtaatgcgaagccgccgcagaccgattctgcggcggcttcgtatttggcggcatcggcgcattggaatccgctgcgcattggtgcctgctttgcgtccgtttctcgttctgttcgcatctctctgcttctctctgcttctctccgcttctgcctgcagcgagctgcatccgtttgttcctgcctgttcttgcctgcagcgggccgcatccgtctccgctcctgcctgcattgggtcgcatccgtttgttcttgtctgcttctgtctgcatcgggccgcagccgtctgctcccactcactcagcccgtcccgataccttcccggagccagtccgccgtatctacaccggcagcaggatcgagaaccggctgcccctgccgatctcgctttcgaccgaaatcgtgccgccgtgcgcttcgacgaactccttcgaaatggccagtcccagcccgctcccctgcaccttcgtgcccggaacccggaaataacgttcgaaaatgctcttgtggtaacgcgggtcgatgccccggccgaagtcctgcacatagatttcgaccgctttgtcgtgttgtacggccccgatgacgatgcgcgatttttcgggcgaatggtggatggcgttcgacagcaggttggtgatgacccatgcgatcttctcgttgtcgacgaacagtttcgagatcttttcgggatagtctatctccacgaaacagcagaatcggtctgccaacacctgcgttgcctttaccgcatagtctatcaactcgataggctttgttatcttaggcatcagtttaagtttcccggtctcgatctgcgtcatgttcagcagttcgcccgtgatcgaaagcaggcggtcgctgctctccctgatactgcccaccagctgtttctgctcgtcgttgagttttcccagccggtcgtcgcccagcagctgcaggctcatcaggatcgacgaaatcggggtcttcatctcgtgcgaaacggtcgatatgaagttggttttggcggagtccagctccttgaatttggtgatgttgttgaggatgatcaggttacccacgaactgctgttcgcgtccacccacgggcgtgatgtagagcggtgtgttgtccatctggaaatagctctccttgttgtcggcgtatatcttcagcggctccttctcggcgtctttcctttcgtcgcagagttcgcgcagcagacggcgcagcaggtcgttggagagggctacctcggtcgcgttccgcccgatgacgtcttccggaagattcagcaccgaaagcgcttcgcggttcatgaaaaggatggtcttttcgggatcgagtccgatgatcggctcgtggagcgtgtttacgatcgcttcaatgcgttttttcgccgtcatcaggtcgtcgagcgaactgcggcggtactcgtcgagtctggcggccatgtcgttgaacgactcggcgacggattcgaattcgcggttgcccgtaaagtcgagccgctgccggtagttgtggttggcgatctccttgataccccgcttcagggtgtcgatcggccggagcaccgtctgcggaaaccagatcaggatggcccctgcgctcaggacgcacagtgcggccacgacgatcagccaccacatcacgtagtcggcgcgctgctccaccccggagcttttgctccggatggcggccatgttcagctccatgatccggaagagatcctcgcgcacggtctgtatttcggcttcggtgacggggtcgctcagcgacgcgatatgccgttcgagcgccgtggtcatctccttttcgctgatctcggtgatgttctgctgctgcagggcgagactctgccgcaggacgtgccgcgacaccgaatcgtgcccgatgtcgttcagcgaccgcagcatgtccccggcgtattgcagcgaattgtagttgtcggccaatatggtccccgtggcgtgcgaaagctgccggacgtaactgaccgactggattccgagcagcaggatcatggcgaacagcgcgccgattcccaaggtgagccttctttgtattttcatggtttacgacataatgtaaagatcgatgttcatgcgcgacagcctgccgatcaggcggcgcagcgcgacgatgcttttcagcagcgaaaatagcgaaaattcgggccgtccggtgcagacgatactgattttttgctcccggcacagctccacgatggtttcgaccggccggttggagtgtatctggcgtatttcgccgcccagttcggtggcgaggttcaggttgttgatcaggtaacgctggttggccagcggaatgcggtcggcggcttcccggtcgctctgcacgtaaagcacgacgaacgacgtgttgaggtgggtcgccatgcgggccgtcttgcggatcacgcggcgcgaacgtttctccgaggagtcgatgacggccagcagtttgtcgtgacggaacttgtcgcccgcggcgatctcgttctcgacctttttctccacgcgcagggccacctccttgagtgccagttcgcgcagctgcaggatattgtcctgcgtgaagaagttgttgagcgccgccgcgaccttgtcggggcggtagattttccccgctttcagccgctctatcagctcgtcggccgtgaggtcgatgttcaccacctcgtcggccgtggccagcacgctgtccggcacgcgctcgcggacctcgatcccggtgatctcctgcacggattcgttcaggccttcgatatgctggatgttgaccgccgtgatgacgctgattccggcgtcgagcagctgcatcacgtcctgccaccgtttgggattgccgctgccttcgatgttggtgtgggccagctcgtccacgaccacgatttcgggatggaggttcaggatggcctgcgtgtccatctcttccagctccttgcccttgtagaagagcctgcggcgcggcacgaacggaagcccttcggcgagggcttccgtttcggcgcggccgtgcgtttcgatgtaaccgatgcagacgtccacgcctgcgtcgagcagctgatgcgcctcctgcagcatgcggtaggtcttgcctaccccggcgctcatgccgatgtataccttgaactttccccggtgcgagcggcggatcagctccagaaaccgttgaacgctgccttccttgtccatactacatcctcaatgatatgccgcccgtgaaattgacgtcctccgccgccgggttccagttcagggaggtgaagattcccaactgcatggacttcaatatctcccagctcttcgctgcgctgacgaaaacgttctgtacgtagaagtcgcggtctatgccgtacgtgccgacggcattccacggaacgacgccgacgccggctttcatgccgacggttttcacggtgaagggatacgacgcctcgatgtaggtcgcataggcccgtttccctgcggcatttacgtcggcggctccgaacagcacggtgttccaagccagcgtgaccggcgcttcgggcgatatgcaccacgcgacgcccgcctcgacgcggtgcggagagtccgccccgaagcggaaatagttgcggctgatcgtgctccggtcgcccgcgccgccttcccagtagaggtccgccagcgagaaggtcacgggaccgagcgcataggccagcgtcaggtccatctccttgtaggaggtggccgcgaaatcgaccgaaccccatgccgtcgccgagaaatttccggccgacagggtcattacgggttgtatgcaggctccggattcccagacgccgcgccagacatagccgctgacgatgtctgcgccgcccgaaattttcacgccgcgctgcggctcttgtgcgcatacgtccacggcaagcattgccgccagtgcggtaatcagaattacgatccagcgtttcatgtgtttgtccatttctttgagttttttcatcgccgtatattatttctgctccgtcattgcgtctgctgagcggtcgtcgccgttgttgtcggccgattttgccgggaccgccgccgtgacgttcggctgcattgtctccagtgcgatgttgagccggagcacgttgaccttctcggtgccgaagagtcccagccacggcctttgggtcagcgaatcgaccagatgccggactgcggccgcgtcgagtccgcgggcttcggctacgcggcgcacctgcacctgcgcgccgcgcggcgagatgtcgggatcgagtcccgaaccgcttgccgtcaccatttcggagggcacttcctcacgggtgagatagggatgcgccgcaaggaaatcctgcacgcgccgctccacttcggccagatattccgggttggtcgcggccttgttgctgccgcccgaaccgccgccgttgtaatccacggccgaaggacggccccagaagtaacgggtgtcggtgaactgctggcccacgttcgccgcgccgacggtccggccgtcgaatgtgagggtttcggcttggccgccgccggggcctgccacggccgagacgccgcgcagtacgagtacgtatcccacgccgagcaacaggcacattgccagcgttatcctgattgaaatccagaagtttttcataattgtagcgatactttaaaagaacatacttataaacatgtctatcagtttgatgccgatgaacggcacgacgattccgcccagtccgtagatgaagaggttgcggcgcagcagggccgatgcgccgatcggtttgtaggttacgccgcgcagcgccagcggaatcagcagcgggatgatgacggcgttgaagatcaccgcagacaggatggcgctttcgggcgagtgcaggtgcatgatgttcagggcctgcagcgacggaatcgaagcgatgaacagcgccgggacgatggcgaaatacttggctacgtcgttggcgatcgagaaggtcgtgagcgtgccgcgcgtcatcaggagctgtttgccgatttcgacgatctcgatcagcttcgtcgggtcgttgtccagatcgaccatgttgcccgcctccttggccgcctgcgtgccgctgttcatcgccacgcccacgtcggcctgcgccagcgccggggcgtcgttggtgccgtcgcccatcatggccaccagcttgcccgaccgctgttcgcggcgtatgtattcgagcttgtcttcgggtctggcttcggcgatgaagtcgtccacgccggctttttcggcgatgtacttcgccgtcagcggattgtcgcccgtcaccatcacggtcttcacgcccatcttgcgcagacgttcgaagcgttcgcggatgccggtcttgatgatgtcctgcagttcgatcacgccccggatctgctcgttctcgctgacgatgagcggcgtgccgccgttctccgagatgcggcgcaccgtctcttcgatacccgccgggcatttgttgccggcttgggcggcgatgcggaggatcgcttccgatgcgcccttgcggatgcggcgtccgtcgggcatatcgacgcccgaacatttggtctcggcggtgaactgcaccatctgcacgccgatcagctgcaggggatcgaccttcatgcccatttcggcgcccagctcgacgacggatttgccttcgggcgtctggtccgagaccgacgaaagcacgcacaggcgggtgaactctttgacaccgtatccttgtgccgggtggaatgccgtcgctttgcggttgccgatggtgatcgtgcccgtcttgtccagcagcagcgtgtcgatgtcgccggcggtctcgacggctttgcccgacttggtgatgacgttggcccgcagggcgcggtccatgcccgcgatgccgatggctgacagcagtccgccgatggtggtcggaatcaggcagacgaacagcgagatgaaggccgctatggtgatgttcgccccgacgtaatcggcaaagggcttcagcgtcgcgcagacgatgacgaagacgatggtaaatccggccagcaggatcgtcagcgcgatttcgttcggcgttttctgacgcgacgaaccttcgaccagcgcgatcatcttgtcgaggaaactctcgcccggccgcgccgtaacctttaccagtatgcggtccgagaggactttcgtgccgcccgtgacggagcttttgtcaccgcccgcctcgcggatcaccggggccgattcgcccgtgacggcgctttcgtcgatcgaggcgagtccctcgacgatctcgccgtcggcggcgatcgtgtcgcccgcgacgcactcgaagaggtcgccctgccggaggtccgagctgctgacgatgtgcgactggccgtccggctcgatgcgttttgcgggcgtctcctcgcgggtcttgcgcaggctgtcggcctgcgccctgccgcgggcttcggcgatggcttcggcgaagttggcgaagaggagcgtagccagcaggacgacgaagacgatgaagttgtacagcagcgaaccctgcgaagcgtcgcccgtgacggcgatgtagatcagcagcgccagcatgacgaaagtgacggcctcgacggtgaacatgatcgggttgcggaccattttgcgggggtcgagtttgatgaacgattcgcggaggctccggcgcagcagcgcgcggtcgagcaaggaattatttctgtttcgtttcatggtcattgcgtttttagaaggtcaggtaatcggcgatcggtccgagcgccagtgacgggaagaacgagagtgcggcgacgatgatgatgacggcgaaggtcatcagcgagaaggttcccgtgtcggtcttgagcgtaccggcgctttcgggaatgaacttcttcgaagccagcagtccggcgacggccacctgtcccacgatcgggaaataacggcccatgatcagtgcgatgccggtcgaaatgttccagaacggcgtattgtcggccagtccttcgaagcccgaaccgttgttggccgccgaggaggtgtattcgtagagcatttcgctcaggccgtggaacgacgggttgttcagccatccgatttcgggatttgcggcggctatggccgcggagattccggtgccgaccagaatcaggaaggggtgcatcagcacgaccagcgttgcgatcttcatttcgcgcgcctcgaccttgtgtccgaggaattcgggcgtgcggccgaccatcagtccgctgatgaagacggcgatgacgaggaatgcgaagtagttcatccaccccactccgacgccgccgaaccagcagttgatctgcatgttgagcatctgcatcatgccgctcagcggggtctgcgagtcgtgcatcgagtttaccgagccgttcgacgtgacggttgtcgtcatgccccacatggccgatgccgccgagccgatgcggatctccttgccctccatcgagccgagcttctgcgaaatgcccatctgctcgatctgccgactgccgcccgtctcctgccataccgagaagatcacgccggcggtgtaggcgaagagcatcacgccgaagatccatgccgcgagcctgcggcgtcggatgtagaaaccgaaggcccacaccatcgccatcgggagaatcaggatcgaccagcactccagtatgttggtgaatgcgttggggttttcgagcgggtgcgccgaattggtgccgaagtaaccgccgccgttggtgcccagctgtttgatggggacgatggccgccgcaggaccctgcgagatgacctgttcgccgccttcgagcgtcgtgagcgtctgcctgccgtcgaacgacatcggcgtcccgttgatgatcagcaggatgccgaccgcgagcgacagcggcatcaggatgcgggttacgctcttggtgaggaagacccagaagttgccgatcgttttcgtggttttggcggccagcgccttcatgacgcccgccatggcggccatgccgcaggcggcggtgacgaactggaacagcatgatgacgaacagctgggtgaaatagctcagtcccgattcgccgctgtaatgctgcaggttgcagttcaccatgaacgagatgcaggtgttgaacgccagatcgggcgactgtccggggttgccgtcgggattgagcggcagccagccctgacataccagcaggagcatgccccagaagaaccagaagaggttgaccgtcagcagggccttgagaaattgtttccagttcatctcctgcatggggtcgatgccgcagatgcggtagacgaaccgttcgacgggagccatgaagtcgagccatgtgcgctcccctttgtatactttggcaatgtagcgtcccagcggatagcagagtgtcacgagggcggcccattgcagtatgacgcctaaaatttcgctattcatttattatgggttttcagagtcctacaatcagaatttttcgggttttacgagcacgtacatcagatagacgaatccggcgatgctcagaataagcagtcctgtaaacattttccatcaaattttttcaaaccaatcgacacatttgtaatagaaccagtagcagagcgcccccaaggcgcagagcgcgaggaacagtacgattccgttcatctcattttcttttttgagttagacaacaatttcgcaaaaccgcaaatcatccggcatagcagagccattgcgccgcagaatatcagtatcaggatcacgattgccatatcggtttgtttgggttttgccggatagcatacgaaggggatgccaaaacctcggtttcgtatctattgcgttgataacgaatggactgtaggtcgggaacgtgtgccgaaaacaacggccgccctatcaaaatgataaggcggccgtttcagaatgataggcttgtgcgggagcgtcaggacttcaggccgtaactttcgagtttgcggtagagcgtggcgatgccgatgcccagcaggcgggccgcttcggccttgttgcctgcggcgtattcgagtaccttgaggatatggtgccgttcgagggcgtcgagggccatcgaatcgggggcttcgttccgtccggctccggtttggaattcgggcggaagcgtatcggccgtcagcgtgccgccctcggccatgatcatgctccgttccacgatgttgcgcagttcgcggacgttgccgcgccacgtgtggcgttccagcgcggcgatataggcgtcgtcgattttctcgatccgcttccccatcttggccgcgaactgttccgcgaaatggcgggcgtactccgcgatgtcctttttgcgtccgttgagcgacggcagctgaatgcggaacaccgaaagccggaaaaagaggtcttcgcggaaattgccggcggcgatctccttttcgaggtcgcggttggtggcggcgatgatccgcagatcgaccttcgtcggacgggtttcgccgattttgatgaattcgccgctttcgagtacgcgcagcagcttggcctgtagttcgacgggcatttcgccgatttcgtcgagaaacagcgttcctttgtcagcctcctcgaaaagccccttcttgtctttcgaggcgcccgtaaaactaccggcgcggtgcccgaacagttcgctttcgagcagctccttggagaaggccgaacagttgaccgccacgaacgactccttggcgcggggaccggcatggtgtatcgcctgcgcgaagacctccttgccggttccggtttcgccggtgagcaggaccgaggtattcgtcgcggcgaccttgcgcgccagtgcgacggcctgccggagagcttccgacgaaccgatgatgcggtcgaacgaatgttcgtcggagagtttctcctcgaagcgggccagccggcgctgcatctgggctttctctgcggcccggctcagcagcgggagtatcttgttgttgtcgtcgcctttggtgatgtagtcgaacgctccgttcttgatggcctgcacgccgtcggggatgttgccgtaggccgtcagcagaatcacctcggccgacggcgccgcctccttgatcttcccgaccatctccacgccgttgccgtcgggcagcttgacgtcgcacaaaaccacgtcgggatcgtactgccggagcattttgagacctgcggcgcagtcgggggcttgtgcgacctcgtaaccttcaagcccgatgatccgggccagaagtccgcgcagctgttgttcgtcgtcgataatcagaatcttcgccatatgtttttttcggtgcggtcacgggatgagagggaccgcattcggggcaaatatacgcatttatcgtttttttcgagaccggaccggatttattttgtcggacggacgatgcggcgcggattgccggagtgtggcgttccgggtggataatgttgcaggaaagcggcgtgaaattgcgcaatttcaggcggttattcgtatctttggggtgcaattacgaaatcccgcaatgaggaagttctattttctgttcatgctcctgccggcgttgtcttggagtgtcgccctgagggcgcagcggctcggcatcgaggtcacgcctgcgtgtccgacggtatttcaggagttcgaggtggcatacacggcggaccgtgagatcgagtcgatcgcgccgccgcgctggggcgctctgacgctgggccgcgaattgggacggtcgcacggctcgcagctgtcggtcgtgaacggcgtccggaccgactccgaactcttctcttaccgctaccgggtccgttcgcgcgtgagcggcgaggtcttcgtgccgggaacgacagccgtcgtcggcggtcgcgaatgccgttttgagcggaaaaggattacggtgcttcccgattcggcgcattgcgagccgcagtgccggctggaaccggactcggcggctatggcggccatgggcggctgtatcgtccggctggtctgcgatcgcaagcccgacaaggccgatccggtgctggtgctggacgatacggagacctgcaccccgttttcgaccgcttattccggcaggaacgggcgggaagagtgtatttaccgataccggatcgacgtggacaattccggaaaacatatcctcacgccgcagttgtcgttcggcggaaaaccgttcgaagccccctcttacgtcgtctggctgaaaggcgaagccggtcccgaaggtactgaacctgcgacgcccggccggaggcggatcgtatatgcttttgcgggcgtgctcctttttttgtggacggcgattttcgtgcgcgatcatgccgccgcaggccgtaacgccgtcgtttcccgcttctcgtggcaggtgtatttcgtcgtggcggccgccctgctctttatcgggttttgcggcctgttcatctgcggtgccgtccgggcggagggagcatcccggctgccggtttacggcgtgacgctcctgatgctgttctgtgtctgctggctggtgttcggggagctgagacgctcggccgtgagattgcgtatcgacggcgacacccttgtcgtcacgtcgttcgcgggactgggatttacgcgcagatacgatctgaaaagtttcgacgccatcacttcgacgatactcgtcagccggggcggcgcgtacgaataccgttatctgatgaaggccggcaggcgcgtcgtccgcgtctccgcattctacctcaaaaactataacggattgtgcgaagcgttgtcggagcactgcgtttacaagggccgccggccgatgagcttcctgctcgaaatgaaggagattttccgctgagcggacttgcaccgcgggaaaccctgcgcacccggccgggacgcggatacgaaaaagccggaccttttcgaaaaggtccggctttcccgtttgccgtcgagggtcaggactcggcgtcggttttcgaatattcggagaattcgcagccgaaacgctctacgagcatgttgtccatctcgtcggcccgcagtgcgagtccgacgatgtttttacggatttcgtcttccgattcgtccgtgatgtcggccagatggatgcggtaggcgatgtaaatctgccggccttcgattcccagcttgtagggaccgaagtcctcgctgagcatatagtccagtacgttctccacctccttcttcggcagcaggttgatcggcgaggtcgagaagaggtagttgccgtcgtatacgaagatgcggatttcggagctgcccttgtggaagagccacgagtcgtatccgtcgcgcgcaagcaccggattgacgcccatttcccgaatcgcgctttcgacgaatccgcccagcggcgaaagctcgcgctcgtcgaaaacgccttcgggcagcttgtcgccgcacgaggggcagaactcctcttcctcgcagatcagctcctcgcagctgccgcactgcacttggaatgccgtgcggtccagctcgccgagcgattcgagcaggccgtggagcgtttcgacgcggatgccgaagcccatgttgtcggcctgcgtgaatttgctgaccgtcacgcctaccacctcttccgcgtcgttcaggatcggaccgcctgagttgccggggttcaccgcggcatcggtctggatgtagtatttgccgtccatcagctgtttgggcgacgataccgaaccttcggtgatcgtgaagggcatgccgtaggggtatcccgcgacgtataccttgcggccgatggtaagcgagtcgtccgctgcgagcgtcatttcgggcagcgccgagaagtcgccttcggcggccagcagggcgatgtccagcgccggattgaccagcacgaccttcgccagatagggattgcggtcgttgtcgtgtacggcgacggtgcggtacccttcgaccacatggtaattcgttacgaaaagatcgtagtttttcaggtagaaacaactgccggagccgcctgagtgggttactttgaataccgacctgtagatattgttatgttccatggatatacggattttgagctgttatttttgttgtccgagtgcctgttccatcattttctgctggaattcctgcgccagacgcatgtattcggccatgtcgcccttcatcagcgcctgctgcatcgcagcctgcatctgaacgatctcgccctgcatggcggcggccatctgctgtacctgttccacggctgcggccgcggcggctcccagctctccggtctcctcctcgtcgtcgtccgtcgtcagatcgtcgtccatcaccttttcgagcgcttcgaacagaatctccgacgcctcctccatcgactttccggccgatttgcgcagcgcattggcgatcacggcgttcaggtcgtcctgcacgtcgttgtagaagtacatctcatagaacttgtagagtatgcgcaccgcgctccgttcatagttctccgcttcgatggcatccgcagcctccttgtaaacctccttgaaattctcctgcacgttgttcagcgacgagcggcgtttggccgaaaccagcgtatcgacgaaatagaggtcgcgcgccagctcttcgcggggcatcgccagcaggcgttcgaggaacgccttgcctttggtcaccagttcggctacgggcagctccttgtccatgtcgtcgacggccttgtcgaggtcgttcatcagctggccctgcggctgggcgaaataggaaatcttgtagagcgcgatgtcgatcacgttccatgagtagccgtatttgcgttccgcctcatactccttcacggcttcgagcgtctcgcggcaggtctgccgcaccgcctcgtggattcgcgtcacctcttcctcggaataaggcgtcacctgcggttcgtaactgcgcttggcgccgaatttggcgcagaattcatcgtcgtagcggtcgccgatatggcagatgttgcgcaggatgaaatagagcttgtgcggatggctctgcgagagcgggcacacgtattccatcttcagcttgtcgccctccttgcggaagcgcggcagcatcagccggttgatgttcaggtcggcgacctgacgcagcatggcgacgcggcccttttcgggcagctccagaaagtccgcgcttatgtgcagcttcccctccctgatgcggatgtttaccagaatcgaaccgtggggaatatggaattccgtaccttcggcgttgccgtatttcgtgcggaattccgggttcaggtgatcgagcagcaatcggaacgcttcgaggtgtttgccctcgttatagttgtcgatagcctgctcataggcctccgtattgactttgctctgcgtggagttcagtaccggagcgacgaatgagtgtgtagttttcatagttttggtattatcggaatgtcccggcggggcatcgggatataaaattagaaaaaaaacgggatattccccgtttttcccagacgaaaatctcaattttcttcgatcgtgagcgtgccgtccggccccacggtcactttggcttcgtaataaatgtacgaggttttgccggcgctgctctccgtttccttgccgtcttcggtgaagcggacgatgaacgaggtgtgctgttggcccggtttgcggttgcggttgaatgcggaattgccggccggaacctcctcctcgatttcgtagcggcctaccgatttgtaggagtgcccttcgggaagcatcgtttttgcttgggcgatctgggcggcgatccgggcgggatcgagttccgacaggtcgatgccgacggtcgtttcgtattcgggagcttcgaacgtgctctgtacgtcgcgcaggtcggtgggcgccagaccgttcatgtagtagctctggctgaatgcccggttgtccctgttcaccagtttcaccgtcacgaggaacaggttgtcggagagcgtttctccctccatgatcgaaagcgagtagattttgaatttgtcggtgtccacgctctttttcgtcagttcgatggccttggcgtagctggcttcggcgtcggtcggataaccggtcagggtggaacaggacgggatcgttgcggcagcggcgacggctgcggcgaggagtctgataattgggcgcattgtcgtattggtttgaatttttttatacggtaagtttcagcggcgcaggcttccgtacgtcgtgtttgcggaccgtccggaattgctggccggcaatgctatttgtcgaaaatggacttgaacgcgtcgaacgcctccgcgttttcgaaaaacgcgccgcggatgacgtgatggtcggcgggcagcgaaattttgaattcgttttcctcctcgtcgaatttggtgtattccacctccgaaagcaggaacgactcgttgacgacctcttttttccggacgacgggaatcgtcaccttgccgccctccacggtgatctcgccgccttgggcgatgagtttgcgggcctgcatgatttcgcggaccgtgaatgccagcagcgcgagaccgccgatcacgaagatgatcgtgacggccgtcgggccgaggatgcgcatgcggccgatgcggatgccgaaaggatagaccaaaggtacgacgaccatgccggcgccgatggccagcgaagagaccgagccgctaaacggattgctgggggtgtaattgaatttctgcattttttatgaatttggaattggtagatcttgccggcgccgctctccgtatgtcctgcgggagccggactgcggggcttttgccgtgtgcaaagttaaacgcctcgcggttatttgcggaggtttgcagggggatatcggaatgtacggggcgttcttcaacaggctgaccgcctgctgtttccattcgtcgggtccggttgccgggggtatattttacagccgcgacaggatctcctccagcgtcgaaccctttgcggaagccagtttctcggtgcgaatgcgtttcagccgttttttcaccgaatccttttccagacagacgacgctcgcgatttcggcctgcgacaaatgcatgcgcaccatgcagcaatagcggatgtcctcctcgttcagcgccgggaattgcccgcggagacggaccgtgaagttgtcgaatacggcgtcggcatgtgtgaagatcgtcttccagtcttcgtccgacatgcggcattttctggcctccccgccctgccggacctgcgcgatgaagcggctgttgagctggcggaaaaaggtcgtgcgcagctgctcctccttgcgccgcatggcgtcgagttcgttttcctgccgcaggatgcgcctttgctgggcgaattcccgcagtttggcgcggtgccacatgcgcagtcccagccatgcgccgagcagtacgagcgccgcgcatgtcagaatcgtctcgtagacgatgcgttcgcggtgctgtttctggatttgcagggcggcgttctgggttttgagctgttcgtaacgccagagtttgcggatattgagcacttcggcgctgtgcaccttctcgtcgatcgagtccttgagccgtatgtactgcttcagggcttcgagacttcttgccgcgtcgcctttcccctcccatgcgttcgaggtgttgagcgcccataacgcccgtgaggtgaggtgcgtcgtgtcggcgcacatgcggcgggaactgtctgtcagctccagcgccgtgtcgtagcggcccgtgcggttgcagatgtcggccttggtgctcagccatgaataccgggtccatgccggggcgtgcccgaaccctttttcccaatactcttcggccttgcggtactctttccgtttcagggcgctttcgatcagcatggcccacttcggggaggtgttctcggttatgcccttctcttcggcgagcctgagcgccttgagcgcatagtattccatgctgtcataattgtccagccccatataggcgtgcgccatgtcgccgagcgatatgcacatccagtcgtaacgctccatgctgtcagcgtaggcgtacgcctgctgcgcatgacgtatcttctcctcgaagagatgctgctggccgcagaatacgccgagccaagtctccacgacgtaacgccgccgccactcccctttcgggggcagcatgtcgcggcttttgagcagcagcgtcatcgccacctccggctgcctgcgctgattggcgatcttggccgcataataataggccttgtgcgctgcggcgaaatcgtcggtgtgggtgcggtaatagtcgagggcgacgtccgaaagcgtgtcgtcgatcatgttctcccccgcgagccaccgggcttgggtcagcaccagcgcataatgcgcgtagttgcgccgggagagtcttttctccggagccggaacgcccttcagaagccgtgcggcgctgtcagggtgctccatgacgatcgcttcggcgtcgagcagaacgccgggaacgggctgacagcctgcggctgagacgcacaggaacaggaggacggcgaggcggatgcggtgcatggtctgtttcgtgttatgtggctcagggtgtctgccgttccggcttttgcgtgcgcaggagatgcttcgtcaggaacctgcgcaccggttcgtcgtacagtttcaggcacaggtatgccagcagcacggacccgatgaccagcgccgctgcgccgggcagcgattgcgcgaaggtcaggttctcgtttttcacccacgcatagtacagatagatgaacggatagtgcaccatgtagagcggatacgatatgtctcccatgaatttgcatatccatgcggtcgtcctgtccgtcgtcttgcccgacgctccgaggtagacgagcagcggaaaggccagcgcaaagcacaatgtgtcgtacagcccgttcatccagtagttttcctctccgccgattcgcggcacggccagcaggacgacgacgcccagactgcatatccagaacgccccctttaccttcacgggtctgaatacgcgcgacatcagcagtcccgccgagaacgagaacaacagcctcagggaccctccggctatgttgtcgcccgtcagcgagaaccccgcgcatatgtcgccgtagggaccccatacggcaaacgccgccagtccgcatccggcgagcagcaccagcgccgcgagcgccttggtcggcagcctgcggatgaacagcgcatagaggatgttgccgatatactcgtaaaacagcgaccagctcggaccgttcagcgggaacatttcggtcacgccccggatctccatgccgggcgtggccggaatcatgcaggcgttcatcagggtcgctgccagcagcatcgtcaccgagactttcgagacgtcccatacggagcagccctgaaagtagaacatgacggccccgatcaccgcgccgattaccaccatcggatgcagacggatgaaccgtcgcgtgacgaactcccttaccgtcattcgtttccaccggtcgtcataggcgtagccgatcacgaaccccgacaggatgaagaagaaatcgacggccagatagccgtggttgattctctgatcgacgtgacttgtcgcaaaggcttcgaacacgtgaaaccagacgaccatcagcgccgctacgccgcgcaatccgtcgagtatgttgtagtggggtttcgtatctgcaaatgccgccgcagagacttttgtttccgacatgggtggttgtttttgctgttgtttgggttgaattggctttttacaggatgcaaatatacgaaaagtgcggttcaaatcggtcatgaaccccacttttcatctcttctgccgtatttcgccggcttcgccgcccgcctgccgcccgctttcgccgccggttttgctgcccgcttccgccgtccgctttcgccgcccgctttcgccgcccgcctttgccgcccgcttccgcccgccctcttgcgcctctcccgtttgcatccgcagccccggcgcctgttcctcggccgcccgcttcgcgtccctgctctgcgtccctgcccggcccgtttcccggccgcctgctccgcactctaccctgcccgcccccgctcagcttgccgagcttccggtctcctcctccccgtcccgcagggccagctgctccagtaccgtcatcacacggtccgtcagggccgccatcgtccgctcgtcgttgtagccggacaattccgcgtccgtgcacccgtcgggaaacgccatcgccagcagtttggcgctcagcagtgtcaggtagatgagcggaatgaccggcgccgtgcccatcccgtcgctccgcaccgtgatccgctgctgcggaactgccagacgccccggtttccggcctttctccccggcgttccagagcacgttttcctcggcctgcgtgacgtagagattgaacgacgtctcgttcacatactccgcccggtcggcccatagatcgacgccgcaatcgtcggccgacgcttcggtctcgacgccgcagtcgggcatgtcgcacatgatcgcccggatgatgatgttcttgtcgcttagctccgccgaccgcagtttgctcagtgccgcggtgcagatgcccacctgcgttatgtaataatggttgatggcccgcagggttttctcgaattcggggtcctcttcgttcatcgcgtggttttggggttgaaaaaggggcggctccgaccgaacaagtgacgcaacttcactttaggaagaattcaatgcggagaccgccccggctgccagatttcagggaccgcttccggcgcaatgcctgccggctgcatccggaatgcgggattgtacttgtcactgagagagtcttattgacggccgccgcgccggatcgtgcggcgtgagggcgttcccccgctccccggccgaaaaacggacgtcctgccgcgcgaaatcgaacggcaggaacgtccggcccgtattgtgccggagcagtaaaatataatggggattttgggccttcgggtaatttcggaatcggatgcggcgggacattttcttcggttttcgttggtatgaatccgcgtcccgcaaaggcataaaaaaagcaagggacgcgataacattccttactgaaggtattaggagaccccgaatgagaaatgtaccgcgcccttgcaagtcccgtccttacggacggaacaaaacaagggctggcaacatttatacctcattctcgaaaagttcctaatttttcagtaaggcataaagagttgctgctctttattatgtccgtcggctatgccgagttatggtaattccgcataatggtc

SEQ ID NO: 12080 - DNA, 1721 bp, Unknown
  gut microbiota DNA sequence
aagataacgaaacacgttccgagcctgtcgagaatcgacaaagacaagatcgtcgccgcctacgccgtaacgactatggccgacggctcgcactcgacgacgatcaagacgatgaccgaaatccggcaggcgtggatgcaaggcgcgacgcggggcaactcgcctgcgcaccgaaatttcaccagcgaaatggccgggcgaacagtcgagcgttccgccatgaagcacatcatcaactcgtcgtctgacgcatggctgttgagcgaagacgagaaagaacgccgcgtaacgaacgaaacggcggccgcgcccgccggggcaaatatcgaagaagcaaaattcgaggaggttgctccggccgcaatcacagcacaatcggccgtacccgccgaaacgatgccgccgatccctacgccgacgcccgttccacgcgaggaggtaaccgaagaggcagcccccgctgccattgaagacgacccgttcaacgtgtaacccgatgaagctgcacgttatatcctcgtcgtcggctggcaactgctacgttttggagagcgaagcgtctgcgctcgttatcgagtgcggcgcatcgcccgaaacgatgttcgcccgaaccggtatcgacgcccgaaagttcgtcggtgcagtagtaacgcacgagcacggcgaccacgcggcccacatcggtaaatacgccgaccgggcaatcgacgtctacgcttcgcggggaacgctcgcggcgtgccatatcgacaaagcgtaccgggcgcacgctttgcggccgatgcagtccgtcacggtcggcgatttcgtcgtccgggcgttcgacgtgaagcacgacgcggcagagccgttcggatatatcatcgaacacgaggaatgcggaaaagtgctatttgctaccgacacgcattttatccggtacaatttcaaatccctgcggctgaatcatattctgatcgaggcgaactattcacaagaggagctggacgataatatcgcccgcggggcaatgaacccggcacaggcagcgcgcgtgcgaacgtcgcatctatcaatcgacgcagcgtgcgatatggtcaaggcgaacgaaacggcggaactttcgacagtcgttctgttgcacctttcgaacgcaaacagtcttgccgatgcttttgccgcgcaaatgcgcaaaacagcccgttttgcgcgtgttttcgtcgcggacaagggtttaatcgtcgaactgaataaaagcgaaatttaacgggccaaatcagcatcaatggcaaacgaaacaaatactggttgggtgcggttgtatcgcagcacgctcggatgggagtggttcgacgacccgctcacgctgcaactgtgggtcgtttgtctgctcaaggcgaattacctgcctacgagatggcgaggagtggagattgaacgcggagctttcgttacctccgtcgatagtttgtgcgcagaaacaggacagacgacacgacagattagaacccgtttagctcgtttgcaggcgtccggcgaaatatccgtccgtgcgacaaactacaaaagcattataacagtttgtaaattcgacacttaccagccattagaaaatgaaaacgacaaacgaccgacaaacagttacgagggtttgcggagggtagcgggaaagaaagtcgccaaaatcgacaaaccaaacgacaaaccgaaaacacatataattaacagtaatacagatgatt

SEQ ID NO: 12081 - DNA, 146359 bp, Unknown
  gut microbiota DNA sequence
caaacagaacgacaatcaatcgacaaacgagcgacaaacgcaactgttttcaagcgacaacagtataagaatatataaagaagaatataaagaattaaaagaatctctctcttcgcgcgcacgcgcggcagaggcagagagagagacattttttgaaatcttttttttcaagaatttccaaaatcccgattacgaggtcgaacgattctgcgctaattacgaggcgtcgggctggattcgtaaaaacggacaagccgctaccgaccgcccggcgcttgcgcgtacatggacgcaggaagataaaaacgccgcgccacgcttcaatgccgatttccttgcgaaataccgacgtttctacggcctcgcaaagcaaatgaatccggcgcttgcgccgatattcattcacgatctggaattgatatttatcgacaccgaacgcaagcggctgacattccgctgcacgcggcagatggccgaagccgtcgaagccaatgtccggttctttcgggataactttttcgacaaacatttcgcgggctggacgctacactaccaaaccccgcgaatctaaaaccacaacgcacgatgaaaaacaaaaacgacaagcggggcaagtccccggcaaatttctacgacagaatcgctgaaatgctcggtaaggcggctattccgcagacgatcacagtcgaggccgagggagtttcgcccgaaacattctcggcagcaggaatcacgaaacgcgaactgtatgccaccgtcgcaatggcaagccttgcgcacgccatcataacaaccccacccgtcggaggcggcaggcttcgttcagactgggcgcggcgcgtggctgcacaggccgcagagctggcctaccacctcgacgaagcgctcggcgagatcgaacgaaacggcgaacccgcaaaagattcaagacgatgaaaattctgtatttgccactcaaaaaggagtggtacgaaatgatcgagcggggcgataagcgcgaagagtaccgcgaaaatacccgttactggaaaacgcggcttatcgacacggtaatatacgacgagggggacgaggagaccgaaagcccggtatttatattcttcaaagactacgacgcagtttgtttttcctacggctacacccgccgccggatgctatgggagtgcaaaggcgttgattttggccgaggtcgcccggaatggggtgcacccgatcacgaaacatttatcatcaaacttggaaaccgcctgaacgatgagagattacagtaaagatttcgccgaatggcgaaaatggcgcgacgaaaaagggttgccgcctatctacgacaacccggccgacgcgggtatcgaaacggatttccgggtcgggcagcaggtgtcgttcacgaatgaatacggcgtgcggttcgaaccgcacataataatgggattctgcaaaccggagctttcgggccggtgcgtctacctcgactacgactgctactggttcccgacggaactcaaatcgttaaaaccctaccggaaatgaaagacattcgtcatacctgccgatgcaccgggcaacagtttacgttcaaagagtggtgcgcgtggcttgataaccacgaaaaagccggacaggatagcggtaaattcgtggcgttatcgtacaacggtttcgatttcaacattcacgacgtatgtctaacgcctaacagacctgtccgattattcaaccaccattgtatcgtggaggttaaaacggcgcagtcgccgacaggacgctgggattacgggctggacgtcaacttgcacaattcgggccatcacgtcggggccggattcgttgatgatgtgcaaaagggatacccaacggaggccgccgcgattcttgccgccctgctcgatgcccgcaaatcagccgaacgtgaactggcgaactgttccggtcgctcccagtcgaatctcgacaacgaggacgacgaagacggattcatcaaagacagcacgctggcccgatacattcggaacatcatcaagcaaatcgacgatcagcgccgtgcaacggcgttcaaacaactaaccctattttgattatgacacgacacgttgaatcgcacatgcaacgaatgtgcgtcggttggttccggctccaataccccgccgtcggcaaactcctgttcgccgttccgaacggcggcgcacggagccgcacggaagccgcgataatgaaagcggagggcgtaaccgcaggcgttaccgaccttatcctgttgctcggacgcgggggcttcaacgccctatgtatcgaaatgaaaactaccgaccgacattccgccctatcggacgcacaaatcgaatggcgttcgctcgcaatcacgaacggaagcagacacgtcgtctgccgaacgttagaggaattccagtcggaaatacgctggtacatggcacgcccggcgaataacgaaccacgggacgaaatcacctgtgcccgcccgatagttccgccgtccgtcgaagagatcgagcgagcatttgggaaaatcagacgacacaaaatcaatcatcaaccaacaaaaaccgagaaacaatgacaacacacaacccgaaattcagagggacgcccggcccgtggcgggttgacggacacgaacacaaaaacggcgtcgtagaatataccatcgtttcgatttccggcgacgctgtcggctgcgctcccgtcgcagaggtactacgcaataacccgcgcccgatgccggaacaacgcatcgaggccaacgcccgactattggcagccgcgcccgacctgctcgccgtgctcgaatccctcgtcgggatatttgaaccgcacaaactgaccccatattggtctatgcgcgaaacggtaaatgcagcgaaaaagatcatcggatacatctacggagtggacgagcgaaaccgcacaaccaacgaatcgccctcaaacgacgccgaattcctcgaatggctgtacgtccgactggtcggcactcacggcgaaaatcccaatacagactatatgcagaaccttacatcaataatcgaaaaattacggtagccatgaaaacagctgaagaccttaacaggcttatccgcgacgaaatcgcgactatcgaagcgctccgaagcgaagacgaaaaaatatggtcggttcgggggggggtaacagaggccgatgcaaaacgcagcaagaagatccgccgcatgatcggcgaccacaacaacgagatcgcccacttgcgccgccttatccgctttgtcgaggcaaccccggaagagggtgtgcgaatgatgctcgaccaactgcgcgggcaggtagatcgaatcaccgcatctgccgaccgctacaaattgaaagagcagaaaaaagagtatctgacacgcgcaggcgcgcagttcaaacacacgcaaatcgccgaacttgaattcttattacaatgaataacaaagctattgccccggaaactaccgtacaggaacggtgtgccatctgcggccgaccgaggatttacaaatacgacggttattgtcgtcccatctgcgaacgatgcgccaacggaggtggcaggacatacgttcgaagcggagagaagattggccgcaacgaaccgtgcccatgcggtagtggtttgaaatacaagaaatgttgcggcaaatgaatgccgcccttaataactcaaaaccaaaataaagatggacaaaaaacaaacgaccgcgacttgccccaaatgtggggaagaaattgtgcagtgcgaaaactgcgagaatacgggctgccccgattgcgacggatttgtagttacccgcgacgacgtgattctgtgcccggaatgtgccgccgcctgcaaagaggattgcgacaagatgcgcgccatcggttgcggcagttgcgcccttttcgctgacgaagacgacgaggggcagggttggtgcgaactgcatcaggaatccgtgtgcttcattgataaatgcagcgaccggatttcgaaaggctgaccgttgataaaatcttaatcgaagcgtgtattatttacacgctttttacatatctttgtgctggtaaccaatacagagtaaacgcataccgggcctatgaaaattccgcaaactatcgaaatgcaggtcggcgcgctcaataccagcgagcacaacccgcgacaaatcaccgaagacgatttcgccgaactggtcaaatccctgctactgctgccgaaaggcttgtattaccgccccgtcgtcgtggacgaccggaatatcgcccttgccggaaatatgcgcttgcgggcgctgaaatacattcacgaactcggattcgacgacctcgcagaaatcttgcgggcgtcgtatcggttccggcatttcgacgaggcgaaacaatccgcgctgctgaactactggcgcgaatggcagatgcacccgaccgtgccgacgctttacgcctcggaactcgacgaagacgagcagcagcagttcatcatcaaagacaacctatcgttcggcacgttcgatattgacatgttggcgaacgagtacgacatcgcggcgatcatcgacgatggtttcgacatcgacctactcccgaaatcggccatcgaggcgttggccgcggcaaatggcatcgaccctaacgatataacggggcgacgctgtggcggcgacggggaagccgacgagcactacacgcacaaaatcacgtcgcccgtctacgagccgaagaacgaaaaaccggacttatcgacgctgaccgacagcggccgaaccgacgaactgctggcaaagatcgaggcgtcgaacgtatcgcccgacgaaaaagagttcctgcggcaggctgccgcacggcatacggtgttcgactacgccaagattgccgactactacgcacacgcctcgaaagaaatgcaggagcttatggaagattcggcgctggtcattatcgacttcggcaaagccatcgaaaagggctacatccgattgtcggacgaaatacgaaacgaatacacacgggagtatggcaatgaggcataacgggttcgtcgcgttcattctgacgcacggacgccccgaccgggtgttgacctacgagaaactgcgcaaacacgggtacacggggaaaatatacatcgtctgcgacgacgaagacaagacgctgccggaatatcgcaaacgtttcggcgacgtgctcgtcttttccaaatcggagatcgcaaagacattcgacgagggcgacaatttcggcgaccgccgggcaatcatctacgcccgcaacgcctgtttcgagctggcccagcagatcggggcgacacatttcatcgaactggacgacgactacacgtatttcaaattccggttcgacgaccagctacgctggcacggcgcagacgtccaagacctcgacgcggtattcgacatgctgctcgactatttcaattccgccccaatgctgacccttgcaatcggacaaggcggcgattatatcggcggcgaaaaggcgacgagattcaacgacggaatacagccgatgcgcaaggccatgaattcgtttatctgctccgtcgaccgaccgtttcaattcgtcggccgtatcaacgaagacgtcaatacctacgtcctgctggggtcgcgggggggggtatttctgtccatcctacaaatcggcctcgaccaactcgaaacgcagagcaacagcggcggcatgacggaattgtacttggacgcgggcacgtatgtaaagagtttctacacggtcatgtattgcccgtcatgcgtggttgtttcggcaatgggaaccgcccatcggcggctgcatcatcacatcaaatggcggtacgccgtgccgaagatactgcgcgaatcggttaaaaagtaacgaccaatggcatcacacccaagcaacaacaaatcggcgaaagaccgccggaatgcccgtctgccgctcgtgtcgcatctgcgcctcgaacggcggatgccgtttcgtcagatcgccgcagaggtcgaacggcagttagggtattcggtaacgccgaagacgatcaagaccgattgggatttgctcgtcagcgaatggcgagccgaagccgcgagcaacacacagcaggcgtgcgacgaggcgctgatggagtgcgaccgcgccatcgcggaactgtggcggctgtacgaagccagcaagcagaaacgagttgtcaagcgggcaaaggttcgcacgacactcgtcgatataaacacgttcggaaatcctgtcgtcggcaagcctctcgacgcccccgttccgctcgaatcggaaacgtcgagtgtcacggaggaacccgtcggcgacgtgcgaatcctcgccgaaatccgcaaatgggaggaacgccgcgacaaactgctcggcctcgacaaggtacaggtcgacatcacatcgggcggaaaggaattcaaggggttttcgtcggtgctgcccgtcgtgccgggcatcgacgaaatcgtccgccgtatcgacgaggagcgcgaacggaaactatcggaagaagacgaataacacatgtttaccgacggactacaacagcgcgaagaacagcagcgcgtcaactacaaacagttgcttgcctaccgccacttggccgacccgcgaatccgatacgtcgtctatggcggcgcagcaggcggcggcaaatcgtggttggggtgcgactggcttatgcgttgctgctgggcgttcccgaaaacgcgctggttcgtcggccgaaacaacatcaaggatagccgcgaatccgtgctggtcacgttcggcaaggtcgccgattcctacggattcacagactaccggataacggacgacggcatcaagtttacgaacgggtcggaaatcgtactgctcgacttgacattctatccgcagaaagacccgatgttcgagcggctggggtcgaaagagtttacaggtggttggatagaggaggccggagaggttcattatatggcctacgaggtgctgaaatcccgaatcgggcggcatctcaacgaggaatacggactggaagcgaagatgctcataacctgcaatccgaaaaagaattggctgtataagcatttctacaaaccgcatatcgacggaacgttaccgaaagactgcgcattcgttcaggcgttggtctacgacaacccgtttatcacgcccgattacattcgaacgctcgaatcaatcggcgtcaagtcgattcggctacgtctactgctcggcaaatgggaatacgagagcaacgcaaaccaactcgccgactacgacgccatcctcgactgcttcacgaacgagcggcagacgggcgacggcgtgcggcgtatcagtgccgaccttgccatgaaaggccgtgaccgcttcgtcgcgttcaactggacgggaatggccgctaaactcgctatcgacaaaccatacagcacgggcaaggagatcgaaaccgacctgcgcgacgaatcgaggcggcacggcgtccggcgctccaacatcatcgccgattctgacggactggggcagtatctcgattcgtatttggagggcatcaagacgttccacggaggagcgcccgcgccagataacacgtatttcaacctcaaatcgcaatgcgcgttcaaactggcggaggttatcaatgcggggctgctctgcatcgactgcccggaagaactgcaatcgaccattgccgaagagctggaagcctgccttgtcgcccgcgacgtcgacgccgacacgagcaagaaacggatcatcgacaaacgagagatgaaagccgtactcggtcggtcgcccgactatttcgacccgctgatgatgcgcatgtactacgaaatcgtcccgcagccgaaaggtatgcgcgcccgcgtcgggcggctttcgtgaaaagctgttttcgggctgtttctgctggtaaaatttgaaagacgaataaactaccgccccggcggcaaaagtggattaaacaggaaaactgatgaaaataacaatcaagaaacggacgacccggcaggtgctcgctatcgaacgagtgctgacgcccgaatcgcgtacagcattgcaaaccctgccgaagccaaacaaagtatgcggcgtgcgcacgcctctaaacctcaacgatctaactatcggcgacctgttcagcttgcaggcagacggggtgcacgctcttatagagcaaatcgcgtccgtcattctgaaagtacatccccggcgctgctacaacgaacgggcagacaaaatgctcggtttcgtcttttgggtcgggcgagaattggagcgcatcgcagcgttgttcgcaagcacaagcaaccagccgacgcccgaagagatcaaagccggaataaacgaccttgatttcgggccgttcggcatcatcgactggtacgcccaccgacagggctaccaagaccaagacgacgccgcaaaggtggcatgggtgcgcgtctgcgagtgtatgcgaatcgacaacgagcggatcgcctttgaacggcgactgcgcgaaataatggccaacaaaaacaaatagacctatggaaaaaccgacagtcgaaaacaaagtcaaggagatcgccgaggcgatgggccttacctatctgtgcgaatcgtggttccgcgccaatcaagcgttcgaccgattccggcgtcaaggagatcgccgcgaggttacgcaccccgacggcctcacgctgcccgcctgcctctacgtgcaacccgtggcgggttttctgaatttcacgtcgcagggcttcgtgcgcgacgctccgtcctgccttatctcctttgccgacgctatgccgctcgactacaaaggagccgaggcgcaggagatcgccgagcggctgaaaggtcttgccgtgcgattcatcgtcgccgtaaacgaaagcggctttttcgttccggtcgccgggcaaatcaattaccgcgtcgcgttcgacaagatggacgcaaacctatgtatcgtaacgctgtcgctgacactccaagaacaggcgggcgtctgcttcgattacggcttgtagctatggacgtacaaagaatagaactcgaagccgaccgaatcgtcgccgaagaactcgaccgggcacggcagaaaattatcgagcaccacgtcgccgcgggacaacggacgacgggcacaaccgccgacagcatcacaatagccgtaacgaccaatggcggcgtaaccacgggaacgatggacgcccgcccatattttgcagcactcgaaaccggcacgcaaccgtggctgtcacagcattttcgccgacgccgcgacgggtcggtctatccgtccgccccgaaatggtttatcgacatcatcgcggactgggccgcagcaaagggtgtagatatttcagcgtggggagcggcgaccaaaataatgacggaggggtcggccctattccgtaacggcggccgcgaagacatcttcacgcccgaaatagcggccctatccgaccgcatcgccgataggctggcggggcttttcgatgcacagatcgtcgaatcaattttaagacaatagaccatgagcagaacatttacacacagcagcacgggaacagtagtcgaatatcccaatgcaacgcatttcgcattcgtcccggcgattttcaaaatcacgaaaattcccacaacgtatgacaaattagaaatggtcttaaccgaccgccaagcgcagcaatcgtacagcgaagagcgcgagccgttcaatggggccgcatatttcgatgtacggcggtatctgcaactgttgttcaataacgttgcgcagggagtgattgattacagcaaggcgttcgtcgattccccgctgaaaaagaatatctacgctacgatatactggtatcgcaacggcagtcaattctatctcggcacgtttgggatagacgctatttggggcacaatatccgcccgcgaatcatccggcggcatcatgcgtcgcaaatggttcgtccgctatccgtttacggttgatgtcttcgccaagaacggaacatcgttcgacgtgctgatcgacggtaaacagtccgacatcatgttttacaaccacaacgaggacgcggaaggtgcgaccccataccaccgctacctgctgaatccggcaagagtgatcgacccctcgaccgtcgcccgttcggtgcatatcgccgtaccgcatagcctcgtgctgaaaaacgacgaggaggctgtcggcatggttggctatacactcgacatagaccggagcgcaaacggtgtctatctgcgctggatagaccaacaggggcgctattgttactacctgttcaaggagatcggcagcgcgtcgaccgtttcgacatcctcgacatgggagcgtgacgatatgaatgtcccgaccgcttacatagacggcgtgaatatcgaaacgtcagtccggcaaagcctatcccggaaaaagacccgttcgctgggagcaaagttggtcgattccgaaacgtatgatttcctgctcacactcgcgcagtcggtcgtcgtggatgttttcgacggatacgacgccaacgacgcgccgctgtggcaccgcgtcaatatcgttgctggcagctacgagaagacgacgaagcattaccaagattttattttctcaatcgaggagcctgcgcagagcgcacaaatgctgtaaccatgacggaggaattatatatcaacggcgaggccgtcgaccttaaaccggatgcggcgacgaccctcaactacaagtctaacctgctcggcgacatatcgaaaattacgtcgtcgaattcgcagacgattcaatgcccgaagacaacacgcaaccgaaagatattcgacaatccgggggcgcccgcctatgtgtccgataagcgatacaaccgatattcggcccgccttgttcggaatggaatcgaggtcgtccgcgtcggatatgccgtgctactatcttcgtctgaaacctacgaaatcgcgctttattggggcgtgatggcaaactttcaaacgtgggtcgacaaagcggccaagttgaacgagttgaccggaaccgaagcgctggcgtggaatgcaaataccacaccgacgaccctgtcgcaaatgaaatccaccggatacggatttgcaaaatacaactgcggcgtgtcgaatgccaaccttgccaatttccaccccagcgctaccgcatggtggattctcgacaagataaccaagcaggccggattcacgttcgaaatgccgagcaagtacgccagcgcattgcgagcgatagcgattccatgcttgagtcgaaacgcatcagacgcaagcaatgaggcggaggccacggtatctatatatccattcataacgtacagcaacggcttttggggatattctatcgcgggcaataacgggacagatagacacggtgttttcgacccggatgataataccaaaatccgcaaggtcgacaacgcaacaaaggtgattatatccattgtaaaccgatcgggggcacagttgggaatggttctatattccaatagctccaacggattccccagccgcgtatatatccgagcgacacgatacagcgaccgcgacgaaacaacgacgcaaatagccgtcagtatcgggtcatcgtcggtatcgtcgtcaacaggaacgtatgcgtatcaaaaaacgtattatttcgccgacattgaagaggaaatcacgtggggagaatatgactacctgcgcctgtttccacataacgggacatcggtaatttccggttcgagattgggaaataccaaacttacgattacggaagacttcgaaaatatcatctatccgagtttatttccgatacctcaaaacctgcccgaaatctcgcaaatcgacttcatcaaggcgatctgcggaatgttcggcatctttgccgtacccgaccctacaaacgtcaataatctgaaattcgtatcgctcgacaccttacaggagaacaaagcgcaggcgtgcgattggtcggataaattcgtccgaagcaatgacgacgagccgaaaaccacggaatacaaaatcaacgactactgccgcaacaactatttcaagtacaaagaagacgatacggttttcacgaatgccgacggcaatctgaaaatcgacagcgagattttagacgccgaaaagaccgttataacattgcctttcgctccatcggacggctcgacgatacggcactacgaactgaacgatgacggaacagccgtcgacaccgtacaagtcaaagaccggattatgcgccttatcagcgacggttccgggctggctatgcttgtattcgacgacctcgatttcacgaccttgctatcgaaatactattccaccctatcgcgtctgctcaacagcgcaataaccattacggagcagatcatgttggacgaatacgatttgaaatcgctggagtattcaatcccgttctacctgcgccaatatgggaaattctacggcatcgtcagcatccagtcgacagcgaataaagcctgcgaggtcaaagccgtgcagttgccggaaacggttgtccaagaaccggaacgtccatcgcaggcggtatctatcggctggcaatgggaagacgtcgctatttacataacagccagcgctgcgcctgcgtcagacctcgatgtcgtgataaccccctacacgtacgacggtgttgccctcgtacagcaaacgatcatctttcctgccgggcaaatgaaagtgatcggcccgacgattacgcgaatagtcggcggaatcgaaataaactccatcaccccggaatatgacgacacgtatagctacatcatcgcagaacaaaccacgaaaaacgcataacaaatggcagaaaacacaacaacccgcgtcgtcgaggtgcaagtcgacaacgcggaagctatcaagttgatagccgactacaacgccaagatcgaggaatcgacggcaaaggaaaaagccctgcgcgaggcgatcaagaaaaagggagaagccaccgccgccgaccgcgaggaactggcgaagctacgcgccgaacagaccgcctacaagcgtgagttgcgcgaggttgaaaaggaggtgcagaacaacatcaaggcggcccgcgaggaagaggggtcgaaccgaaaactgcgcgccgaactgtcgaacctcacaaaacagtacgattcaatgagtgcagccatgcagaaaagcgcagagggcgaggcactcaaaaaacagatcaacgaaataaccgatgcgctgctcgaatcggaagagggtacgcaaaggttttaccggaacgtgggtaactatcccgacatcaagccgctcgaaacgcaattaggtgtaattcgtcagcaactcgcgcagatgaaatacgagggcaaagaaacgacgcaagagtatcaagacctgctgggcgtcgccgcaaatatgaaagacgcccttgctgacgtcgaggctggcatcaatgccggggcatccgacacggcgcaactcgacgtgctcatcaaggggacgcaaaatcttttgcagctatgggcacaatggtcgatactttcaaagcagttaggggtcgaaaataaagacctcgacaaagctatcggcattataacgcagacgctcggcgcactcgtggccatccaatccgtgcagaacatgttgcagaaacagtctatcgtcatgcaaaaagcacaagcggttgcaacatgggcacagacgaaagcggaaaccgcccggacgtcggcgatagccgccgggacggttgccacaaacgccggaaccgccgcagtatggaaattcacggcggcgctttttgcaaacccaatcggggttatcgtcgcggcaattatcgcggcaatcgcggccgtttatgccctcgtcaaggcgtttagttggttcaattcgtcgaccgaaaaagcgaaagagaatctgaaaaaacaaggcgaagaactcgacaagctcaataagaaatacgacgagcacatcgagaagatgaaagccctcggcaaaaccgacgaggaaataacgctgacgcgccttgccctgctgaaagaccttgccaacaaacgcgccgaacatttcaaagcggcgcaacggctctacaaaaaggacagcgaggaatacaaggcatcacaagatgccaagaaaaaagcggacgaagactaccgatcagcgctgaacgatacggcgaaccacctgcgcagcctcgcgtccgcctataacgacgccgcgttaaaaaagaaactgggtgcggtcaaatacgcgacgcaacaagctaacgaggaattcaagaatcagcgcaaactactcgtcgaattggtgtatgcaggtagggtagccagcagcgaagcgaaagatattcttgcgagcctcgaagccgcacgcgacaagacaataaaggaggcctacaaagaagccgcagaaaagcagaaacaagcccttgcgaccgaacttgctgccgtgcgcgcagcgaccgatgccaaagtcaccctgatgaaagagggtatcagcaagcagctgacgcaggaagagatcgcataccgccgtcgggtcgccgatctgaaaaaacgcctcgaaaccgaaaaggggctgacgaaaaaggcaaaggcggcaattcagcagcaaatcgagctggccgaacagcaacacgcattaaacgtcgagaaaatcaaccgcgcgggcctcgacaagaaaatccaacaagagcagcagaatatcgccctgcggctggccgccgtcaaacagggaaccgacgctgaatatacgctgaaagtcgaacagctacggaagcagcaggaagccgaacttgccaacgtcgaactgaccgaacagcaaaagatcctcatccgggagaaatacaacaaacagctggacgacctttcgaaccaatggataaacgccaacttgcaaaagcagaacgacgcgctgcggctcgaatgggagaaccgaatcaacgccgccgctgtgcaggggcaaaacaccctgcaattacagttgcagatgcgacaagcggagctcgacgccttgcaacgaatggagggcgaaagcgacgccgcattcaaggcccgacagctcgccgcgcagcaggcatacgttgacgcgaaacgagctatcaacgattacgaggtacaaatcgaacaaacaaaactggaagccctcgcagcggttacgaacggtctgtctggcctactcgaagaattgggcgaagacaataagactttcgccgttttgagcaagacacttgcattggccgagatagccatcaataccggaaaggctatcgcagcgggtacggcgcaggctcaaagcgtcccattccccggcaaccttatcgcaatcgctacgactgttgcaacgatcatggcgaatatcacgtcggcgattaagactgtcaaatcggcaaaattctcgactggaggttatgtgtccgggccgggaacgtcgacaagcgacagtatacccgccatgctgtcggacggcgaatcggtaaacgcagccttgccgacgtctatgtttgccccgatctactcggcgctgaaccagctcggaggcggtgcgccgatagtcgccgcacagtcgagcaatcagatagcaggcgaagatatgcttgcccgcgcattcgcaaagggagtttcgcaactcgacatgcgcgtcggagtggatgaaataacccgcgtatctgaccgggtgaaagtagtcgaatcattaggcgatttgtagttatgaaagtacacgaaattttgcaacagaacaccgatctgctccgggcgctcgctcgcgcaggcgcggctatcgaggatgtccgctatatccccttgtggaacgactacgaacggcttcgccgtgacgggttcaaagtagcgtatatcgtcgcgtacctgtgcgacacctacgaggtcagcgaacgcaccgtctatcgcattatccgacgattcggccgcgacgtcaatacgagccgctgacacggcgtgtcagttgattgtgcctcaaagcgtgtatttattacacgctttttatttagctttgtttcgtaaaatcaaatctatggcaactctcaaactctacaatccgattctttccgaagcgacaaaagaatgctactggttctgcgacgaggccggaacgagtttcaaggacgtggacgaattcatcaacggcatcccggcaggcgacgataatatcgaattactattgcactgcgacggcggcgaggtaaacgagggctgggccatcgtcgacaagctgcggagcacgggcaagaagataaccgcgaccatcgaggggaattgcgcgtcgatggctaccgtcgttttgctggccgcttccgaacgccgagcatacccgcacgcctcgttgctcattcacaagccctactatcccgaatacacgctggccgacgcataccgcgccgatgatctcgaatcgctggccgcctcgttacgggacgacgagcagaagatgctcgatttctacgtcgagcgaaccggagcggatcgcgcggaactcgaagcgcttatgaacgaagacaagtttatcggcatggagcgagcaaaggaactcggattcattcagacgatcatccccgcagcgtcggcatcggcaggcggcccgaacagcgcgaaatcggctgcgtggaagcagcaaaattcaataaccaacaatcaaaattctatggcaacaaaaaccacgaaaagcgaagacaaaagcgtgcttcgcaaagccctcgcagcgctggccgttgcgctgggactggaagccccgcagcccgtcaattacgagctgaacaccgaatcgggcgacacgatcacgattgacaagccggacggcgaagatcccgccgtcggcgacagcgcatcgccggacggagagcacaagatgcccgacggcaagacaatcgtcatcgaagacggtaaaatcacggaaatccgcgacgccgaagacgagggcgacggagggggcgataatggcgacggcagcggaaacgaccccgattccgaagcgctggcggcggctaacgcacgtatcgccgaactcgaaaccgaacttgcggacgcccgcaagaacgcaaaaacgaccgacgagaaacgcatcttgaatctcgtcgccattgcgggcggcgaagcatggcttgtcaaggccaagtccgactacaagcccgccgcacgtcaaaccacgaccacagccgcaggagaaggcaagaagaacgccgcgaaaccgcagtcgcgcgttcagcagcgcatcgccgaactcgaagcggcacatcagaaaacggagtaaatcacaacaacactttcaattatggcaagcacaggacttaatttttcgaatctgacccccgataacggggcgattaaagacctcaaacggttgatcttcttggccgttaccgaccccgaatcgctcggaaagattttcaatttcctgccgaaacagaagcacggcgaaaaggtcggtttcatcggcgaattcggcatggtcggcaaagcctcacagggctgtaatccgacgttcggaaccagcgtccttgcgacgagcgaaaaagagtgggacatccgcgaatgggaggttgccgaaaaaatctgctacaaggatttggagggcacagtcgcacaggtcgccatgcgtgccaagacgaacatcgccgacctcacgggtacggaatataccgactatatcctcgcgccccggctcgaactcgccatccgcaagatgttgatgcgttacgcatggttcggcgacaaagcggccgatacggtcacggacggcggcaacctgctcggttccatcgacccggcgtattttaccctcgtcgacggtttctggaagcgtctgtttacgctggccgccgcaacgcccgaccgtcgcaccacatgcgcagccaacgccgccgcgacgttcgccgagcagaaagccgccatgcgtcagaattatgctgccgtcgatttcctcgacgcacttatctccgacgcctcgacggttctgcggcaggccaacggccagctcatctacatcacgcaagcgctgaaagacgcgctggacgctgacctcaaacgaaacaacaaaggttcggaattgcagtggacggcgctgttcgacggcatcacggaaacgaactacaacggtgtgcaaatgctcgccatcccgttcctcgacgagatcatcaaaggctgcgaaaccgtcagcggcggcaaggcgtggaacaagccttatcgcgcgctctacacgatcaaagacgacctgctcgtcggcatggagagcgaaagcgaggtcgccgacattcaggtatggttcaacaaggacgagcagatgaacaagattctgtcgaaagacaagatcggaacgctgatcgccgacgacaacctcgtgcaggtaggtttctaaccctcaaaactcgattacactatgaattgcgatagcttcatcaaggcgagaatcgaaaagaactgcgcagaaccgattacacagggcgtcgaacgtaccgcatggatcggaaatcgggcgcagctcgacatcgccaatctcgaattcgtcgagggttcgacgaatcaagtgctgaatctgccgcttatcaaaggcgcgcagttgtacccgattatccaatacgggacaaagccgttcgaggggctgaaaaccgatctcgacggcagcggcaagctgggcggcacggcttcgaccgaattcccgttcatcgtgcctgacaacagtccggctgtctgcgagaatatcatcgacccgctgctcgacggagagtttttcgtcatttggcagaacaggcacaagaacctgcgggccacgaatgaggcggagcgcggggcgtcggcctaccaaatcgccggacttttcaatggcctcacgctgtcggccgggtcgtgcgagaaatacagcgacgacaccctatcgggctgggctattacgctcaaagaggagaaagcgccccgttcggcgatgttcctcaacgcgggttcgctcgcagccaccgaggcactcatcaaaacgatgctcaccccctcggcgatggagtaatgcactatgaccgtcgacgaggtaaaaatcctgctttcggacttgaataggggttacaataccccctattcgagcgccgaacaggcgactatcgaaagactttattacgaggtcttgggaaagcatttgaacggctgtcgatgtcccgacaagtggcacgacgccgtgctcgaaatcaactcgtacatcaaaaaacacggaaaaatgaaagagaaatcgaattacaaactgcgtgcaggggttattctgcaaatcgcagggtcttcggaaatttacacgaacgacaatctgaccgacgaggtggccgcggcgttcctcaaagagcacccgaacgccgccgggcgtttcgaggttatccctacggcggaaaaggatgccgaagcaccgaaagctggcggggaatcatcggaactcgaagcggcacacaaccgtatcgccatcctcgaatccgagaaagtggaacttgaaagccgttgcgccgcattgcaggcccgaatcgacgccgcggcggccaccgaaacggcggccactgacgacgagaagcccggcagcgatgacaccggagccgaaagcgctgacgaagccgacgagcggcccgccgggaacaacggcaatactgccgatgacgctatccgacaggctatcgccgccgaactcgtggccgggaagtcgaaaacggccatcaagcaggagttggcgggcaaggagatcggcggcgtgaagctcacacaccgccttatttccgactacatcgagaagatcaccgcagaggagtaaccacccatgaacgtaaagcacacaaagaagcccgaaacgcgtgtagacgttaaatacctgtcgtcgttgggtatcaaaacctacggcgacaataacctatacccgcaaacggtgcgcgatattgtcgattcgtcgcccacaggtcgcacctgtgtcgagcggcgttcgacatatatcgagggaaacggcctcgcatcgcaagcgttggccgaaaccgtgtgcgacacgcgagggaatacggtagacgacgttcatcacttgtgcgccgacgatgtagcctaccaagacggccttgccctacacgtcaattacaatattctcggacagatcgtgtcgatggcgcacgttccgttcgagaattgccgccttgaagaggaggacgacgacggcgttataagccatatcgtcgtacaccccgattggcggggtaaaaagacgcgcggcggcaaagccgtaaaggtaaccatcgaaacaatcgaggtgttcccggtcttcaatccgtcgcccgatgtcgtgcagttgcagatacaggccgcaggcggtatcgaattctacaagggtcagattctctacatttcacgtgccgggcgaaatgcctatcccctgccgttggtcgacgtcgtattgaccgacatgtcgacggacgaggggctttcgaacgtcaacaaccgaaacgtccgaaacaatttcctaacggcgggtatgctcattacgaagcgcggacaaggtagcagcacggtcgacggcgacaaagacggcgcatcgtccgacgacggatttacggaagaattcgaaaagctgcaaggcgatacgaattcgcttaaaatcatgcaggttgagattgaaaccgacgaggataagcccgaattcgtaccgttcaagacgaacaactacgacaaggagtttacagccacaacgaaagccgtaaccgataacatctatgcggcgctcaaccaagaaacattcggaagattacgcagcggcagtatcgggttcacaggcgaccttgcgaacgacgtgaagcgcgaatactgcgagcaggtagcgaagcagcaacggatgttatcgcgtgcgtatcgggctattttcagccattgggaaccgaacacgattccgtacaccggagcgggcgatgctgccatcgaaccgctcgtaaaatctattgccaacgatgcgacatctgattgaaccgtgcgacgtcgataaatacgcccgcccctgcgacatggacgacgagattatcgcccgcgccatcgaagaggccgaattgctcgacatcaaaccgaagctgggcgacgaactgttcatgcggctacttacgcacgtgcaattcgccgtactccttaatggcggcgagtacaccgacgaatgcaggaaccagcggcatttcgtcggtctgcggcggacgctggcatactacgtttgggcgcgcctcgtcaaaacgagtgtaaaccatttgacacgcttcggcttcgtgcagaagcgcgacgaatattcacaggcgaccgaataccgcgagcggcaaacggcgtacaacgacgctttcgccatcgctgacggttatatgaaagagtgccttgcctacatccaagcaaagccggaaattttcgctgattatacgctcaaggggaaagtcaaggccaatcgaacgaaattcaaaattttaggcaattaactatgtatgacatcaaattagggcagggatgcggcatcaaagccacgatgttgactccggcaggcggcgtctgcgatctgcgccgggcacgctatatcgcagcgtcactcgtactgccgtccggtgcgaccatgaactgcgaggacatcgcgtttaacgaggtcacgaacggcgtctatgtccgcctgctcggaacccgcgaactgactaccacagggcaatacggcatcgtcttcaacgtcaaactggaagacaagacgatgtattcgacgcccgttgtgtggttcgcagaggtcaaagaggacgccccgacgggctatcacgaactgacgctatcgctgtcgcttaccgtcgtaaatttcccggataatgtttcctatacaggagcgtcgccaaaaatcagcgacaaaaatacgtggctggtctacgacgatgatctcaacgcgtatgtcgacacgggtatcgaggtcggatatgcgaacctgctgtcacgctacgacggtaagtttgccgaaatcgttgtcccgtgtaccgaggcaaccaacgcggccgcagcggctacggtcgctgcaaacaacgcagccgcagcagccaatagtgcagcaggaagcgcatcggcggcgacagccgcagcgaatacagccgcaggcaaggccaacaccgcaacgacggcggcaaataacgcagcaacggcggccaacacggccacgggcaaagcaaacgaggcggcgacagcagcaaataatgcagcggaatccgcacagcgcgtcgtcgacacctacgacgacgttatcaatacgctcgcgcactccgactgcaccctcgacgagcgggtcgaggcactcgaaaaggcgcttatagccgtcttgtcgggtgctgtcgtgattcccaaattgcagatcaaggaattgaacgtatggggcaataacagccttgccctcgtcggcgacagcgcaccgacgaaagccccggacagagccgggcagttctacatcgacaagaccgcccgcgcgctctatttctcaacgggtaacgcggccgtgtcagactggaaaattcaataatgcaaacggaatatggcacaggttaacaaatacgcagatcgggctgcttatacggccgacgcgaaacgtctttcaacgaaatcggccgtttcgttcatcgaaaatgaaacgacaacgatttacgacggtgtgaataccgtcgtcggaaaatcggctgccgccatcggcgatctcgccgttttcgataaaacggacggggttatcaaatacatcaaaagcgcaacgattgccaaggcgcagattccagcaaaccttgtaccgctggccgtcgtctatgcgcgacaaggtgaacagctattgatcgtatcgctcgaccatgtttcgggcagcatccgctgggcacatacctacgaggttgcattgtcgggtttcgatctcgctgcgggcggcacaatcgtgttgaagctcggttccgaccctgccgccgcagaggtgtcgatagcgtataccgcaggcgcaacgctcgcggatgttgcatcggctatcaacgcgaaactcaaaggtgggacacccaattactcctcgacggattatgggggatgggcggcgactgcggcggacaatttcgtcgtgatgggttcgaacacgtataacgcctcccgtgcggcgattgccgttgttggcggttgtcagatcgcaaggacaccggaagacattaactaccaaacaacgttgacgggggtgttgatcgaggggtcaaccgaatatgtccgccgcaacaacggcgttaattcgtcgtttgcgggctgtaatcccgaaaaattcctgcaatactattcggccaacggaagcgataccacaggaatcaaacccggaagcagcaccataattcgggaaagcgcctttacggaagaggccaacccggaactggtcgccgcctatccgacctaccgggattatctgttcggagaacatttgctgcaatatcccgcagcctacggcgcgctgcttcgtgatggcaaggccaacacgcacctgatcggcggtctgcggttcgtcgacatccacggcgaaagcgttccccgttatccggccgctgcggccgctctcgactacggcgtcacggtcgagggcgcaactaccggactggaagcgggcgcatggtggctgccgtccgtcgatgaagtctacctgctcatgcacgaccgcgtgctaacgtccgccgaccgggaaagcgaccctgtaaaccgcacgctgtcgcgcctcggtaagacgacctgctacggatcgggttattatccgtggacatcgtgcgagtgcagttccaacaacgcgttcgtctacagcggctacacgggcctcgtgggcaacaacagcaagtgtggcacgaacgccgtgcgtccggtttccgctttgtaaaaacagttttcagtttttaattcccgcgccgcatcgcgtcggcgtgcggcgcgggttcgcaagttagacctatggcaaagaaattatctatcctcgacaaaacgttccaactggcgttgctcctgcatcgccggacagcggaattcaatcgcaaatacaaattcactatcggcgaccgcatcgacgttgtggcagaggaagcgcaggaaatgatactgcgggcgaatcatcaaaccgacccgaaacgggccgcacaaatcatctacgatttcgtcctgcgtattgacaccctgtcgctaaaactgcggatggccgttgcgctgggtctgatgagtgacgacgcaaaagcacaatgcgatatgcttatcgcaaagattaaagacgaggcgaggggttggcgaaactattttctgcgtggcgagggtgtcgtcggcaagagcaacgggccgtcggcagagagcctataattattattttgaaaagggtttgcatactatcattcatagttataccgacaatgcaaaaaactggcgagtacaattccaacaacgcgttcatctacaacggcaacacgggcaacgtgaacaacaacaacaagtataacacgaacgccgtgcgtccggtttccgaatttcaaggtaatgtagaccctttcgcctcgttctataaatcaatgcgggcggcatatcgcctatgcttaaaaaacaaagcgcataccgctaacgcgatacgcttttggcttgatgaagaaagcgagcttgtcgcgctcgcccgcgaggtgttcaactgcgaatatgtcccgcggcaatccatcgcatttatcgttacgaaaccatgcctgcgcgaagtggtagccgccgatttccgcgaccgaatcgtgcagcactatatcgtcatgcgcctcgaagctcttttcgaggaatgcggaacactcgacgataacatgttcagttgccgcgtcgggaaaggcaaccttgcggccatacaggccctacaacagcagatattccaccagtcgaaaggttataccaccgactgttatgtggcaaaattcgacctgcaatcattctttatgagcatcgacaaacgccgtctttacgacgagttggtcgcattggtcgccaagcgctacgagggatgggataaggatacgctgttgtatcttatccgcgtcgttacgctgcataatccgcaggacaacgccgtgcggaaaactccactttgcgattgggctgacctgccgcgctcgaagagcctctacaatgtcgattggttcctcggtttagccatcgggaacctcacgtcgcaatccgacgcgaatttctacaacgcacccgcgatgcggtggatgcgctccgttggcctcgctcctgtgaactacgtcgatgatttcgcattcgtcgtccgggataaggcatcgtttcttacggccatgccttatattcgaaactatttcgccgcagaacggggactgacgatgcacccgcggaaattctacctgcaacactactcgaaaggcatcaagtttttaggtgcggttatcaaatacaaccgcgtctacacgaacaaccaaaccgtcgcacggtgtttcggaaagattcactactacaacgaagcgtgccgacacagtagccgccgcaaggcccggcatgtcgagaagctggcgacaatcctaaactcctatttggggttgatgcggcatttcgatacgttcaacattcgtaaacgcatcgccgcagaggtcggaaccgtatggtgcgactatatccgtttcgacgacgacatcacgacggcaacggtcgtcaaacatttccggcaacgggaaatctgcaaatacaacgtccgcaaacaacgcagacgcgatttattcacactcaaaaacttactcaacgatggaaacacagcagcaaattaacgaattacagtcgcgccagttggaactgcgcgcgatcatggcatcgtcggacgaacgggccgcgaaatgcttcaaaaacggaacgtcgtttcgtgaaacataccccgacgatttcgcccgatacgaggccgcaaacgccgaatacaaccgaaacgaacagacgctggccaaactcgaagcgacgcgagaagcggaacgagccgaggaagagcaggcgcataatatcgacgccgtatgaacctattgaccgaacaatcgacaatggccgaaaccatcgtgcaaaactcgacgacagcaatattgacgtcgattttctatcaagctcttgcggattcgatcatttggttggtcgttgcggctgtggttatcgtctgcgatctctttttcggctgcgaagcggcccgaaaaaggggtgagcgtgtgcgcatttcgcgggcggttcgccgcacagtcaacaaaatgtgcgaatacctgtgctgggtcatgctcggcattactatttcgataggatttgccgccgactggctgaaatacctgattttcgccatcatttacggtaatgaactatcgtcgtgcttgtctaactattttgcagcaaaaggcaagcggataacatttaacgtcttttcgttgctggggcgacggctcggtatcgacgaactcgaacaatgccacatcgaggaagatgaccggaataataaaaacacagccaacaaagacgatagcataacttattaaaaccacggcaattatggcagatgcgcaaaaactcgttccgttcatcctatcgtgggaaggcggatatgtgaacgaccccgacgatgtgggcggagcaaccaacaaaggaataacgattgcaacgtggcggctgcacggatgcgataacgacggcgacggcgacattgatgccgacgacctgcgaatcataacgaacgagcaatggatggagattttcaaatgtcagtattgggataggtggaaggccgacgagatcgaaaatcagtccatcgcaaatatcgttgtcgattgggtgtgggcgtcgggcgtccacggcatcaaacaggtacaaaaaatcctcggcgtcgaggtcgatggcatcgtcggccgcaaaacactcgccgcacttaacagccgccccgcagacccgctgttccatcagatacaagcggcacgcatcgcgttcgtcgaaaatatcgtccgacgaaagccatcccaacggaaattcctgcggggatggaagaatcgcattttagcaattaaattcgaaccatgaaacgtgtaatccttttacttgcgattggctgcttgtgttgcgcgtgtgcatccacgcgcaacacctcgcgttcatccgcgcaggagcgcgtcgaagagcaagccgaatcggagcggcaaatctcaacgcaggagcaggcggaggagcagcgcgacgtcgtaacgatttcgaaaaccacgacggaaacgaaatcgacgacaaccatctacgatacgagcagccccgctgccgacagcttgggaatcccgccgccccagcagacgaccacaacggaaacgaaaaccacaaacacgacggcaaccgtcgataaatccgttattcgtcagatcgtcgacgagcaattacgcgaagccgccaacgaacaaaccacgacgaacaaacaggaagacacaggcacggaagagatcaaagaggattcgacaccgaagaacctgcgttggctcggcatcattgcaatctgcgcaaccgtcatcatgggatgttttttcgtactccgttttgtcggtcgaaaataatttgcacctttgcaccgatgtcgttttacggcatcgtgcgttgtgcgggtgttgcttcggcgaccccgcatttttgcaaaagttgtcagattgttgtcaaatatttttcggctcaattcgcaatttgctgaatatatggcttgtagaatagataaatacaaggtttcctaacctagattcgcgttcgagtcgcggtgagactacaaggagagaaacctcggtttctctcctgttttataaaccgccgggcaggcctccgatctcttcaaatctctttcgggaagagaaaattccgacatttacattatctttgcggcggataaacctccgctcagacaggcggcgtcccggcacggttcgaataaattcgtctctgcgcccggcctgcactgtctttgccccgaaaacaacgatacgatggaatcactcaaggagttgtacaaaataggcaacggcccgtcaagcagccacacgatgggtcccaagaaagccgccgaacgcttcgccgaacgctgtcacgatgcggacgcctaccgcgtgacgctgtacgggtcgttggccgccaccggcaaaggccaccttaccgacgccgcgatcctctcggtgctggagcctctcgctccgaccgaaatcgtctggaaaccggaagtcgtgctgcccttccaccccaacggcatgctgttcgaagggctgaaggcaggcaatgtcgcggacagctggaccatctacagcatcggtggaggtgcgctggcaaacgagacgtcgcgtctcgaaacgccgcacagcatctacccgctgactaccgtcagcgagatcaaagcgtggtgcagccacgaaggcaagacttactgggaatacgtaaccgactgcgaaggtcccgaaatctgggattacctcgacgagatatggaccgtgatgtgcgagacgatccagcgcggcctgaacaacgacggcgtactgcccggagggcttaaagtcgcccgcaaagccagcacctactgggtcaaatcgaagagctacaccgattcgctgaaatcccgcgcccagatttacgcctatgcgctggcgacttcggaagagaacgcttccggcggcaccgtcgtaacggccccgacgtgcggctcgtgcggcgtcgtcccggcggtgctctaccatctggccaattcgcgcaacttcctgcgcatccgcatcctgcgggcgctggccacggcgggactcttcggcaacgtcgccaaaaccaacgcttcgatttcgggcgccgaagtcggctgtcagggtgaggtcggcgtggcctgcgccatggctgccgccgcggcctgccagttgttcggcggcacgcctgcgcagatcgaatacgccgcggagatgggactcgaacaccatctgggattgacctgcgaccccgtctgcggacttgtgcaggtcccctgcatcgaacgcaacgcgatcgctgcagccagagccttcgacgccaacgcctacgccacgctctccgacggttcgcatatggtcagtttcgacaaggtcgtggaggtgatgaacgaaaccggccacaacctgccgagtctctaccgcgaaacatcgaccggaggtctcgccaagcgttacaacgacaaaaaataacccggacaggctctccccggcaggaacccgcagtttttgcgggccgggattagcatgggtccgcgtcagccgcccggcgtcatcgtatgaaaataacgatacggcctgcggcatcacagggcagcaacgccgacatcccggcccgcgcatcctctccactcctcgcactctttttcggcagttccggtctgccagctctctgcttggcaggttttcaccggtcccgtaagttcgaacagcaccaagcacgcttcgctgcagcgtacagggttttcagctatccgcagcaactccgtcagcggtcatctccgcttgcgccgaaacacccggtttggggcggccaacgcatccgaccgataagaaaacagccagccaagccgccgggattatgaaccatttcgatttacgcataattatcgggacagtgacgtgataaagacaatgaaaaaatccgaacaaggtaaaaaagaagccgctcccaaaggaacggcttctttcgaatcgtatatataacgtaggtttactgcgcctgctgaagcgattccagctcggctttcgacccgaccacgaggttgtcgtactcgcgcagacccgtaccgccggggatcagatgaccgcagatgacgttctccttgaggttctccagcggatcgaccttcgcttggatggcagcttcgttgagcaccttggtggtctcttggaacgatgcggccgagatgaagctcgaagtctgcagcgcggcgcgggtaataccctgcagcacctgcgtcgaggttgcgggaataatatcgcgcacctgcacgggcttcatgtcgcggcgcttaaggctcgaattctcgtcgcggagcttgcgcagcgaaacgatctgtccgggctgcagcgacgtcgaatcgccggcgtcggtaacgaccaccttgtcgtaaagttcgtcgttgacgtccatgaactcccacttgtcgacggtctggtcctcgaagaaacgggtgtctcccggatcctcgatccgcaccttgttcatcatctggcggacgatgacctcgaagtgcttgtcgttgatcttcacaccctgcatgcggtacacctcctgcacctcgttgacgatgtactcctgcaccttcgtcgggccgaggatattgaggatgtcgctcggagtgatggcgccgtccgacagcggacttccggccttcacgtagtcgttctcctgcacgatgatctgacgcgacaggggcacgaggtaacgcttcatatcgccctgtttcgaggtgatgatgatctcacggttaccgcgcttgatcttgccgaacgacacctcgccgtcgatttccgaaacgatggcggggttcgacgggttgcgggcttcgaacagctcggtaacacgcggcagaccgccggtgatgtcgccgcccgacttgccgacggcacgcggaatcttgatcaggatatcgccggccttgatcttggcgttgtccttcaccacgacgtgggccgaaacgggcaggttgtactgcttgacctcctcgccctccttattgacgatcttgatgacggggttcttggtcttgtccttcgactcggtgaccaccttctccgaaagtccggtctgctcgtcgcgctcatcgcggtaggtaacgccctcgatgatgttttcgtaaacggcgcggccctcgtactccgaaataataacggcgttgtaagggtcccactcgcagatcatatcgcccttcttgacttcggcgccgtccgccatgaagagcgtcgcgccgtaaggcaggttgtgcgtataaagaacgatttcggtcttgggatcgacgatgcggaactccgactgacgcgagataacgatgtcaatcgcctcgcccatggcgttcttgcccttgacggtgcgcagctcgtcgatttccagacggccttcgtatttcgaaacgacattggtctcgacggccgtaccgccggccacaccgccgacgtggaacgtacggagcgtaagctgcgtacccggctcgccgatcgactgggcggcgatcacgccgaccacttcgcccttctgcaccatgcgggcagtggcaaggttgcggccgtagcatttggcgcatacgccgcggcgcgcctcgcaggtcagcaccgagcggatctcgaccgactccagcggcgacttctcgatcgcttcggcgatcgactcggtaatctcctcgccggccttgcagatcacttcgcccgtaagcggatggatcacgtcgttcagggccgtacggccgagaatacggtcgtagagggtctgcacgacgtcgtcgttgcgcttgatggccgtagccgtcaggccgcggagcgtaccgcagtcctcttcgttgataatcacgtcctgcgcaacgtccaccagacgacgggtcagataacctgcgtcggcggtcttaagcgcggtatcggcaagacccttacgggcaccgtgcgtcgaaatgaagtactccagcaccgaaagtccctccttgaagttcgagaggatcgggttctcgatgacctgctgaccgccctcgacgcccgacttctgcggcttggccataagaccgcgcataccgctcagctgacgaatctgctccttcgaaccgcgggcgccggagtcgagcatcatgtataccgggttgaaaccgtcgtcgtcctttatcagcgtgtcgatcacgaccttcgtgagcttggtattgatgttcgtccagacgtcgatgatctggttgtaacgttcgttgttggtgatcagacccatgttgtagtcctccatgatggagtccgaacgctcgtaaccctcctgcacgagtttctccttctcttcggggataatcacggcgtcgaggttgaacgacagaccgccgcggaaggccatctggtaacccatatgcttgatatcgtcgaggaaagcggccaccttgtcggcgccggccttcttcatcaccacggcgatgatgtcgcgcagcgaacgcttcgtgaggatttcgttgatataaccgacctccttgggcaccacctgattgaagaggatgcggccgatggtcgtctccttcaattcggtaatcggattgccgttctcgtcgatgtcgtccaccagacacttcacgatggcgtgcaggtccgcctgacgctcgttgtaggcaatgatagcctcctcaggaccgtagaatacgcggccttcgcccttcacgcccttgcggggtttggtgatgtagtacagaccgaggaccatgtcctgcgacggcacggtgataggcgcgccgttggccgggttaaggacgttgtgcgaaccgagcatcagcagctgggcctccagaatggcggcattgcccagcggcaggtgcacggccatctggtcgccgtcgaagtcggcgttgaacgccgtacatgccagcgggtggagctgcattgccttgccctcgatcagcttgggctggaacgcctgaatacccagacggtgcagggtcggggcgcggttcatcagcacggggtgtccctttatgacattctccagaataccccagatcacggggtctttccggtcgatgatcttcttcgcggatttcaccgtcttcacgatgccgcgctcgatgagcttgcggatcacgaacggcttgtaaagctcggccgccatgtccttcggaatacccatctcgtgcatcttcagctcagggccgacgacgatgaccgaacgggccgaataatcgacacgcttacccagcaggttctgacggaaacgtccctgcttgcccttgagcgaatccgacagcgacttgagcggacggttcgactcgttcttcacggcgttgctcttgcgcgagttgtcgaacagcgaatcgacggcctcctgcagcatgcgcttctcgttgcgcagaatcacctccggagccttgatctcgatgagccgcttcagacggttgttgcggatgatgacacgacggtaaaggtcgttcaggtccgacgtggcgaaacggccgccgtccagcggcaccagcggacgcagttcgggcggaatgaccgggatgacgttcagcaccatccattcgggcttgttcttaccctccgacgcgcggaatgactcgatgacgttcaggcacttgagggcttcgctcttacgctgctgcgaagtctcggtcgaagccttgtgacgcagcgcgtaagacatcgaatcgaggtccacggtcttcagaagcgtgtagatcgcttcggcgcccatctgcgcgacgaacttgttgggatcgctgtcatccagcgcctgattgcccttcggcagcgcggccagcacgtcgagatactccttctccgaaagcgtggccagacgctcgatgccctgctcggcggcggcgccggcgttgatcacgacataacgctcgtaatagatgatcgcctccagcttcttcgacggaatccccagcaggtaaccgatcttcgagggcagcgaacggaagtaccagatgtgaaccacgggcacgaccagcgaaatgtggcccatacgctcgcggcgcaccttcttctcggtcacctccacaccgcagcggtcgcagacgatacccttgtagcggatacgcttgtacttgccgcaatggcattcgtagtccttgacgggaccgaaaatgcgttcgcagaacagaccgtcgcgctcaggcttgtaggtacgatagttaatggtttcgggcttgagcacctcgccgctcgactgggccagaatctcctcaggggaggccaagccaatcgaaatgcggctgtaaccattgttcgtcttattgtctttggaaattgacatatttgttcttcgtttttcttatcctcaaattataccttattcgagtttgaccgacagggccagaccgcgaagctcgtgcagcaacacgttcatagcctccggaatacccggtttgggcaggttctcgcccttgacgatcgcctcgtaagccttggcgcggcccatcacgtcgtcggacttgatggtcaggatctcctgcaggatgttggcggcgccgaagccttcgagcgcccaaacctccatctcaccgaaacgctggccgccgaactgggccttaccgccgagcggctgctgcgtgatgagcgagtagggaccgatcgaacgggcgtgcatcttgtcgtcgatcatgtggccgagcttgagcatgtagatcacgcccaccgtcgccggctggtcgaacatttcgcccgtgccgccgtcgtagaggtacgtacggccgctgtgcggaatacccgccttggccgtgtactcgttgatctggtcgagcgacgcaccgtcgaagatcggcgttgcgaacttcaggcccagttcacggcccgcccatccgagcacggtctcgtaaatctgtccgaggttcattcgcgaaggcacgcccagcgggttcagacagatatcgacgatcgtaccgtcttcgaggaacggcatgtcctcgtcgcgcacgatacgggctacgatacccttgttgccgtggcgtcctgccatcttgtcgcccaccttgagcttgcgcttcttggcgatgtagaccttggccatctgaatgacgcccgtctgcggaagctcgtcgccgttggtgatgttgtacttctcacgcttgatggcggcgtcggccttcttccattcgatggtataattgttaatggtagcttcgatcagcgcgtcggtgtgggcgtcgcccgtccacttgcaggtgccgagattcagataccccatcaccacgccggtcttctcgtccgtggtcttgcgggcgatctcctccagcatcttctgcgagaatttcgtgcctgcgggatagagttccacaccgaaatagtcggtgacgccggtcgtagtcttgccctgaagcagagtccacaacttggccaccagccgtttggtcagctccgcaatctcggctgcgaacttctcgtcgagtttctcgatctgcaccttctcggcgctcttgcccttcttgccctccttgttggcgcggctgtagagcttcgtgtcgatcaccacgccgtgcagcgaaggctgcgccttgagcgaggcgtccttcacgtcgccggccttgtcgccgaagatggcgcggagcagcttctcctcaggcgaaggatcgctctcgcccttcggggtgatcttgccgatcaggatgtcgcccggatgcacgttggcgccgatacggatgataccgttcgcgtcgaggtccttggtagcgtcctcgctcacgttcggaatgtccgaagtcagctcctcgacaccgcgcttggtgtcgcgcacctccatgatgtactcgtcgacgtgcaccgacgtgaagatgtcctcacgctggatacgctccgaaatcacgatggcgtcctcgaagttgtaacccttccaaggcatgaacgccaccttcaggttgcggcccagagccagctcgccgtgctgcgtcgaatagccttcggtaaggatctgtcccttcacgaccttgtcgcccgtcagtacgatgggcttcagggtgatggaagtattctggttggtacggcggtagcgcggaagctcgtatgtggtcacttccggctcgaacgacgccagaatctcgtcttccgtacgctcgtacctgatctgtatcttcgtcgcgtcggcgaaagtcacttcgccgtcgccttcggccacgatctggatgcggctgtcagagatcatgtccttctcgatgcccgtgccgacgataggagcgtccgtagtcaccagaggcacggcctgacgcatcatgttcgaacccatcagggcgcggttggcgtcatcgtgttcgaggaacgggataaggctcgcggcgatcgaagcgatctggttcggagccacgtccatcagattcacctcctcggcggtaaccaccgggaagtcggcgccttcgcgcgccttgatacggtcgggctgcaggaagtggccttcgtcgtcgatcggcatgttcgcctgcgcgacgatcttgccctcctcctcttcggccgagtagtagcggatgtcgtcgttgttcatgtcgatctgtccgttctcgaccttccggtagggagtctcgatgaatcccatcggcgaaatcttcgcataaacgcagagcgacgaaatcagaccgatgttcgggccttccggcgactcgatcgggcagagacggccgtaatgcgtgtagtgtacgtctcgcacctcgaaaccggcgcggtcacgcgacagaccgccggggccgagggccgacagacggcgcttgtgcgtaatttcggccagcgggttgatctggtccatgaactgcgagagctgcgaagtgccgaagaacgagttgatcaccgaagacaacgtcttggcgttgatcaggtccaccggcgtaaacacctcgttgtcacgcacgttcatacgctcgcggatcgtacgcgccatacgcacgaaacctaccgagaactgattcgacagctgttcgcccacggtgcgcacgcggcggttcgacaagtggtcgatatcgtccacgtcggccttggagttgatcagctggatcaggtatttgataatggcgatgatgtcctcgcgcgtcaacgtgcgaatggccggatcggtatccagatccagcttcttgttgatgcgatagcggcccacgtcgcccaagtcgtagcgcttgtccgagaagaacagcttctcgatgacgtcgcgcgccgtcgcctcatcgggcggctccgaagcgcgcagctgcctgtagatgtaaacgacagcctccttctcggagttgcaggggtctttctgcagggtattgtatatgatcgagaagtcgatgccagacaagctctccttgtgcaggaggatcgtcttggcgccgctttcgagaatctggtccacatgttcctcttcgaggaccgtctcgcggtccacgataacgttgttgcgctcgatggaaaccacctcgcccgtatcttcgtccacgaagtcctcgacccacgtcgaaagcacacgtgcggcgagcttgcggcccacggccttcttgaggttggccttcgtgaccttcacttcgtccgccagatcgaagatttcgagaatctgctggtccgcctcgtagccgatggcgcgcagcagcgtggtgacgggaagcttcttcttacgatcgatgtaggcatacatcacgttgttgatgtccgttgcaaattcgatccacgaacccttgaaaggaatgatacgcgccgaatagagcttcgtgccgttggtgtgcatgctctgtccgaagaacacgcccggcgaacggtgcagctgggatacgatgacacgctccgcaccgttgatgacgaacgtaccgcgttcggtcatatagggaatcgtaccgaagtacacatcctgaacgacgacaccgaaatcttcgtgctcgtcgtccgtgcagtaaagcttgagtttggctttcaggggaacgctgtacgtcagcccgcgctccagacactcctcgatcgagtagcgcggcgggtcgatatagtagtcgatgaactccagaacgaaattgttccgggtatccgtaatggggaaattctcctgaaacaccttatacagcccttcgtttttacgattttcggccgtggtgtccatctggaaaaagtcccggaatgatttaagctgtacctccagcagatcgggataaggcacccggttcttgactgtcgaaaagctaattctttgttgtgtttttgctgtggacatcgtaaaatccaaattatgttgaagtgtaattctggtgggttacgctcccccgcgttgccgggtatttattatcccgccaatgcccccgtttgcaggcgtatttcgccccgggagcatcctttcttccaaagagtggacacagctcctgctcggcacttccagtctttagaccaagaaaaggcatagagcttacacgccggtaagccctatacctgaatcgtctgaaacgacttaagcagcaatgctacttaagctcaacttcagcaccagcctcctcaagctgagccttgatcgactcggcctcttccttggagacaccctctttgacagccttgggagcgccgtcaacgagagctttagcgtcgcccagcgaaagaccggcgaggtccttaacgaccttgataacctgaagttttgcctgaccggcggtcttcagaatcacgtcgaaagtcgacttctcggcggcagcagcctcgcctgcgccagcagcgggagctgcaacggcaacagcggcagcagccggttcaatgccatactcctccttgaggatggtagccaattcgtttacctcggtaaccttgaggtttaccagttcttcagcaagtttctttacgtctgccatagttgtaagcttattaaattttgtttaattcttgattgtgattagttgtttctcgattcgagcgtcttcacgatgcccgcaatcttttggcctgcattagcctgcaatgcagaaataacattcttcgcaggagactggagcagtgcgatgatatcgccgataagctcctccttcgacttgatgttacacagagcgtccagctgatcgtcgcccacgtaaacgcatccttcggcaaaagccgccttcagaacgggtttgtcggacttcttgcggaattccttgatcaggaccgcaggagccttcgcaacgttggcgaacataatcgaggtcggaccctccaatacttttaccagatcagcgtcagccttctccaccttctccagcgccttgcccagcagcgtgttcttcacgactaccagtttgacgtcgttttcgaagcacttgcggcgcagggcagcggtctgctctgcgtcaagcgccgcgatgtcggcgatatagaagtgaggataagcttggagctgctcggcaatggcgttaataacgaccagtttttcttcctttgtcatctcttctctcctccttcttatttggtttctactgatttggaatcaatctgcaagccgggactcatcgtggtcgagagataaatactcttcacataagaacctttcgcagcagccggtttcagtttgagaatcatgttcagcacctctttcgcgttgtccacgatctgctcggccgagaacgaaaccttacctaccgaagtgtgaatgataccgaatttgtcgaccttgaagtcgatcttacccgatttcacttcctgaacggctttgcccacctccatcgtaaccgtaccggtcttggggttaggcatcaggccgcggggacccagaatacggcccagcgcaccaaccttgcccattacgttcggcgtgcagatgataacgtcaacgtcggtccagccgcccttgatcttatcaacaaactcgtccaaacctacgtaatcggcgccggcagcctgagcctcagcctccttctcaggagtacagagcaccagcacgcgcacctgcttacccgtaccgtggggcagcgtcacaacgccgcggaccatctgattggccttgcggggatcgactcccagacgcacgtcgatatcaaccgaagcgtcgaatttcgtgaacgtaatctccttcagaagagcggcagcctccgagagcttgtaagccttattggcttccaccttggcgtaggcgatcttttgattttttgtcaacttactcatcttcgattacatattaggaaattcaccgacgacgttgatacccatactgcgagcggtaccagcgatcatacgcatagcagcctctaaggtaaagcagttcatgtcaggcattttgtcctgagcgatctcgcgcacctgatcccacgtcacctgaccgaccttgtcgcggttaggctgtgcggaacccttctgcactttggctgcttccttgagctgaatagctacaggcggctgttttacaacaaagtcgaacgacttatcgctgtaaaccgtgatgatgaccgggagaaccttccctgccttgtcctgggtacgcgcattgaactgcttacagaagtccatgatattgactcccttagaacccaatgcgggaccaaccgggggcgaaggattggcggcaccacctttgatctgcaatttaataaatgcagcaacctcttttgccatagttttccttggttaattattctttttctacttgtgtgaaacccaactccataggagtcttgcgcccgaatatcttcaccgataccgtgagtttcttgcgctcgttgtcgacggcctcgatggtaccctggaagcttgagaaagggccatcggtgaccttgacggtctcgccgacaaagaatggtatttcgttctcctcctccatggcattcatctcgtcgacgcggccgaggatgcgggccacctcctgcggacgcagcggcgtggcattcatcttgcgactgtcttccttggtatcgccgaggaaacccagcacattgggagtgttacgaattataatcggaatctgacctacaaacgcggcctccaccaatacgtagcccggataagaaaccttctccttggaaactttctttccgttgcggatggtgtataccttttcggtgggaatcagcacctgagatatgtactcctccagattattatggcggatttcggcctcgatatactctttgaccttgttttccttaccgccgatagcccggacgacataccactgcttcttaatctcgctcatcgtttcagcaacaattaacggccaagattacccagtgtcttgtaaatgacggccatcaggttctcgaacgtcaggtccatagccagcacgacaatggcgaaaatgaccgaagccaccatcacgacgatcgtagagctttggagctggggaaacgtgggccacgtcaccttgtttacaagctcgttgtaggattctttaacgtaattgaacatacctttttttcttttactctttggcaggagcagagagattcgaactcccatcaacggttttggagaccgctattctacccttgaactatgctcctaaaagcgggaagcggtgcggaacaccgcttccctatgggttgtgaaaattatttcacgatcttcaggatctgacctgcacctaccgtacggccaccctcgcggattgcgaaacgcagaccttcgttgatagctaccgggtagatcagcttcacggtgatggtcacgtggtcgccgggcataaccatgtctacgcctgcgggcaggtgaacctcaccggtcacgtccatcgtacgcagatagaactggggacgatagttgttgtggaacggcgtgtgacggccaccctcttccttcttcaggatgtagacctcagcctcgaactcggtgtgcggggtgatcgagccgggtttagcgactaccataccgcgcttaacctctttcttgtcgataccgcggagcagcagacctacgttgtcgccggcctcgccctcgtcgagcagcttgcggaacatctcgacgcccgtacaggtcgaagtcagggtcttctcctcaagacctacgatctcgacgggatcgcctacgtggatgataccggtctcgatacggcccgttacaacggtaccgcggccggtgatcgagaacacgtcctcgacaggcatcaggaacggcttctcgttctcacgctgcgggatcggaatatactcgtcaacagcgttcatcagctccatgatcttgtcctcccatgccggctcgccgttcaggccgccgagtgcggaaccacggataacgggagcgttgtcgccgtcatattcgtatttcgaaagcaggtcgcgaacctccatctcgacgaggtcgagcatttcggggtcgtccaccatgtcgcacttgttcaggaaaacaacgatgcggggaacgttcacctgacgggcgagcagcacgtgctcgttggtctggggcatcgggccgtccgttgcggcaactaccagaatggcaccgtccatctgagcggcaccggtaaccatgttcttcacatagtcggcgtgtccggggcagtctacgtgagcatagtggcggttggccgtctggtactcaacgtgcgaggtgttgatcgtgataccacgctctttctcctcaggagcgttgtcgatggagtcgaacgaacgaagctccgacagacctttcttagccagaacggtcgtgatagcagcggtaagggtggtcttaccgtggtcaacgtgtccgatggtaccgatgttcacatgcggtttcgaacggtcgaatttttcttttgccatagtattaagtatttaaagtattgttaaaaattgctttaaagttttaaaaattcatttcgcagaacgagcgggcgacacaaactcccctatcaaccgataggagacgtccgtatcacacgcttctgcgtcttgagcggaagacgaggctcaaactcgcgaccctcagcttggaaggctgatgctctatcaactgagctacttccgcaaaaatataccgtatcagagtctaccctttcctccgcgccgtccgtcgatcggacaccgccgaagatcttgcaactccaaccggcactctttcttagtgggaagtgatggattcgaaccaccgaaggcgtaagccagcagatttacagtctgccccatttggccactctggtaacttcccaagttgtctgcccctgaaagatcggctcgctttttgcgcgggtctttcccgtgaggctttcgttgcgccgctgctcgtgttccggaagaccttcgtctttccgcttctctcgcatcggctgtccgagccgatggagggattcgaacccccgaccagctgattacaaatcagctgctctggccaactgagctacatcggcaaaatcaaccgttttggattgcaaaagtaggcataaaaaatttaccggccaaattatttccaataaatttttcacttttttactcttctcaaagaacgtcggtctaccgccttttttacaggggtgaaatcgggtgcaaagataggaaaagttttatattttacaacagcttctgcaaaaaatatcaccctccgcacccaaggttattaccgttccgcccctgcacgctccgaaaccgcagttcctgcgggtgcaaaacgctccgacacctattaatatataaaaaacagcttccccgatttttcactacctttgcagccaaaaccggcatataccatgaaaacgattccactgttcgacgacttctcgctgcgttcgctgtgcagcggggacgcaccggcgattttcggcgccatagacacccagcgcgaacacctcggacgctggctcccgttcgtggcggcgacgcaccgcgtggagcagacgcaggaggtcgtcgcagggatgctgaacgacacggcaaacccggtcttcacgatccggagcggagatgcgttcgcaggactgatcggcttcaaatcggcggacggcacgacgcgcaccatcgaaatcggctactggctccgcagcgagtttcagggccggggaatcatgacgtccgccgtgcaggcgctctgccggctcgctttcgaagagatgggcatggaacgcatcgaaatacgctgcgcgccgggcaatctccgcagcaaccgcattccccagcggctcggattccggctcgaccgggtggaagtccggggcgaacaactctccgacggggagttcgtcgatctgaacgtctacctgctggagcgctgaaaaagaagcggagaagcccacagcctctccgtttccacaatccgacaacaaacccaagctgccggcatatgctctccgtctgcggacggtacggggtaaacccccggctacccctcctttatggatgcgatcagctgtgcgggcgtcgcctgcaggtaattcttgcagaaccggctgaactgcgtataatggcggaatccatacttgttcatcagcaccttcgtactgtcctcgccgtcgcggatatccgtaaagatcttcagcgccttctggcgcatcatccaatgatagacgctgtcgttgaagtgctcggcgaaacggcgcttgaagaccgaaaggctcatgcccgcaagcgcggccagctccgccacgccctgcgccttgtcgtaattgttgcacacgaacacgcggaagttatcctgcggctgaatcatcgactggaagaaataagcatgctccgtcggcgtatacagcaccttgatcatcatgaaaagctccgtagccttcattttgtggtaacgggcgcactcgctcagctccggaacggcgaacagatcgcagagcaggcgttcgatcgtaggatgcatcgaaagccgcggcaccgcttcggtcgggatgaccgtatcgtagggcatcaccttatcgaaaatatcctgttcgcagaactcgatgcggtgaatcagcgaaagcacgacgacatgggcgtcgtcctgcgccgtggtgacgaaacgttcgcccctcgccagacatacgtattgtttcgacgtcacaagccgcaccgtatccccatgctccatcatcagcgaacccgacatcacgaaaagaatgcgcaccatgcggtctgcgggaaaagtcaccccttctcctgctgaaaaagaaatttgcgcgaaacggcagtaattcgaatcgcctatgcgacgaaacggcgcaggaaacgtaggacaactactacaatccgcagggcaattctctttcaaaccggcctccacaaactgcggtttgatttgataatccatattacaactatgtatattttttattgtccaaatgtacgtaaaaaaaataaaaatgacaaaacagaacaccgcgcatcgcaaataacggttcgtctccattccgatccgaatcaaaaaacatatccggcatgccatacaccgcccgtctctgacaaaatacatccattatccgccccatctcggtttccttgtcgaactcactcgctcgccaaacgagagaggcatcccggaatattccgggatgcctctctcatttccgcgcggcgccggatcatccggccctccgcccgttatttatagcttacgatcagaatcttagacgattcccaaaagcggacgggatcggtgatgagcagtttcagcacgaccttgtcggcatccgtcaccaactcgtacgactcttcgggatgcgtcgtcacgaccgaaacctttttctgcccgatcggcacctccgacagcaaccgagaatcggacttggtaaaactggccagattatcggtcttattgaccgtcagcgtacgcccgatgaaaccctgcttgttgatgatctgcgcctcacgcagctctttctcggtcccgacgatgtaatacaccgtattcagctggttctccagttcgatcttctcggtgttcagggtctcgacctgctcgctccgcacggccacctgctcggtcagggtctccacctcgacgcccatcttggtgagattctcccgcagctgagcaatttcgtttttcttctcggtaagctgcgcgctcatgtcccgaatcatcttttccagtccgtcgagacgcagattggctttccgcaattgcgcgacagcgctctgcagcgaagcgatcttgactttgttttcccgcagcagccggtcgatggcggcgatatcgttgttgatctcctccacgggacggcggccgccttcggcgtcgcctgccaccgagatcagattctcacgcgtcctgatcagcgcaagattctcggaaatggagccgatatcttcgaaaacggcattgatcagcgagtctttcgcgctgacgaccaccgaaagcgaatcgcgctgctcctcgaccttgacgaccgtccctttgctcacacacgacgccagagccagcgcagcccccagcgccatgacaattacatgcttcataactttctaacgtttaagtcattgtttgccttacggcggcaaatatatacataaaaacgatatcgtgtgcaaaaaaatcggccccagagcgaaaattccggccgcacctgccggcccttccccggcatatccgcgccccggccgcagaaacgttcctacacccgccaaacacgccctcgaccgcaggaccgttcctacacgcagaacactccctcgaccgcaaaatagctctcccggcaacaaaccgcaccaaaaacaaacgggccgcacacaagtgcagcccgttgtctctcagtgcggaaagcgcctatttcgcgcctttcttatcgtagcgttttgcgtaacggctcataaacttatcgacgcgaccggcggtgtctaccaacttcatcttaccggtgtaaaacgggtgcgacgtgttggaaatttccatcttatacacgggataggtttcgccgttcacttcgatggtctcttttgtcgaaacggcggaccgacacaaaaacacgtggtcgttggacatgtccttgaacgccaccaaacgataattctccggatgaataccctttttcatttcgttgtttttgttttaattgattgcttaagcgggacaaaggtacgaatttatttgcaacaaacaatactccgcccgattttccgcgaaactttttatctccgcattacctccgcagcgagaacgtcccgtgccgaaggccgcgccggacggataaaaacagcccgcagaaaggctcccaaaggcccgcgacaaaatatcccgaaaatttcccgccgccggataggtgtttcgccccgcagcacggtattatattatgacaagcttccgcgccgcgcaaggggcggagagacaaaacaacaaaacaccttaaaacatgaagagactccttctcatcgcggccttcgccgcactgacgtccgctcagggcgccttcgcatggggcaggctgggacacgccgccgtcgcccgtctggccgagcaacacctgacgaaaaaggccaaagccaatctggacaaactgctcgacggccgctcgatcgtctattacgcttcgtggatggacgattacaagccccaaatgctcgtcgatctgggctatacgcccaccaacggtccccgcatgcacatgctgccccacaccttctcggtggacgaaagcggcgaggtaatccgcggcaaccggctgcccggcgacaaatatctggccaactgcctctattacgtcgagcgggctgccgaccagctgaaaaaccgcatggacgagatgaacgactccacgcggctggcctgcattcaggtcatcgtccactgtctgggcgacatgcactgccccggacacgtccgctggccggacaatcaggaaatcggctacttcaacgtcgtcctcaaaggcagcgaaatccgctaccacacgatctgggacaccccgatcgtagcgacgacccacccgtggagcttctccgatctggccttcctgctcgaccgctacaccgaagaacagcagcgggcggcgatcgccggcgacatctacgactggggccgcgagtcggccgcaaactcgaaatgcatctacgacgtgaagccgggcgacaaactgggacacgacttcatcctgaaatacaaaccgctggccgaagagcagctcgccaaagccggctaccggctggccaaggtcctcaacgacattttcgaccgtcagtaagcccccgccgcggcctgcccggacctaaaaaatctccgcgtcatattgggaattcggatttgttttgctatatttgtgcccgcggtttgggcacacagccgccggacggacccatagctcagtcggttagagcagcggactcataatccgaaggtcgtgggatcatgcccctctgggtccactgaaaatcaaagatctgcagaaatgcaggtcttttttgtcttatttgcagggcacatccgaccgaacagccaatcggcacgtgtggaatccccgatttcggcatccatagaattctccggtcacatgcctgcgcagtttttcccgtccggcgacgcaaaatacaaaaaatcgccgcgccccgaagctccccgccggagaaatttgcgcgggaattttgccggcgggtgcagggattcttccgattttttgttacctttgcggaaaataagattattaatccattcacagcatcaccatggaattcgaaggaacagtttacaaaataatgcccgtgacaaaaggaacgtcggcacgcggcgaatggcagcgtcaggacgtggtcttcgagatgaacgaaggttcgttcgcccgcaagatctgcgtcacgtttttcaacaagcccgacgacgtggcccgtctgaaagagggtgcggcctacaccgtctcggtcaatatcgagtcgcgcgaatacaacggccgctggtacaccgacatccgcgcatggcgcctccagcccaaacaggccgaagttcccggcgcaggcccgatgcccgacatgccgcccatcgccgaggagccctcttatgcatcgtcgcccgccgaggtggacgacctgccgttctaaagcggacggaaaacatacaaggcggctgggatctccagccgcctttttcatttcaaaatcaccgccatgcaaccgaccgttcccgacacgccacccccgcctgcaaccgacatccggccgctccgcgaagcggaaatcccggcggcttccgcgctcgtccgccgcgttttcgcagaattcgaagcccccgattacgcgcaggaaggcatcgacgtctttcaccggttcattgccccggaagccctgacggaacagtttcgcaccggcgcgctgaaactatggggagcattctggcaggatacgctggccggcgtcgccgcggtcagaaaccgtagccacatcagcctgctcttcgtggacgcatcctgtcaccggcagggcatcgcccgcgccttgttcaacgccgtacgcgacttctgccgcaccgatctggcggtttcccgcatcaccgtcaactcgtcgccctatgccgtcgaaatataccgcagactgggattcaccgcaaccgacgccgaacgcgtcacggacggaatccgttttaccccgatgacatacctattataacagcggccgcagcgaacgccccccccgatgccggcacaatgacaaacagggcggaccccgcacggggtccgccctgtcatattcggaatctcagccgcctattttgcgggggccacctccggagtctcggccgtcgccgtcgaatccgccggagcgggttcctcgaagggaacgacgtcgatcagctccacctcgaactcaagcgcctcgttgggaccgatgtcacggccggcgccgcgtgcgccgtaagccagatcggcgggaatccagagcgtaatcgtgccgcccttgccgaccagctgcaggccctcggtccaacccttgatcacgcggttgagcgggaattcggcctccgtatcggcctccttgggcgtgccgtcctcgttgaagccgtcgggattctgcttgcggatcatctcctgctgctctttcgggcggtttgcgaatttcgaagtgtcgaacaccttgccttcacgcgtgcggcccgtgtaatgcaccttcaccacgtcgcgcggatccttcggcatcatcgaagcgtcgccctgcttggtaaccttgtaaagcaggcccgactcggtcttcttcacgcccgacttcttctcgatcttctccagccacgccttcgaagcctcggcgttctcggccggacgcttcaccatgaagtagtactgcagatactggttcacggcatcctcagccatcttcgccttgccgtcgcgcacgtcctgcatggcctgaccgatccatacgagctgaatgggcatgccgctctggctgatgttgtaaccgatgtcgttaccgaacgcatacgaaatctcggcacgctcctcctcgctctcgaacatggcgggatcggctgcgggatactcgaccttggtcgtgtcgccgccggccagacggatgctgtcctgctcggcacgcttggccgcgatctcctgcgcacgctcgccgcgcttgctcatgaaatattcgcgcagcatgtcgagcgacttgtcgtgctcctgcgcggccttacccatggcaccttccttgatacctttgtcgatggccttgaaatcgaagggaatgtccttcatctcgtgattcatgccgtagccgatattggcgcccagcgaatacgaaagcgagtcgaaatccgaaaggctgcccatacgaacgccgccgtccttgccgccgcaggcggtcatgaacgcagcacctgcaagtgccgctgcaaaaagaatttttttcattgttttgtttttcaaatatgtttaatcgtttgtgcctgttaggggtttacccgcgcaaagttataaaatatttggaataatggtttaaaattaacggcgtaaattgctgcgccgcgaccaattcgcatatttatcgacatcgacaagctcgatttcgtaatacagcgtggtattcggctgaattcccagctctttgtcaccctccgtaccgtaagccgccgaggagggaatccacgcgttgatctttccgcccctgccgaccagtttgacgctctccttcatgcccttgagcaggccgccgagcgtcgtgcgcagcgtatcgccccgctcataggaggagtagacgtcccggccgtcggccgtgcggatcaggtagcggagcgcaatgctgtcacggtccgaagcgggtatctgctcctgatcgcccagcacctcgaccgtataggtcacgcccgatgcggtgcgggcgtagttgcggttcgccttgaggatatcctgcaggaactgctcctcgtaggcgcgggctttctccggcagcgcataattcatatagcgcaggtagaaaacctcggcgtcggccgccgagaatttggtcccttggcggaacacgtcgcggatgccttcgcatacggcgttcacgttgatcgtcgaatccatcttcatcaggttcatgcccacgttcataccgatcacataggctaccgaatcggtgtcggtcttgagcttcacgcccccgcccgtctttttggagcaggccccggccagcagcgccgcggccgtcaggacaactaatgtcttacgcatatcaggttcgttttttcgaaaaaatcagtatcagcaggctgcccgcgacggcggcggccgtcgagcccatcaggatcgcgattttaccccggtcgatcaggtcgggttcggtgtaggccagcgcatcgacgaacagcgacatcgtgaacccgataccgcccagacaccccacggcgaagagcatgcgccacgtcgccccttcgggcagctcggccagccccgacttcacggcgccccagctcgcaagaaatatgcccagcggctttcccacgagcagtccgaagaagacgcccatccccaccgatccgatatcgggcgacatatggaaaatattgaggtattcgagcgacgtgatctcgaccccggcgttcgccagcgcgaaaatcggcatcacgaggaaggtcaccgagggcgccagcgcatgctccagccggtagctcatgcccaccgagtcggccgcgagattacgcatgcggcgcaggtagaaccggtggttttcgttgggaaaatcctcgcccgaagtgccggcggcgagcatcagcgccttcagatggcgcatcttgtgcacgaaatactccttgctgtaacggggcgtcatcggaatcagcatggccatcgccacgcccgaaatggtcgagtggacgcccgaatagtagaacagcccccacaccaccacggccggcaccagatagaagaacatgcgcttctcgcccatctccttcatgaagtagacgccgagcatgatgaccagcgccgccagcagacatccgatctgcacctgcccgccgtagaagagcgcgatgaccagaatggctccgaggtcgtcggcgatagccagcgccgtgaggaatatcttgagcgacacggggacccggtcgccgagcatcgagaggatgccgatggcgaaggcgatgtcggtggcggtcggaataccccagccgttggcggccatcgtaccgtggttgaaggcggtgaagatgatcgccgggaagagcatgccgcccgccgcggccagcaccgggaggagggcctttttggccgacgaaagctgtccgcagacgatctcgcgttttatctcaagccccacggcgaagaagaaaatcaccatcaggccgtcgttgatcagtttctcgacggtcatcccgcgcgggaacacccagtcgatcagcccgtcggggctatgcaccatcagcgagaggtcggtctccagcagatgacggtaatagagcgaagtcgcaggcagattggccagcagcatggcgatgatcacgcatccgagcagcacgatgcccccggcccaaggggcctccatgaaattacggccgcgtataccgatcatgtggcgctcgcgcacccagcggtacatcgaaaatagtcgcatttatcgaacgtttgattttaaagttaaattacacaacttccacaatacccgtgcgcccgttatggcgtcgatccgctcctcgcgggccggagtgacctccaccacgtcgaacccgacgatgcggcggcccgaacgcacgagggtgtccagcagccagacggcttggttgaaacccagtccgcccgcgacgggagtccccgtgtggggacagttctcgtaggagagtccgtcgatgtcgaaactcacgtagacctcctgcggaagcgtttcgacgatacgcagacactgcgcatcccacgtttcgccgcggaacccggcggccgccagcgacagatcgtcgaacaggacgacacggcccgacgacgcggccagcgccgcctcccgctcgctgaagtcgcgcacggcgacttgggcgatcttcgtcaccgcaggcacgtcgcgcagcacgttgaacatgatcgaagcgtgcgaaaactcgaacccctcgtaggcgtcccgcaggtcgcagtgggcgtcgatatgcaggattccgaactccgcatgccgctcgccgagcgcgcggatcaggccgtaaggcgtcgaatggtcgccgccgaccagcccgacgagttttcccgcatcgagccagcgcgcggcctgcgccccgatattggcgttcatggccgcacacccttcgttcacgcggcagattttgcgcaccacatagtcgtcctcaggactgccgcccccttcgaggtggtcgatcaccttcgccgcatcgccgcgcaggcgctgcgattcgtccagcagcgaatagtccacgtcggccgtggcgatgccgcggcgccatgcgccgggagccagcggttcgtggaaatcgagctgcgtcgaggcctcgataatggcatcgggggcgtaagccgtccccgccccataggataccgtcacgtcccaaggcgccgagacgatcaccagctcggccgtctccggttcgaaaggcagcccgaaataggtcccgttatccacaccgaccccgtcgggatcgaacgttttctgttccataagatccgttttaaatgtcaaaggtacaaaaattttaatttttccctatatttgcttcccgtaaagagtagaaatcaggaaaaagccatcagccatgaaaatcatcgccgacagcgccatacccttcctgcagggggtcctcgaaccgtgggccgaggtgcgttatcttccgggggcggaaatcgcgccggaggaggtgcgcgacgccgacgccctccttatccgcacgcgcacccgctgcgacgagcggctgctcggcggctcccgcgtccgtctgatcgccacggcgaccatcggtttcgaccacatcgacacggcgtggtgcgcggcgcacggcatccgcgtctgcacggccgccggctgcaacgccagaggcgtactccaatgggcgggggcggtgctggcccacctcgcccgcacgcagggctggcagcccgccgggcgtacgctgggcgtcgtcggcgtgggacacgtcggatcgctcgtaaaggagtatgccgaaacgtggggtttccgggtcctctgctgcgacccgccgcgcgaggcgcgcgaacactgcggcttcctgccgctggaagaggtcgcccgccaagccgacatcctgacgttccacacgccgctcgacgacacgacgcgccgcatggccggcgacgcccttttcgcacggatgaaacccggcgccgtaatcctgaactcctcgcgcggcgaggtcgtggacggcgcggccctgctgcgaagcggccttgcctgcgtactcgacgtctgggagcacgaacccgccatcgaccgccggctgctcgcccgcacactgctcgccacgccgcacatcgcgggctattccgagcagggcaaagccaatgccacggccatgtcggtcgatacgctggcccgtttcttcggcctgcccctcgccggatggtacccgcctcaggccgccccttcgacgccccggccgatctcgtggcaggagctttgcacgaccatcgggggcgcgttcgacatcgaggcccagagccgcagcctgaaggcccggccggaggatttcgagccgatgcgcgaccattaccgctaccgccgcgaatacttttagcgaaatcaattcttttttagtacctttgcggccataagcgaaaccgccacttgagatcatgtaccgtagcatcataaagcccatcctcttctcgctcaccatcgagcgggcgcaccgcgccgtattgatactgctgcgcgccatcgggctgattcccggcggacggtggctgctccgcaagtgttacgccgtggaacaccccgcgctcgaacgcgaggtcttcggcatcaaattcgccaaccccgtcgggctggccgcaggtttcgaccgtaacggcgaggcgttccgcgaactggcggccctcggcttcggattcgtcgaggtcggcaccgtgacgccgcgtccgcaggcgggcaatccccgtccccgcgtcttccggctcccgaaggacgaggcgatcatcaaccgcatcgggctttcgaaccgcggtctcgaaaaaaccatccagcacctgcgccggccccacgaaggattcatcgtcggctgcaacatcggccgcaacaccgcgacccccgccgaaaacgccgcggccgactacctcaaactcttccgcaacctctaccagtacgcggattacttcaccgtgaacatcagctgcgacaactcgtgccgcgaaggcgcgacccatacgcgcgcacatatcctgcggattctcgacccgctgttcgacttccgccggggacaaaaccaataccgtccgatcatgctcaaggtatcgcccgacatgccggacgccgtgatcgacgaaatcagcgacattctgctcgaaacgcctctcgacggcatcgtggcgaccaatggcacgcacaaccgcgaagggctgcacaccagccgcacgacgctcgacaagatcggcagcggccggctgagcggcgcgccgctcacgcagcgggccgtggaggtcgtgcgccgcatccacacccgttcgggcggcaattttccgatcatcggcgtgggcggcatcatgacccccgacgacgcgaaagcaatgctcgacgccggagccgacctgctgcagctctacaccggctatatctacaacggtcccggactggtgcgcgacatctgccgcgccctcgtcgccgacgccgaagcgaaagcagcggcggagcgggcggcagcggaaagggcggcagcggaaaaaacaacggcaaagcccgcagcgcagcaactccccgcaaaacacacgccccagcccgccgcaacggctccggctcccgaaaacgcagaaaacgcagaaccggcgcctgcggaatcccgaactccggcgcaatccggtcccgactccgaacagccggagtcctgagtcaaaaacaccgcttatgaaagcaacgatcatcactatcggcgatgaaatcctcatcggccagatcgtggataccaattccgtatccatcgcccgccacctcaacgccgcaggcatcgtcgtgcatgaaaaagtctcgatcggcgatgacagcgcgcagatcgtcgggtgcgtggaacgcgccctcggccagtcggacatcgcaatcatcaccggcggactcggccccaccaaggacgacatcaccaaaaagacgctggccgaaatgttcggcagcgaactcatcctgaaccaaaccgtctccgaccatgtaaaacggatgctcgaagagcggggcatcgaattcaacgaactcaaccgcggccaagccatggttccggcctgctgcacggtgctgttcaacgcgcacggcacggcgccgggcatgtggttcgaacgcggcggcaaagtggtcgtctcgctgccgggcgtaccctacgaaatggagcatctgatgcaggacgaggtcatgccgcggctcaaggcgcatttcgaactgcgccagatcgtacaccgcacgatgatcaccgccggactgcccgaatcgatgctcgccaaagcgatcgaagcatgggaaaacgccctgccgccctacctgaagctggcctacctgcccaatccgggcgccgtgcggctccggctgtcggcctacgaggtcgagggagaaagcgtatcgaaggagatcgaacggcagttcgaagcgctgcgcagaatcattcctcacaacatcatcggctacgaaacggccaccatgcaggagctgatacacaagctgctcaccgaacggcgacaaaccctcgccacagccgagagctgcacgggcggcaccatcgccgcgcgctttacggccatgccgggcgcttcggcctacttcctctgcggcgtggtttcgtacagcaacgcgtcgaagcagaccgtattgggcgtcgatcccgacacgctcacccgttacggcgccgtcagcgaacaggtcgcccgccagatggccgaaggggcgcgccgcatcagcggcgccgactacgccgtcgccaccaccggcatcgcaggccccgctggcggcacggccgaaaagcccgtcggcacggtatggatcgccgtcgcaggtccccgccgcacggtcgccctgctcaaacagtgcggctccgaccgcggacagatcatcgaccgcgccggcgccttcgccctcagtctgctgcgcgacgaactcaacggaaaataaaacgacgccccgatgaataaaattctgctctcaaccgcaaccgcgcttatgctctcgctgaccgcctgcagcagccacgctccggaaaaacgggtgcaccgcatcctgaccgaccgcatccagacgctggccgtcgccgaaagctgtacgggcggcacgatcgccgcgcgcttcacggccctgcccggcgcttcggcctacttcaaatgcggcgtcgtggcctacagcctcgacgccaaacaggagatcctgcaaatcagctgcgacacgatcgcccgctacggcgccgtcagcgagcaggtcgtccgccagatggccgaaggcgtgcgccgggcttcgaattcgcactacgccgtcgccaccaccggtatagcaggccccacgggcgggacgcccgaataccccgtcggctcggtgtggatcgccgtcagctccccgctgcgcaccaccaccctcctgatccgcgccggcggcagccgcaacgccgtcatccggaaagccggaacggccgccatcgaactgctcgaaaaggaactgcaggcatcgaataaagccgaatagccctcccaaaagaccgaatagtttgttttacagcagatatttacatatctttgcaactattcagtccaaaaactaatgaaaaaagccctgcttttattgatgctgtttatccggattccgtccggccacgcgcagaccgaaacctacaaaaacgtagacagcacgctttacgcctattaccgctggtgcaacaacaacatccgcgattcggtcgtcctgctcaaggccgacacgctgttccggctggcgggcgaaaaaaacgacatccgcatgcaggccgtcgccctctcgttcaaggccgaccactattacttcaacaacgaaccggactccctcaaggcgtggattccccgcgtgcaggccttcgcgcgcgccaacgaccagccgacctactattttttcacttggtcgcggctgattctctactacacgaagcacgggcaatacacgctggcgcaatacgaactggagcgttacatggcgcaggccgagcaggacgactacaaacccgccatcgccgaagcctacaagcagctgggccacatctaccggacccgcggtctcaaggagagcgccgccgactactaccgcaaggcgatcggcttcatcgaagagaacaacctcagcaaattctcgctgcctattctctattccgagctggccaccgtcctcatcgacaccggacggtacgaagaagccgccgaagagctcgaaaaaggcaaggcgcggctcaccctgcccgaatacatctggccgctgaaactcaagcaggtgattctctacagccggaccggccggagcgccgaagcccgcacgctgttcgaccggatccggcagggacacggcggataccttacgacggccagcctcaccgaagcgcagcttgccatcgatctcgccgaacatgaatccggcaaggcgctggccacgctcgacaaactgatcggtctgttcaaagagaccgggcacagcgaaacctatttctacaaactgttccaaacccgtgcggaagcctatgccgaaaccggcaactacgaagccgcctacaaaagtcagaaacactacctcgacctctaccgcaaaaaggtcggcgacgacaacgaaaggaccctcggcgaattcgccacgctgctcgacgtcagccgtctcgacgtcgaaaaggcggagctgcggcggcagacgcaggaagtacgcctgcaccgcacgcagctgggcatcgcggcgctgagcgtcatcctgctgctgacggttctcttcctcctcttcacggcgcgcatgaaccgccgtctggcgcacgccaaacgggccgcggaggcgagcagccggatgaagggcgtcttcatccgcaacatcacgcacgagatcaacaccccgctcaattccatcgtaggtttcgccgagctggccgcggccccggacgcggacgacgaagagcgtcagtcctacatcgaaatcatccgggaaaacagcggctatctccagaaactcgtggacgacgtgctctacatcgcgggcctcgaatcctccgacaccccgcccgcattgggtccggtggacatcaacgtctgctgcatgcagtgcattcagaccgtcagggactacagcctccgcaaactcgacatccgcttcgaacccgaatgcgcacaacttccggtcaacacctcctgcctgctgctctccaaggccctgaccgaactgctgcgcaacgcagcacgcttcgcccccgacggccggatcacgctcgcctacaccctgatctcgcacaaaaagcggatcgccttcacggtcacggaccgcggaccgggcatccccgccgcagaagcggaccgcatcttcgaccgtttcgtcaaactcgacccgttctcgcagggcatgggactgggcttggccgtctgccggctgatcgccggcgcattgggcggcggggtcgaactcgacacttcctacacggaaggggcgcgtttcacgctcacgattccaatcgtttaaacactgactatcaacacaataacgttcaacattaaaaattaatcgggcaacttaatctttagttctcattttttccttatatttgcactcccttacgggaataatattaatattatcgaaaacaaaaatgaaagtttgcgaaatcacaggcaaggtggcgatcgtgggcaacaacgtctcgcactcgcaccacaagaccaaacgcaaattcagtcccaatctgaaaaccaagcgtttctggtctgagcaggagggccgctggattaccctgaaggtatcggctgccggcatgaaaacaatcaacaagaagggtcttgcagtcgctctgcgcgaggctgccgcacctaagtccgtttactaaaacaccgaagtaacaaatggcaaagaaaggcaacagagttcaggtcatcctcgaatgcaccgaacagaaagagagcggagttccgggaatgtcccgttacatcacgacaaaaaacaagaagaacacccccgaccgtctggagcgcaagaagtacaacccgtttctgaaaaaggtcaccgttcaccgtgaaattaaatagttttgaagctctatggcaaagaaagtagtcgcaacactgaaaaccggcacgggtaagaactttacgaagtgcatcaagatggtcaagtcggacaaaaccggtgcttacatgttcaaggaaggcatcatccccaacgaccaagtcaaagaattcttcgaggagaagaaataagtattttaagagcgatcttaaatacaaagggcatccgacagggtgccctttgtgtgtctcagaagagacgcgcaagcgcgaccatcgcccggtcagagcggtcggcgcacgatcagaccgcgaatcctgcatcaagggaaacgccccttccgcaagtgcgcaaaatcaattatgggaaagaccgcttgttatccgctgaaaaattcctacctttgaaacaacaacattctcgactaaaaacaatgcaggaatctcaacggatcgccatagcttttacggtcaacgactcttacgcccaacattgctgtgtagcaatggcctcggctctggaaaacaacaaatcggaatttctggacatctacatattcaccgattatttttccgatcggaacagacaattatttgaacaaacggtccggcgttacggcgacggcaaccggctctcgttcataatcgtcgaagacagcgccctgaaaaagctgcggctcaacatcagctatatcacacaccacacctattacaggttcctgctgccggaactgctgccggaactcgaccggatattgtacctcgattcggatttggtcgtaaacggtcctctgcgcccgttgtgggagacttctctcgacggatactactgcgcgggcgtcaaagacagctggatcgagcaaatcagttacaaatatcggctcggaatgtcacaagcggaactttacataaacgcaggcgtcattctgatgaatttggagcagatgcgcaaagatcaggcggcggaccagctcctgcagactgcgacccagaaaggaacgcagttcgaatatcaggatcaggatgtgataaatacgacgttcagaggcggcaaaatcaaagagcttcccggcatttacaactacaccgccaccgacgacaaattccatacggtaaaagatccggtcatcatccactacaacggggacgtcaaaccatggtccaccgaacgcagatgccccaacaccatggcatcccgctattttgcatacctgcggctcacgccttacagaaaattccgctcggagttcgtccgaagccgaatagtgcgcacattaaagaaagcggcaggcatcgacgtataccccagcagagtcaaagtcgccctgatcgtcgatgaatatttcggagcctgcggcacggcatacggaggctacgggtttctggcacgcaattatatcgcccgatacctgcccgacacgaacatctcggtggaagttttactctcgaacaaacaccggtggaagttcgcccccaatgcgttgacagaaaaagtcgacaaccgcaaggtaattgtccctcccggacgcttttttgcccggcagtggctgaaaaagaaaaaatacgacatctatcttacagtcgaactaacacacaatattctcaaatacgaacgtcgcagcaaaccgatcatccactggatacaggatcctcgcccgtggagcgaatggctggaaatacagaccgtaaaactgtttcccgaaaattcctactggagttcgagcctctacgacagcgtgaacaaactttacggcaaaggactggttacattcgtttctcagggatattttctcaacgacaaggcgatagagctgtaccggcttccgggagacgctcctattgcctatatgcccaaccccatcgacatcgactacggattcgatccggagagctaccccaaaaagaaccatatcctcttcatcggacgcatcgaatccatcaagcggggctggcttttctgcgaaatcgcgaagcaacttccgcaatacgaattcttcatgctgggccagactttccgggaaaaatcccagaacgagagcatcatggccggataccgcgacatcccgaaccttcatttcgtcggacacgtcgaaggcgaagaaaaaatgaaatatatccgcgaagccaaaatactggtcaacacctccatccacgaagcgctgccgatcacgtttctggaagctttggcctacggcacactgctggtcagctgccgcaatccggaagatctgacttcgaaattcggacgctacaccggtcccgtactcggcgacggcttcgacaaagtgccgctcttcaccagcgccatcgaagagctgatagaaaacgagggactgcgcaaagaactatcctgcaaggctgttgaatacatccgggaaatccacccggtgcataaattccaacagcacatgagaaaactgattcacgatctggcccacaaatagccgattgcaaattcttcggatacgacaaacggtgcgtccttgggggacgcaccgtttgtcgtatgctcaacactcctgcttcagaacttccgcaccgcccgcacgaggaatttgttatacttgggaatctcgatcacatagggaggttcgatgcccgtatgggtcgtataagcttccttctcgtccttctcggtcgaggagaaatagtagaccagacggtccatgcgcttgccgccgttatccttgagcgcgtcgttgaaacggttgcgggcctgacggttggaatgtatgcgcgtgccgccgttgtagttgtgtccgatggtcagcagttcgtcgatggccggcaggtaccagccctcgcccttgtcgcggcaccacttgaaagccggaaaatcatcccacgaaaggttgttttcggcgatataggcggcgaccttctccatatttcccatgccgtcgatccggtcgtcggcgcccgcaacccgcaggtcgggcttccggaattcgctccacggcaggtatatctcgtcgagcgaaataatcagtccgtgccgacggtcctccgtcagcatgcagaccacgcccttgacgccgttctggtcgtagaactcgccgatctgatactccttggccacatactgcaccggcgcagcctgctgaacaggcgcctgcgcagcgggagccgctgcgaccggagcctcaccgaccggcgtcgcaggggtcagcggcaccgcaggcacggtttcggcagcccggaagcgctccttttcgccgttggcatactgaatgtagtcgatatcggcgacaggcagcacataggtcggtccgtcgggattggagaaacgtttataccgtaccgcatcgggtgttatttcggttactttggcctcgaccttcgtcgcatcggtcttgacgatcaggtcctgagccgcggccgtcaatacgccgcaaagcgctgccacaagcagcagaatcgtttttttcatcatcgttgaaaatgtatatagtgcaaatataacgtttttttccaaacattcttattatctttgtacggatatagagatattagacatggcatttttcgatattttcaaaaagaagcaggacaactccgccgcgcaggcttccgaagagcgcaaacagcagcaggaagagcttaacgccgggttggagaagaccaagacgggacttttctcgaagctcgcccgcgccgtcgcaggccgttcgacggtcgatgccgacgtactggacgacttggaagaggtgctgatctcgtcggacgtaggcgtggaaaccaccgtcaaaatcatccggggcatcgaagagcgcgtggcgcgcgacaagtatatgggcacctccgagctgcagtccattctgcgcgaagaggtaaccgcgctgatggaggagtcgcacggctccgaaaagcatttcggactcgacgccaaagagggcgaaccttacgtggtgatggtcgtgggcgtcaacggcgccggaaagaccacgaccatcggcaaactcgcggcccagctcaccaaagccggacaaaaggtctggatcggcgccgccgacacgttccgcgccgccgccatcgaccagctcaaagtctgggccgaccgtgcgggagccacgatgatccgtcaggagatgggttccgacccggcatcggtggcgttcgacacgctgacctcggccaaggccaacaacgccgacgtggtgctgatcgacacggcgggccgtctgcataacaagatcaacctgatgaacgaactgaccaaaatccgcaacgtcatgggcaaggtgatccccggtgcgccgcacgaggtgatgctcgtgctggacggctcgaccggacagaacgctttcgagcaggcccggcagttcacgcaggcgacgcaggtcacttcgctcaccatcaccaaactcgacggcacggccaaaggcggcgtggtaatcggcatcagcgaccagttccacatcccggtccgttacatcggcatcggagaaggcatcgaccaactgcgcatattcgaccgcaaagagttcgtcaaggcgctcttcggcgacggctccggccaaagctgacgggccgccggcggttccgcacaataggcggacggccatatcggaacgacacctatatattaaaagcacagacatccgcgctccggactccccaacagagtccggagcttttttgtatatatgtatcgtccggttttttccggcgcggcagtcaattatacgcaatttgaggattcaaatacgcaaaccacgcccaccaacaatttacagatacataattttgaatatcgattttgcacatactgcaaatcggcaccaaaaccgcgcctatttttaaaatatttcaataaatatctgccaaaaccgagaattaccgagcctctctacacaattactattaatattaaccttaactctatgaaaatgaatttgacaacttcggagaagaacaggggcctcgtccgctttcttctgatgagtctgctgctgagcatactcattcttccggcccatgcgcaggatcgggtcacggtgtccggacagctgaccgacagcagccagactccgctcatcggcgcttcggtcatagaaaagggcacgaccaacggcgtcaccaccgatgccgacggccgctaccagatttccgtgaaaccggacggcgtgatcgacttttcgttcatcggctacaaaccgcagtcgctggccgtcatgaaccgcacggaaatcaacgtcacgatggaagaagacgccacgatgatcggcgaagtcgttgccatcggttacggctcgcagcgtaaagaggacctctcgatggccgtctccaccgtcaaagtggacgacgcggcccgcagccgcgccgccgacctcggaaccctcctgcagggccgcatgccgggcgttacgatccagcagtcgggcgacccgctgcagaaagcgtcgttcaccgtccgcggccgcggctcgaagggcaacgacgacggcacggacaagagcgccgcatacagccgcgacaatatcggcccgacttcgggcgacggcgtgctggtcgttgtggacggtgtccccggcgctccctacatggccgaagatatcgagacgatcaccatcctgaaagatgccgcctcggccgccatctacggtgcttcggtaggttcgagcggtgtaattctgatcaccacacgtcaggcgcaggcaggtaaagcccgcgtcaacgtcaacgtatcggtcggcttcgaacgctccatgaacctcccgacgatgctcaacgcgcagcagttctgcgacgtctggggcaaggccgtcgagaactcgccgggcagctcgctgcccaatctggccaacccgcaggtctatgcaggcgccaacgtcacccgcaccgactggctcgacgaaatcttccgcacgggtctgacgcagcactatgccgtgtcgattaccggcggcagcgagacgctctcgtcgatcctctcggtaacctacgacaaaaaggaaggcaccctgctcaacacatggagccaagcgctgggtgcgaaactccatacggaattcaagccggtcaaatggctgaaattgtcggagcgcgtaaacttcgaatactccaacggacagggcaacatcagcacctcgcacacgggtcccatctacggcgccatgtggttccccgcttccgcatcggtttatgaccgcgacgcaaacggcaacatcgtctacggagacgacggcaaaccgaaatggggcggtatcgcttcgtcggccgacatggccagcggcgtcgaaggtcccaacatcgtgaaccccgtcgcccagctcgaaaccatgcaccgccgctacccgcgcaccaagatattctcgaccacctcgctggaaatcaagccgatcacgtcgctgaccctgaaatcggagttcacggccgacctcgacatgcgtgaggaggatgaattctcgcccgtcatcgacgtgccgggcggatcgagcacttcgagccgcgagcagttcaactacaacaacttccactatctttgggaaacgacagcgacctacgcgcaagtcttcggacgccaccacatcagcgccatggcgggtttcaccaccgactacaagaaactacatttccgcgacttccgcacgcagggctatggctccaatgacgaccacaatctggtatggggcgccgcaggctcatggaccaagaacccgaacgaagatatagtagattactcgatggtctcgttcctcgcccgtctcggctattcgttcgacgaccgctatttcctcaccggaagcatccgtcgggacgcatcgtcgaaactgcccgcagcaaagaactacgactggttcccggccatttcgggatcgtggaaactctcctcggagaaatttttccagaatgcaggtctcaacaaggtcttcgacctcgtgaaattccgtgcaggctggggtaaggtcggcaacgtagacctctacaacctgcccaacccgaccagcattccgctctccatctacccggacggttcgcttatcggcggcacgacccattacggaacctatctggcgaccatccccaatacggacgcacgctgggagaccaccgtacagaccagtgccggtctggacctgacaatgctccacaacacgctcgaagtcagcgtcgattattacaacaaggaaacgaaggacctcgtcgattacctcacgattccgccgcagatgggtgtagagaatgcgccgctgggtaatatgggccacgtaatcaacaagggatgggagttctccgtatcctatcggaacagcgccgcacaaggcaagctcaactacaatgtctggggcactttctcgaccaacaagggttatgtagaggactacggcccccagcccattgtaatgcacaaataccccacattcaacggcattcagctttttgcttcaggagcaggacacccatggtactcttactatatctaccgcacggacggcatcttccgctcgcaggacgagatcgaccgtcatatcagtaaggatcccgacaccggcgaggtcaagatgctgcagcccgatgccaaggtcggcgacctgcgtttcatcgacaccaacggcgacggcgtaatcaacgacaacgaccgcgtattatcccgctcctatactccgaaacaaacctactcttttggaggatcgctcgattggaaaggttttgacttcagttttatgtttcagggcgtcgcaggcaattatgtctacaacggcacgaaacagttgggaatgaacggtcgtcaagacttgggtaacctaacaaccgatgtttacaacacatgggatttcaaacccatgaccagcaaatatccgcgactcggcctcagtgacgacatgaacggcaactacctcaaggtttcggacatcttcctcgaaaagggcgactacctgcgtctgaagaacatcacgctgggttacacgctgcccaagcatatcagccgccacatcggcatggagaagggttcggtccgcgtctatctgagcatcgacaacgtggccaccatcaccggctactccggcaccgaccccgaagtaggcaactacggtctcgacagcggtatctatcccacgtcgcgcttctttaacttcggtgtaaacatcaacttctaacaactacgaccatgaaaaaaaccatattcagtctctgtctggccataagcgctttctgcctttcgggttgttccgatttcctcgaccgggagccttacggcaaagacgccacttggaagaccaaagaggatgtagaccaagctatctacgccctttaccacttcgtctcgccctattggagcgaggagatctgcggccgcggccatatgtggctcgaatgcgccagcgacaacatactgatcggccgcgcccgtccgtcggtcgatgaaatccgcgaattccgcatgtcgccgtccaacgacaacgacgtctcgcgtgtttgggaggtgatgtaccagaatgtcgccaaggccaacaacatcatcaagatggtccccgacatgaaactggatcagggatacaaaagccaagccgtaggcaccgcctatttcttccgcggtttctcgatgctctggatggtcccctactacggcgacgacaccaacggcggcattccgatcatcctcgacacgactcccgccgccgaaatcgactccccgcgtccggcgcacgtactgcagaactacgaccagatcatctccgacatgcgcacggcaggcgagatgcttccctacctttcgcagctcgacgcctcgcagatcggacttccgcacaaggccgcagcttggggatacgcagcccgcgcagccctctatgcagcgcagtacgacgcgaaatactacgacatcgtactggagatgtgcaacaagatcatggcgcttaccggttcggacaaacgcgaactctacatcgatccgtcgaacaagctcaactcgtacgccaacctctggcgcaaggagcagaaccactccaaggagtacatcttctcgctggaaggcgactataccaacggcgcccgctaccacggcgtaactttcgtcaacgcaggctggggcctctacaacacgtgggggtatttcacgccgagcaaaaatttgtgggacgcgttcgaagagggcgaccagcgccgcgacgtaacgatcctctatccgggccagcacgtcaaattcgtaggccgtaacatcaccttcggcggttacaacaccgacggaagcgtctcggactacacgaccggccacgtatcggcaggtctgatctgccgcaagttcatctccccgtgggaaggcgccgactgcaagggcaaagaggtgtccgcgctgcgcgacaaactctggaactcgctcaactgctgcctgctgcgctatgccgacgtgatgctgatgaaggccgaagccctgatctggaccaaaggcgaaggcgacgccgaagccaagcagctgctcaaccagatccgcgaccgcgcaggtctgccgcagaacagtcaggccaccaaggcccagctgatgaacgagcgccgctgcgagctggccttcgagttccagcccagccgccacatcgacgtagtccgctggggcatcgccacgacgacctacgccaagccgctgtacagcgtcatttcgaagaaggtcaacggccagatcgttgccgaagaggtggaagtttatccgggccgcaccttcaatccgacttacaacaaggtgttccccattccgcagcgggcattcaccggcacggtctacctgaagcagaacaagggttattaaaccatatttaagaacagaaacgattatgaaaatcaacaaatatatcctcggagcaggcgcactgctctgcatgatgctcccggccgcgtcggcacaggcacaggacgtcaagctgaagtgcatggagtggaacatcaagtcgttcgaatacgacgacaactccaatgcagtctatttcgaaatcgccgaggccatggaaaagatcaaggctgaaaaccccgacatcgtctgcttcaacgagttcgaaaccgcgaccggacgcatgagttcggtcgagaagctgaccgaatgcgcacagtcgctcggcatgttcccgttcttcgtcttctcctacgacaaggacaacggcgcctacggcaacggcattctgtcgaaatacccgatcgtcaattcggcttcggtactgctgggcatgtacaccggcgccgaccagcgttcggcgggctgggccgacattctggttccgaccgactccaaacccgaaggggtgaaggtgcgcatcgtctgcacccacctcgacgctttcggcggcgacgagacctgcttgggtcaggccaaagaggtcatcgaacacgcgatcgccccggccgttgccgaaaacatccccgtgctgatcatgggcgatatgaactgcggccccagctccagcgcaatccgcgaatatgagaagacgggcacccggctctgcaacaacgacggcacgttcggcggttacagcaagttggactacttcatcagcttcccgcagggcaaatggagctgcagcgactacaaagtcgtcaagggcgaccggctcaatgtcatttcggaccactaccccatcgcaggcacggccgtactgaagaattaagcgcgtatcaaacagctaaaaaagtacagagatgaaaaacacgaagagatatttatccatttttctggcgctcgcccttgccgccccggtcttcacgggctgcgacaacggtctggacgagtacaagtcgggagagacgatcgctcccccttcggacaagttcaatgccgagattcagttcgtaacccgcctgaccgacggagcgctggccggcagcgatgcggattacgccgccatcgacaactacatggtcaatacgctcgaaggccgcggcaagtcgtggctgacggtgctggaccgcgccgacggcgccaacctgcccaaaacgatgcagacggccctcaacaccaagcgctggacggcgttcgcattcaaccgtatcgccaacaaaagctcctatcagggcagcatgctctatttcaacggtcccacgaccgaggtcaagggcactccctccggttcgggatgctacgtcacaggtttcgcaccgacgctcaacggcacccgcaccgacaaggacgaggacggcaacgtcacgggcacgaccaacgtatcgttcgccatcagcttcaacacggcgcgtttcgaaaatgccgaccagatcaacgctttcggcggcaagaacggcgtgctgagcggactccactacaagaagcagaacctgctgatgatcggcaccgtgaaaaacgacctgctcggcgcgctgcagtccgcagccgcgaatacgaacgaggcgattcaggtccacgaagtcgtgaaaggcccggcctatacgatcttcatgctggccgactcgcgcttctggggctatgtcgacgtcgcttcgacctcgctcggcaacggcatcgaagcatacggcatccatgtgatgtggtagtatcccaccgactccctgcagcagcggcgcaccgaaagtgcgccgctctttttgcgataaatccgggaataatccatacctttgcggaggaaatacgaaacgcatgaaaaaaatcaacgtcataacgctgggctgttcgaaaaacaccgtggacagcgagcacctgatggcccggcttgccgcggcgggttacgaagtgctcttcgacagcgaccgcaccgacgccaaggtcgtcgtgatcaacacctgcggattcatcggcgacgccaagcaggagtcgatcgacatgatcctgcaggcggccgcggccaaaaacgccggcaagatcgaacggctgttcgtcgtcggctgtctctcggaacgctatgccgacgagctgcgtgccgaactgcccgaagtggacgaattcttcggcgcccgcacgtgggacggcatcgtccgggcgctgggtgcggccgaagacccggcgctggagaccgagcggcacctgaccacgcccaaacactacgcctacctgaaaatctccgagggctgcaactggaaatgcggctactgcgccattccgctcatccgcggaggacacgtctccgtcccgatggagagactcgaagaggaggcccgcaaactcgcggccggcggcgtgaaggagctgatcgtgatcgcgcaggatacgacctactacgggctcgacctctacggccggcggatgctggccgaactgcttcgccggctctgccgcatcggaggcatcgagtggatacgcctgcactacgcctaccccacggcattccccgacgaggtgatcgaagtcatggcctcggaacccaaaatctgcaagtacctcgacattccgttccagcacatctccgacgcccagctttcggccatgcagcggcgccacaccaaagccgacgcctatgcgctgatcggccgcctgcgcggagccatccccgatctggcgctgcgcaccacgctcttggtcggctatcccggcgagacgcaggccgatttcgccgagctggaacagttcgtgcgcgacgtacgcttcgagcggctgggggtcttcgcctattcggaggaggaaggcacctattcggcgcagaaattgcaggacaacgttccggaggaggtcaaacagcagcgcgtcgaacggatcatggcgcttcagaacgaaatatcgctcgaaaacaacctgcgtcgcgtcggccggaccgagcgggtgctgatcgactcgcggcagggcgattactacgtgggacggacgcagtacgactcgcccgaagtggatcaggagatcctgattccggcatcggaaaagcggcttctgcgcggtcgtttctacgacgttcgcatcgattccgccgccgactacgacctctacggccgggccgccgggaaataaaatttgctttttagcgttccttttcatacctttgaaatgtaaaacggactttacccgtgacccgatggccgaaaaaagtgtgataacaaatatcgagaaccgcatccggcagctcatggacgaccacaaacggttgtcggatcaatgtgcggaactgacggcgcagcgcgacagcctgaaagccgaaaaccgcaccctgcaggagcggatccgcgaactcgacggagaattgtcacgcatgcaactgacagaagggctggcgggcggaagccgtaaccgggacaaagcgcgggcccgcgtcaaccgtcttatgcgggaggtggacaagtgcatcgcgctgctcggaaggcccgaatagcaaagccgcagcgggaggggacaccaccgttacggcagaggctccggaaggccgcaggacgcacaggaggcagcaagaaaaacgaaacgagaacaatggcacaacaggcgataacactcaaactggcaggcaaaagctattcgctcaatatcgacagcgaaaaagaggagatgtaccgtctggccgaacgggaggtgaacagttacctcgccgcaataaaacaaaacaacttcaagaactggacggatcaggactatctgtctatggcggcactgaaattcgccattgcgaacgtcgacatgcggcagagccgcgaactgggcgacgaagacctgaaacggctgggacacttaggggaagagatagacgcctacctcaacgccctgaaaggataaacgacatgcaggagcgcgtaacggcgccctgaaaccggaacagcgttctttaacatacgaaggaaaaaatctacccgcatagattccttacagctttgcgaaactgaacactttttaaattggggcaactcacggcgcttcaaaatcaggccttaacccttcggggtgtatgctgcggcgtaccgttggacgattgcgattgtcggagtccccacacgtgacttatcttgcagattcgtcaaacaagactaaggaatcctatgcggtttttttatgcaacaacaaaccctttataaataacaactcaaaacagcaacaaaatcatgtataccactattttagttgcctgcatctcagccattgcggcgatcgggatctacgtggtcgttacgaacctcgtgaccaagaactcgatccgcaagcgccgcgaagccgccctgaaggaggccgaggccgaaggcgagatgatcaaaaaggagcggatcctgcaggcaaaagagaagttcatacagcttaagagcgaatacgaccggcaggtcaacgaacgcaaccagaagatcgcgcagagcgaacagcgggccaagcagatcgagaacaacctgcagaaccagcagcgcgatctggagaacaaactccgcgaaaacgaccggctgaaggagcagatgcagaaccagctgcaaatcctcgaacacaagaaagaggaggtcgatcagatgatgcgtgagcagaacgtccgtctggagcagatttcgggcctaagctcggaggaggccaagaacatcctgatcgaaaacatgaaggccgaggccaagaccgaagccgccggctacataaacgagaccatcgaagaggcgaagatgaccgccaccaaagaggccaagcgcatcatcgtagcgtcgatccagcgcgtggcgaccgagacggcgatcgaaaacgccgtgacggtattcaacatcgaaagcgacgaggtcaagggccgcatcatcggccgcgaaggccgcaacatccgtgcgctggaagccgcgaccggcatcgaaatcatcgtggacgacacgcccgaagccattatcctgagcggtttcgaccccgtgcgccgcgaaatcgcacgtctggcgctccaccagctggtgaccgacggccgcatccatccggcccgtatcgaagaggtggtggccaaagtccagaaacagatcgaggaggagatcgtcgaggtcggcaaacgcaccacgatcgacttgggtatccatggcctgcatcccgaactgatccgcatgatcggcaaaatgaaataccgctcgtcctacggccagaacctgctgcaacacgcccgcgaaacggcgaacctcgcaggcatcatggccgccgagctgggtctgaatcccaagatcgcccgccgcgcaggcctgctgcacgacatcggcaaggtgcccgacgacgaaccggaactgccgcacgcaatcatcggcatgaaactcgccgagaaatacaaggagaaacccgaagtctgcaacgccatcggcgcccaccacgacgaggtggagatgacctcgctgatcgcaccgatcattcaggtctgcgacgccatttcgggcgcacgccccggcgcacgccgcgaggtggtcgagagctacatcaagcgtctgaaagagatggaggacatcgccttgtcataccccggcgtcgtcaagacctatgccattcaggccggccgcgaactgcgcgtgatcgtcggagccgacaaactttcggatcaggaatcggaaggactctcgcacgatatagccaagaagattcaggacgaaatgacctatcccggtcaggtgaagatcaccgtcatccgcgaaacccgcgccgtttcgtacgcgaaataaccggatgtcggcgggacagctcctaccggccattccgacactcctccccaaatccctccttaccaaaggaggggtttttttatccccggtccggtgaagacgtccgggcggccggcattatccggccattccggcgagctgctgccagatggtcgcggcgaaaaagacgccgagtcccgaacacatcgccagaagcagcatattcatcacccgcagatcgggtttggcgttgcggcggaaattgacatcgatatactccttgaaaaagagatagagcgccggcaccagcgcgctcgccaaaagcaggtcttcgggaatgccgaaaaagtaaaccttcgaaaagccgatcagcgaccaatgacacagaaacagcacgacgaacagattgatccgcttcgagaacgagagcatcagtccgatggtgaagatcgccgccgtgcagggcatgacgggcgaagtggtcatcgggaaatccagtccccgcagatgggatatcagcggatagaggaacggcatcaggtagagcgcaaaagcgaatttgtcgtgtttgtacgtccgttcgaacgtcgtgtaaccgacgaccgcgtcataaatccacacggcggccatgacgccccagaaaaacgccatgactccgctgtaagcccgcgcatcgcacgacacgaggtaataggcgacggcgatccacgcattgagaaacgccagaaaacatttcattgcggttttcacccggtgcgtcgggtgcagatagagacgcgccgtcaggacgacggccgccagcacgatgagcgcctgcacgggccaagtcatcgtattgtagtctgcgatagtttgccaaaagagttccataatcagctgcgaatctgttttttattgcgtgtcagcgaatgtgcgcgtttgttgaagaggaaaatcggcgcggcggctcccgcggccagcatgaaaatcacgctgaaggtaacgaatccgttgcggacgatggccgccagataccccgcggcggagggatcgtcgagattctgcatgaacataatcatcgaaaagaccgtcttgtaggcatacatgccggggatcatcggcagcagcgcgggaatgaacagcaccgtcatcgggcagtggatgcggcctcccagcagcaggcttccgataccgatcgccaccgaagcgcacagcgacgccgaagcgatgtccacgcctgtgtccatcaggcagaaacgcagggcatgccccacggcggccagcagggcgatcgccggaaaggcccgcatcggaggatcggacacggctccgaatccgacggccgccaccgcggcgaaaaatccgtccgaaagaatggcgagcagcgtcatagcaatccgtttttaacgatcatcagggtacatgacaatccgacggcgatgcagacgatcagcatcagcgccgacgtcaggcgggcgataccgttcaacacatgcccctcgacgatgtcgatcacgccgttgataagcggcacccccggaatcaggtaaagcacgctcgtggcaatggcgacctccgaagtcgtatcgaaaatcatcgccaccgaagcgtacatcgaagccgcgaaggccgacgcgataaagatgacatagtgattgaatcccttggcctgcatccgctgcttgaggtagaatccgagcagcgtggcggtaaagacgatgcctaccgcacaccactccccgccgaaaagccggcagaaggatgcgttggccagtccgacgagaatcagtgtgaaaatcgggtccagacgcggccgggcgacgatctcgtcatagcggcgccgaatctcggcaaggggcaggcgaaggtcgcaggcgtcccagctcagggcgcttagctccgagttcagctcgaagctgatcggcagcggcggaatgtccgccacctcgctgtaaacccgtccgctctcgtcgtcgtaaaccgagaaggtcaccaccttctgaaaggccgacaccatgacgcgcacgccgagcgcctcgcccagacgtttcgtattgcgcaccacacgcgaggtatgcactccggaccccatcagccgggtggcatactccgcaacgaactgcgtgacagccttcaattccgcttccgacttcattttccctaactttaccgctgcaaagataatgaaaagcccgaacaaaactaaaaatttttaatatctttccaatgccgcacttcccgccaaatgcttatttttgcaccatgcaaccatccgaagagctgaaaaaccatatcgaaacggagatcatcccccgttacgaatccttcgacgcggcacacggcacggaccacgtccgcacggtcatcgcccagagtctcgatctggcgcggcattacgacgtcgatgcggacatgatctacgccgtcgccgcctatcacgacacggggctggcccgcggccgggagctgcaccacatccattcgggcgaaatcctgctcgccgacacggagctgcggcgctggttcaccgcagagcagctggccgtcatgcgcgacgccgtcgaggaccaccgggcctcgtccgaccatgctccccgcacgatctacggacgcatcgtcgccgaggccgaccgctgcatcgaccccgcgaccgtgctccgccgtacggtgcagtacggtctgtcccactgccccgcactcgaccgcgagggacacttcgaacgctgtcttgcgcacctgcggaaaaagtacgccgaaggcggttacctccggctctggattcccgaatcggacaacgcccgcaaacaggaggaactgcgggcgctgatccgcgacgaagcccgcctgcgcgcagccttcgatgcggtcttcgaccaagagaccgcccgataaaccgccccgcactgcgcgctcccgcggccctttatatataaaaataggtatcttcggggaattgttgcagcgccgttaaaattcggcgaccggggtgttaattccccggattgccgcttgtttttcgaaagattatgcttatcttcgtcatagcatcttccgcacccaccctctttcttcagagcagatccgagtgttgcaggaaaagacatgctgtttccggaacgtagtcccgacaatgaaagaatccgtctataaatccttcgtcagtggtgatccgcatgaagaggagctgctcaggcagctcatccgcggcgacatcgcgggttacgaggtgctgttccacaaatactacccgacgttcttcgccttcatcaagggcatgaccaaggagaccgtcgtggcggaggacatcacgcagaatatcttcatgaaagtatggctgaaccgcgaaaggctggatgcggccaaatccatccgcaactaccttttcgtactggccaaacacgagatatacaactacttccgcaccaagagccgcacgttcaccacacttaaggaggctatcgcgcaggccgaaagcaagggggggggaattcagcctccgagaaacgaaatcgaggagaagctcgatctggcggagaccgccgagcaggtcgagaccatcgtcggaaagatgcccccgcagcggcagcagattttccgcatgtcgcgtttcgagcacatgccgagccgggagatcgccgaacagctgaacctgtcggtacgcaccgtggacaagcatcttgagctggcgctgaaggagctgcgcaaatacctcaacatcattccggccatcatcgtctttctggacatcctgccctgaaatttccccgataaatcttccggccccgttacgtagtgcggggctttcgtttgttctttatgtagtaaccggcagcatcgggctgccgataaaacgcatgaagagatgaacaaaccgacattagataaagtccgggactacttctacggccgctgcaacgacggcgaggaggtccgtctccagcaatggttcgccgacaacggcaattcgtccgaagccgaccggctgctcggcaccctgctcgacgaggtgcggagcgaaaaccccgcgctggcgcaggcggcgttcgaagagttctgccgccgcatcggccattccgttccggcgcgcaccgcaccgcgccgtctgacgaccgtcgtccggtggacgcagcggatcgccgccgtgctgatcgtcccgctgctgatcgccgtctcgctcctctacaccaagaccgcacacactcccgaatgggaggaggtgctcgtgccggcgggccagcgcagcgaactgcgccttgccgacggaacgctcctgtggctcaactccggcacccgcgtaacctatccgacccacttcaacggccgccagcgcaaaatcttcgtggacggcgaggtctacgccgaagtcatgcacgacaagcggcatcccttcgtcatttcggccggcgacgtcgaggtcgaagtcctcggcaccaaattcaacatgcgggcctacaacagcgaccagctggtcgaagtggcgctggtcgagggcagcgtgcgtttcgacgtgaacagcgacaaatgcaacgacgaggtcgtcatggtccgcaacgacgtcgcgcagtacgaccgcctgacgggagcgctggaaatgacctctttccagagcgaaaactataaatcgcgcgccacgggcggcggcttctacttcttcaacgagtcgcttgacggcatcaccgcacagctggcccgctgcttcgaccagaaaatcatcatcaccgatcccgaactggccggcgtgcgcttctacgccttcttcaccaacaacgagtcgctgctcaagatcctcggcacgctcaacaccgacaaatcgatgtccatccgcgaacgcaacgacgtgatctacatatcccgaaagaaataaccgcaaaacagcaacaaaaaactacaacattaaaacttcaacctatgaaaaaactttacaatcgaaccgcacttttccatgcgcgtgcgatcgtgggtttgttcgcactctgcctgctggcgcttcccagcccggctctggcgcaggcgatcgacctcaaactcacgaatgtaacggtcaaggaggccatcgaagccctcaatcagcgggagaactactccgtggccatcaaatcggccggcgtcgacatgcagcgccgcgtcagcatctcggcgcagaacgcgtcgatcgacgaggttctggcccagatcttcgccgatcaggacatcacctacacgattacgggcaaaagcatctccgtaaccaaggcagctccgaagagcctcgccgcggataagaaccagctcaaaggcgtggtgaaagacaatctggggctgcccgttccgggtgccacgatcatcgtggacggcaccaacaacggcaccaccacgatgagcaacggcgacttctcgctggagaacgtcaagcttccggcgaagctcgtcatctcgttcatcggctaccagccccggacggtcgaagtcaactcctacgccgccatcgacattaccctcgtggaaagctcggcggccatcgacgaggtggtcgtggtcggctacggccagcagaagcgcgtgaacgtcacgggcgccgtgggcaccatcagcggcaaggacctcaacaaccgtcccgtgaccaatacggccgccgccctgcagggcgccgatccgtcgctgttgctgacgctcggcagcggctcgatcgaaggcaagaactacgacgtcaagatccgcggcgcagtatcgctcaacagcggcagcccgctggtgctcgtcgacggcatcgaagcgtcgctggcgcaggtcaaccccaacgacatcgaatcggtatcggtgctcaaggacgcttcggcctgctcgatctacggcgccaaggcttcggccggcgtggtgctcatcaccaccaagagcggtaaggccggcacgctgaaagtcaattacaacggccgctacggcgtatcgtggaacaccacctcgaccgacttcatcacgtcgggatacgactacgtgaaactcaccaacgaattctgctacccgtcgaaaggctatgtaggctggaactacacggacgaggagatgcagatgctctacgaccgccgcaacgacaagaccgagcatcccgaccgcccgtgggtcatcaccgacagcaacggcaaataccgctatctgggcaacttcgactggtacgactacatgttcaagcgcagccgtcccgaaaccgagcacaacatttcgctcacgggcggcaacgacaagatcaactactacgtcagcggccgctacctctaccgcgaaggcctgttcaaccatggcgccgaggatatctacaacggctactcgttccgcacgaagatcgccgccgaagtaacgccgtggatgcactactcgaacaacatcagcatggaggtgaccgactacaaatacggcggttactgggagcaggacggttccgaagagctcaactccaacggcatcctcttcaacgtggccaacaacatcagcccgacgttcgttccggtcaaccccgacggcaccacgttcgtttattccaacggcatccagttcgccaactcgccgatcgccagcggacgcggcggcgtattcgccgacggacgcaacaagaactcgcgcaagaacaactactacatcatcaccaaccgggtgacgttcgacctcacgcgcaacaaggatctgaaactcaacgccgactacacctaccgccgccgcgacaacctcggagcctaccgctcctatccgacggccaacacatggaacgcgacacaaaccgccgtggtcgatttcaccaacggttcgatctacgacttctatcaggaggaccgctactactataacggccatgtggtcaacgcctacctcgattacggccactcgtggggcaagcacaacttctcggccgtagccggcggcaacttcgaagacttccgctcgtcgaaactgagcgtccgccagaaagggtcgctgagcgagaagctgagcttcatcaacatggcgcagggcgagatcgaacgctgcgtcgagtcgaatacggcctaccggacgctgggttatttcgcccgtgcgaactacgactacgccggcaagtaccttttcgaagtgtcggcacgctacgacggttcgtcgcgcttcgccgccaacgaccgctggggcttcttcccctcggcatcggccggatggcgcatttcggaggagaaattctgggagccgatgcgcaactggtgggacaacgccaaggtgcgcttctcgtacggctcgctcggcaaccaacaggtgtcgaactactactacatcgaaacgatctcgaccggccagctgggctacaccttcaacggcacggataaggccaattacgcctcggcgtcgaaccccatcagcgacggcctcacgtgggagacggtcgtaacctacaacctcggtttcgatctgggcttcctcaaaaaccgcctcaacgtcacggccgacctctacatccgcgacacgaaggacatgctcaccacgtcgctcacgctgcccgacgtcttcggagcgccctcgcccaaggagaactgcgccgacctgcgcaccaagggttacgaaatcaccgtcagctggcgcgaccgccacatggtggccggcaaacccttctcctacggcatttcggcatcgctgggcgactacaagtccaagatcaccaagtataagaacgacgacatgctgctcacggaccattacgtgggcgagacgctcggcgaactctggggctaccgcaccgacggcctgttcaagaccgacgaggaggcggcacgctatcaggcgcagatcaacgacaaggcggtcaacaaccgcgtctacaccagctccgacgcttcggcggcgcacctcatggcgggcgacgtccgtttccgcgacctcgacggcaacaacatcatcaacaacggcgacggtacggtcaagaatccgggcgacatgcgcgtcatcggcaacagcctgccgcgttacacctactcgatccgcggcgacctgaactggaacggcttcgacttcgcggtcttcttccaaggcgtcggcaagatcgactggatgcccagcgccaactgctactacttctggggcccctacagcttcccgaccaccacgttcatcgccaaggacttcgagcggctggcgtggagcgaggacaaccgcaacacctacttcccccgccggcgcagctaccagacttcgagcgcaggttcgatgaacgtcaaaaccgaccgctacctgcaggacgcctcgtacatccgcctgaagaacatcacgctgggttacaccatcccgatcaacaagcgcatcctcgaaaaggtccgcgtatacgtatcgggcgagaacctcgcctactggtcgcccctgaagcgctacagcaagacggtcgatcccgaagtagccacgaccagcgccaccaacgactgtctgtatccctactcgcggaccttctccgtaggcgtggacatcaccttctaaactaaccggaaagcattatttcgatcaaccatgaaaactatcagcaaaatattgatattcgtttcgatgagtctggcgctgtcaggctgcgacgacttcctgaccaaggagccggaaacgaacctttcgcccaatacgttcttttcgagcgaagcggagctggagctttggaccaaccgcttctacagtctcttcgcaggtcccgacaccgatgccattcaggtctccgacatccagatcgccaagaacctcagctccgtacagcagggcacgcgctccccggccaccgaaaactggggcacaagcgcatgggcctacctgcgttacatcaactactacctcgaacgttcgggcaactgccccgacgagacgatccgccagcgctacgacggcgtggcctatttcttccgcgcgctgttctacttcgaaaaggtgcgcaaatacggcgacatcccctattacgacttcgtgattccgtcgaacgactgggcttcgctcaaacggccgcgcgacagccgcggattcgtgatgaagaaggtcatggaggacctcgaccgcgccatcacggacctgcccgacaactggccgagcgacgcgctctaccgcctgagcaaaaacgccgcccgcgccatgaaggcccgcgccgcgctctacgaaggcaccttccgcaaataccacggcatcgccgacgagacgatcgacggggtgaccatctcggccgactatttcctccaactggccgccgacgccgcatgggccgtcatggagcagaacaaatattcgctctacaaaggcaatacgctcaaactcgacgccccctaccgcgaatatttcatcctcgaagacggcgacgccaaggagacgatcctctcgatgcgcttcaacgccgacatcctcgtacgccacggcatccagttcacgttccgcaacatgcgtcacagcgccacgcagcggctggtgaaccactacctgatggccgacggctcgaagattcaggaccagcccggatacgagaccatgacctacaaccagcagttccagaaccgcgacccgcgcatggcgcagacgctcatggctccgggatatgtcgatctgaacggcatcgacgaggtgatcgaggactgcaagagctacgacatgacgggttaccgcttcatcaagttcgtgagcgacgacacgcataacggcgccaccacctcgactaccgactggccggtattccgttatccggaaatcctgctcacctacgccgaggccaaggccgagctgggtacgctgaccccggaagacatcgccctgaccgtggacgtcgtccgcgaccgcgtgggcatgccggccctcgacatgacggccgccaacaacaatcccgatccgctgatggccagctactaccccaacgtcaattccggagcgaacaaaggcgtgatcctcgaaatacgccgcgaacgcaccgtcgaacttccctgcgaaggcctgcgccagtgggatatgctccgctggaaggagggcgcccagctggttccctcgtcgaacggactcgacggcttcctcggctgctacttcccctcgctgggcgaatacgacatgaacggcgacggcaagatggacctctgcctctggagcggcaccaagcccgccacgacctgcgacgcgatgctcgaaatcggcgaaggcaaggacgcccagctgaccgaaggcacgagcggctatatcgtctgcttccggggccgcacctacaaatgggaggagggccgcgactatctgtggccgatcccgaccgaccagcgcgtggccacgggcggcgcactgagccagaatccgggctacgaagacgggctgagcttctgacgcccctttgctccgcgacacaaagaagaggtattccggtgaccgggatacctcttcttcgaaaaaacagactcaccaaaaccatcaagaccatgaaaaaactgcttttgctgctctttgcggcggctctctccctctccgcttccgaacctgcgcgggcgtggggccgcgaaggccacgaaacgatcgccaagatcgccgaacgcaacctcaccaaacgggccaagaaacggatcgagaagtatctcggcgggcactctgtcgtctactacgccaaatggatggacgaataccgccagacacccgaatacgccttcaccaacgactggcacacggcgcccgtgggcgcggacctgcgctacggcgacgaactgctcaagccgggaaagggcaacgccgtttacgggcttgagctggcgatccgcaacctcagggattaccgcaacctgaccgactcggccgtagcggtcaatctgaaatacgtcatccatctggtcggcgacatgcactgccctgcgcatatcaaatacacgactcacaacaccaagtacgacgtgctgttcgaagacaagtaccacaagccgcacaagtattacgtccaccatgtctgggacaacgagatcatcaccacgacccgtatctggtccgtcaccgagtgggccggcgagctggaccgcgcatcgaagcgggagaaggccgccgtgcaggccggcacgccgcgcgactggctgcacgacagcgccgtgacctgcgaagtgcagttcgagtgggccaagcccgacgagcggctgggacaggacttcctgaacaaggccctgccgctggtcgaacaccagatccgcaacgccggttaccggctggcggccgtcctgaacgagcttttcgactgacgcggccggagcagcgaataaaagagccgtcactcgcagcgagtgacggctcttttcataacggggcgatccctcttccgagacccctcgccggtgcggcgtcagtcgtgccgcccctgcgaacgcaggtaggagatcagcagctccggacggtcggtctgaatcatcgtcgcgcccatgtcgagcagcttgccgtaaaccgagccgggatcgccgctctcccacgccgcatcgtcgcacaagccgccgcagagcgactcccacaacgaattgacccagagtttcgagccgctctccaccaccttttccatgcaatccttcacttcgggcgtatactcgtcccagcacacctcgtaggccagcggcacgatacccttcgacatatattcacagaaaagcttctgtccctgcggtttgaggatgtcgatgatcggcatatacatcatgttgtgctcgtattcgccgaatttggcggcgacggcctccgccggacgcttgcccttgatgagcatctgctccgtcacgccaagctcctcgctgatcttcagcgccatgtcgtaaaactcatatccttggtcgatattcaccacgatacggtccttgcagacctccagcgcttcgcgcagggtcggcatcttccggggcgtacgcacgccgtgcgccgtacgcaggaagcagcgctgaatcgaatcataagtgatgtcgcacacacgtccccgcccggtagtggtccggtcgatggtatggtcgtggcagagcaccaacacgctgtccttcgtcagtttgaggtccagctccatgatatcgacgcccatgcggatcaccgactcgatggcgggaatcgaattctccggatagttgcgccagtctccgcggtgcgaagccaccacgacgtattccgacgcgggatcgtgaatctcggccacgattttcgccgcatgcgtcgggtattccggagcggcggttttaggtccggcgcatccccacaacaatgcggggatggccagaatacagctgacaagtctcttcataaaaatttatgcaatttggtttatcgttcgataaaatagtcgccctcgttacccagcacgatctgctcggccaccgaacgcaggtaggccgccttgtcgggattcaatccgcagtcggccggatctgcgccgaaccgctcgccgaaaagcaccagataattgacgcaggccttcaggtaggcaccgtactccgactgatgcttgctgtccgagtagtagaggttgatgcccgaaccgccttcgcgcacctgcctgaaggcggggccgatcggcgacacccaagtcccggcggcctttgccatggctttggccccggcgtcgttataggtctcgaaggtcgggaaatcggtaaatccgccgtaggacgccgacgagaaggtccacgtctcctccagaatcaccttgcacgaaggcgacgcggcgcgcaccttgtcggccaaggtcgtaaggcccgtgaggatcgacgccgtggcgtcgcggccatagttggcgggattctggctctggtcctgcaggaaagcgaaatcgtaaccgccctgttcgatgacgtcggtcgagaaacccagcgacagatgctgggtcagcgtctgcgaccctttgaagtgagccttgatgttgagagcatgcccttcgcgccatgcgatctccttgagcatccacgcaggattgctgtaataggagaacgagttgcccagacacagcaccttcttggtgtcgcggggcgtcgccgtgccgaagttctgcacgtagctgcccgtaaatccgtagggaggaatggagctggcggcgttggtcgccgtgatgttctgcgtaccgcccgcgcaggtgtagggacccacggcgcggcagcggattttcacttcgccgtcggtcacggcgttttcgaagcgcatcgtctgcatgacggtcgcgtgctgatacgaggacccggtggcagtgcccgaacacttgtaggtatagcggaccgccgggttttccggagccgtgagcagatcggcctcgacgctcttccagactccgccgtcgaggtattcgacgatgaagtatttgggcgaattggcttcgcccgccatcgtggcgttgaaatcgacgaccgatccggcggcgagattctccaccgggaaggtatagagccagtagtcgccctcgaccatcgtcgaaaccgcaggacggttcgtaacgacgctccgcttgaaagcggccgaagcgttcgcatcgccgcgcacgaccgaaatgaagcccgccgcgcccgacgtcgcgggaatgacgttgtcgtcggtccacgacgagccgtaaagcggcagcgtcgaagcttggaacacccacttgctggggaacgcttcgccccgcgcctgctgatcgaccttcaccgtcgcgctcttcgcgccgtcggtcgaagcgaacgtgacgacagccgaccgcggcgcagtcttcgtgttggcgccggccccgatcttgatatactgcacgccggagtccctgacacccgaaacgacgggtgcgtccgaaaggtccgtaacatgcacccaatccccgtcggcgctcaccgtccagtcgtaatcgaccgacgaaagctgtacgacggcggcattgctgccctgcgcattcagctcgaccgacgaaaggttcacgccgaattccggctcggcgggcacctgcgaaccgttgggataatagagaatgttctggctgttcacatgcacggccgatgcattgtggtcgccgatgtaggacatgtaattcgtgtagttcacgccgaccagcgcataggagccgtcctcgtaagcgcccagatcgccctgcgcgatgcaatcgctgaatctggccgccttgttgcactgcccgaagagcgtacccttgtaactggcgcggtcggtaatcaccagcccgtaattttcgcagccgacgaatgcgttgccgtcgtcattgaccagacagacgacgccgcccgccgcgccgctcgtcttgcagatcacattgccgcggttgacggtattggtgatcttgctcccggcggccgtaatgcaggtaatgttgccgatgcgggcgctatttaccgtggcaaaggcattgacgttgtcgccttcgttcacgcagttctcgatctcggtgtagcggttcgcagctgccacgatacccgaagcgcgggctacctgcgtgtcgaggtccccgtaattggtgcactcggcgatcgtcaccacggccgtcgtgttgctcttgttcgagctgaagccgacgatgccgcccacgtgaatgcccgtcgcgccgttcttggtgttgccgcccgacgtggccgtcagagcgccgtggttgaccagtttttcgagccgcgccccgtttttgtcggcgaaggcgagtcccaccatgccgatggtcatgcggatattatcgggagccgccccgtcgaaggcgatcgaagccttattgactacgttgcgcacggtggcttcgtaaaccagaccggccaccacaccgcagtcggtgcccgccgtcgccttgtcttcgagcgagcagctcgcgtcgaaaatcaggttctccaccacggccccgtcggccacggctccgaagaatccccacgccgaggtcgcctgcgcggccttgcagaccatcttcaggttgcggatcgtatggccctgtccgtcgaaatatcccgtaaaaggtcttcccgaagtgatcgaaagcgcattgttcgccagcttagacgtagccgcgccgatcggcgtccactccgtcacctcggccagatcgatgtcgtccagcagcaccacgacgcccttgtcgtcctgccacggagcgagcgtctcgcccgcattcacggccgccgagaactcgatcaggtcgtcggccgtgctgatgccgccctgcggcgcgaaggcgtaaagcgccttggccatatgcttggcgcggaatacgccgccctgctcggcataggaggtgatgccggtcttgtagatattcttcgaatagctcttgccgtcggccgtgccgagcgtaagccgcagccccgcttcggatctgaaacgcccgacggggaatttgatcgtctggggcttggtcagatccacgccctcggcgaagttgaaaaccaagctgttgcccgtaccgttctcggcgggcgtcagcgccagcgtttcggggtctaccgtcccttcgaacgacagaaaaccttcgaaagccgcttcgtcggccggctcgacggtcagcgactgcgccgcactcgccaactcccctgcgtcgatacgcagttcgatgaccgagaagatattgcggaaggtcacctccagtgcaccttcggcaagattccccgaagtgggcagtcccacgagcggcgcccgcgccggattgctctgcgactccgcgtcgagcgcaattgtccgctcggcctccacggcgaccaccccttcggcagtcgttgcgggatagtaggccgtcaaaggcttcgaagcgtcgtagtcggcgatgccggcttcgctcgtgaaagcggtcgtcggtcccgcttccgcggccgtgtattcataggccgcgccgtcgtaaacgaccgtgatgcggtcgcccgcctcccaagtcgatttaccctcttcgatgtccgtgcgggtcgcgggcgggcaggcggccacgatgaccagcccgtcggcatcctcatacccggttccacgcaccggctccgccagttcgggagagtgcgcgcaccccgccgcgaagaaaatcgcggcgaataaccatgcaaatatctgtttcattggattactgctttactctttgttcgaatcgttttcaaaatcggtgtcctcgatcccgttgccgggcgtctgggtgccggacgacatgtcggtcacggcaaagggcgttgcaagggcgtagcgcgccgcctgcagcgcaaccggctgattgtcgtcggtcacgggcgtcgtataagtgccgtccgtcgtactcgacacgttgtagcggaagctgttgccgtcgagtttcttgccgccgaacgaaggcgagatgatcgactcgaagacggcgcaggccgcggcatagcggctcaggccgtaatccatgtgatagccgtcgcgcgtgaggtccatgtcgttgttgagcgacgaggtgcgcaggttctgcagcaccgttccggtaggtatgatctgctccacgtcggtctggtcgagcaccttgcgggcctgcgccacgatcacgtcgaacatctcgtcctgcgtcgtgaaattcttgtagggccgctgcgccgtaccgatcttgtccatgttgaaataggcctgcgacatgatatagacgaacttgggcgtatgtccgttctggtcggccctgatgtcggcgatcaacccctgaatggcgtttttctcggtatcgttccatatccagccgcagctgttgcccgtatgttcctgcaggcagacgatgtcccacgtatccgacttgacgatctgctgaatgttgtatccggtgtaggagagccagagcgaagtgccggggttgtacttgtagcaggtatagtcggacttggtcgcatagccgtcggcatattcgggaatcgtacgaccgccgtaatagagatggaccatcttcagcgtcgggatgtcggcggctgagaccatcttcgggaggtgttcgacggcatccttggtaaagctgttgccgatgaagaggatgcgcagcgtcggctctacatcgtcgccgccgcccgaaccgcccgaactcgaaccgatcatgtaggtaatgttgtccgcgttgatcggatcggtagatttctgcacgcccagataacgcccctgctcgttttcgccgtacgaatcgtaaaccgcggttccgccgttgtaaaccccgaccttgccgcccgcgatgcagttgatccagctggtcgcataggcgctgtagccgaagaacacgccgcggttggcgtcgtcggtgaggatctcgccgtaattggcgcacccgctgaacgagttggtcgcatggttggccagactgagcagaccgccgcagcgggcgccgcccgtcgagacgagattgccgttgttgatgcagtcggtcatcgagcatcccgtacccgtgatgcaggtgatgttgcccagacggcccgtcgtaccgcacgaattgagctggttgccgtggttcacgcaggagttgatccgcgtgtagttattcgccgcggcgacgatgcccgaagagcgcgccgagttagaggtgatattgccgtaattgtcgcagtaagcgatgtcgttgcagatcttgttggtcgcgttgcccgtcgcaaagccgcagatgcccgccatgtggatcgccgcgccggctccgttggccgaattgccgtgggtatcggcctccaccgcgccgtaattctgcaggcgttcgagcttcgtgccctccgtttcgctgaagatgaagcccaccatcgccgccgaaacacgcgcggcgctggtgccgtcgtattcgatcttcgcataattgacgcagtcggagacgttcgcatcgcggcatacgccggcgatcacgcccacctcggccgtgccgcccgaagcggtgactttcaatgcgctcgcatcgcccaaggccgcaccgaccgtcaggttgcgcaccgtcgcgccgtccagcacgccgaacagtccgtaagccgtattggccgcactgcccccgtaggcgagtttcaggtttttcagcgcatatccctgcccgtcgaaggtgcccttgaaggcgttgccctcgatagtcagcaggttcttttcccatttataggaggcgttgccgatcggcgtccagccggcaacgtccttcatgtcgatatcgccgagcagcgacaccacgccgccggcatcctcccactgcgccgtactttcgcccgcattgaccgcgtcgcggaaagccgtcaggtcctcgaccgtcgcaatgcccggcttggcggggccgcccgaaaagctgttgttctccagcgtcggcacgccgccgcccgtgagcgtgaaatagatatactgttcgaaattctgctccgtaatctccgtcgcgccctgctggccgtccgagaagggacctatccggccgccgaccttgcagttgcggatcgcgatggtcttcttattggtgttggcgcagacgatgccgatgtacttgttcgccgcggcattgatgatgtcggagagtacggcgccgtagttctcgcagccgtcgatggccgtattgttgtcgttggtctggccggcgatgcccgcggcatagccgtgcgtcgtatcgcccgcaacggcgaaagcgaccgtgccgttattgacgcacgatgtgaggtaggtgtggccgcccatggccgacacgatgcctgccacgcggctgttcgaagccgtcacgtcgctgcaggtcaccgccgcattgttcgcgcagttttcgagcttcgtgtatttgttcatcgtggcgacgacacccgccgtacgggtcgcctgcgcatctatcgctccttcgttgacacaccccacgacgttgttgtagcgttcggtggtcgtcgaagcgtcggcaaaaccgacgatgccgccgatcgagaagcccgtggctccgttcttggtgttcacgctgttcttcgacgtgatcttgccgtaattggtgcaggagaggatatgactgtcgttttcgttggcgcagattgcgccgacgatgccgccagccgattcgcgtacgttgtccccgccgccctgaatgtcgatcgccgcacggttctcgcaattctcgatcgtggcttcataggcatatccggccacggctcccacggccgtcatcgcgcccgcggtcgaaacgaccgacgagccttcgccgatggcaaggttcctgaccgtggcgcccttcagcacgccgaagagtccccaagccgaacccgccgcagcgtcggccggaacgacgatcttcagattcctgaccgcatggccctgtccgtcgaaggtcccctgaaatgcaggtcccgacatcacgttggccgtcgtataggcgccgtttccgatcggggtccacgccacgtccttcatgtcgatatcctgcgtcagcacggctttggcggccgcctcctcgccgccggcattgaccgccgcggcgaaagcgaccagctggtcgggcgtcgaaatggcgaccgtaccgagcgtcgcggccttgtagaagagcggcttcacgatcacgttgtcggccagatcgtaggccatgacgataaccgtaccgcgcgagaacgaagcgtcgaacgaaaccgtcaccgtcttcgcgtcgcggtcgatcacggcgtcaagcccctcggccttggcgacggccacgatggccgtctccttagcctcgcccgaaagctcgtaggataccgtaatgctcttcgaagggtctgcgacggtggtaaccggcatcgcgtccagcttgaggttgagcgagttgaaaacccgcagggtgatcgtgcttccgtcgccgagcgtcaggctgaaattgccgtcgccgtccagctccgccgagcggaataccgacgtggcgtcggtcgtggccttgatcgggttgcccgaagcgtcgagtatctgcacgccgtccacggtccagcagccgtcggcatcgaccgaaatcgtcggcgtgtagccgctcacggggaacttctccccttcgtcgtcggtcagccacgtgatttcgccgtcgatgcacttggtccagtaatagacgccgttctcgtcgagcttcacgccgatgatcggcacgtcgacgatgtcgtccatcgtcgccagcacgaccgtatgttcgacgtccttgttgtccttgtaggtgacgacgtatttcccgtcggcgtcctgcgacacggtggtgatgacgttgccgttggtcagatagctcaggtccgcgagctgcttgccgagcgtctcggccttggctttcagggcttcgatccggtttttgtagccgtcgatccggccgcgcagctccgaatcgtcgaagtcgctgcaaccgcagaagaccacggccgcaaatagtatgatgatattcagtatctttttcattgtcgttccgtttttctggattacagccttttagttgtttatcgtcggatcgtagtactcgtcgttcttgtacgagaacgcattgtgaacggtcgcggcaggcgccgaagtcggattgtccttgtaggtggtgtagctgcccacgtatccgcccatcgtacagctgctgacgttgacccactcgccgctcgactggcccgaatatccgcaggcccatgccggaccgtggtcggaattgtagacgtcgcccagaatggcgccctgattcgcgcagccgatgatccggatgttggagtggccgatgaatccgcccgtgcggcatccgatatgggtgaacacgttgccgtagttggtacagctctccacggtcgccgtcagcaccttcttcaggtcgtccgtaccgccgatcaggccgcccatacgcttgctgttgtaggaattctgcgcagccgctccctcgaacttgccgacgatgtcgtcctcgaccgtaccgcggttgtccgaattcttcacgttgccgttcatcagcgtagcgaccagaccgcccgtgcggcccgtcgggcagctgatgtgtccgtaattgacgcagaactgaatcaggttgccttggtccttggccatgaagccgcagataccggccgtctgcatgccgttgccgccgttgccgttgttggtgatcttgcccgtgcgtacgaacccgtaattcgcgcatcccagcgacttggcgcggccgccgatggtcgagttcttcatcacgccgaccagacccgaagccacgcagagcacttcggaaccgctgtctccggcgaagtcgatgttgtagtagttggtgcacgattcgatcgtcgagttgaccgcatagacggccagcgacgcgacgctcgtcgccttcggggcgtcgcccgtgaaggtccacgtgatgtcggtgtcgggatcgcccagcgtcaggttgcggaccgtagccccgtcgagcgagccgaagaacgcgtagccccacttgccggtggacatgtcggccgtatagttcaggttcttgacggcgaagccctgaccgtcgaaggtgcccttgaagggattgaccgtcttgtagggagtcgtcgtattgtactcgctggcatccacgccgccgatcggcgtccacgactcgacggccgccatgtcgatatcgttcagcagcacgacttcgcccgcctcgttctcccagcgtgcggtgctggctccggcattgaccgccgcggcgaagcccatgaggtcggccgcggtcgagatgccgcctccgccgccttcgggaatcttgggcgactgcttgacgacgattgccgccgagatgtcgtaaagcgcattcgagaagcggatttcgcccgtgcggagcgcgccgctcgcatcctcgtagtaatcggccgtgaagacgtgcgtaaaggtcgtcatcgcgcgggtcgagttgtatatgagccacttggacgccgactcctcgaccgtcacttcatagtcgatgctggccgaaaccttgacttcgaactgcgtcatgtcgccttcgagcacgatatcggccgtcgagccgttgtaaaccgggtcctgaatctcggccgtgccgtaggtgaagaaaagcggtttgagaatcgtattgcccccggcgtgcgccatgacgaggatattgccctcttgggcgccctccttgagcgagacggtgatcgtcgatatggattcgtcgatctcggcgtcgacgttataggcggtgaagatatccaccagcgcgccttccgcctgcgaaccgccgacggtgtatctgatcttcactttcgaggcatagtccggaacggccgtgtaggtcggcgagtcgaacgaaacggacagcgcctcgaacatctgcaggcgcagttcggtgccgtcggcgagaatgaagacggcttcgccggtcttttcgtccacgtaagcctttttgaagaggatgttgctgacgtcgtcggccagcaccttgttgcccttggcgtcggtgatcggcttgccgttcaccgtccagaagccctcggcgtcgatgcccacttcgggtttctcaccgcctgcgggaaccttctcgccgtccacgagtatccattcgtaggtctcgccgttgtcggaggtctggcgccagtaccacacgccgtcctcgtccttggcgatgccgacgatcggcagggtgacgacctctttctgggtggcgagggtaagcgtgcggctctccccgccgcggtcgatgtaggtaatgacgtagttgccttcggcatcggtcgagatgagcgacacgaacgagctgtttatcagctgcgtgagcgcgtccatctgcgtacggagtccgtccacggcctgttccagttcatcgagaatctgtcccacgtcgtcgaggtccttcttgatacgggtatcgtcgtatccgtcgctgcatgccgctgcaaacaggaatgtagcgaggaagatcgtattcaatatctttttcatcgttctgttcatttagtcgtttatgggttccttgctacttgatcctgacatgcatgtagttcatgcagctacgctcgcccttcgagtcgcagggcctgttggcgatcgcgccggcaccgttctcccatttccacaacgtcgtggagccgccgccgtcgaaacggatcgcattgtgaagccccagtttcttcatggtcatgtaaagctgccagtagttcatgccggtgtcgatgctcgtgcggccgtccacgcagaccagcttgacggtcgtgccggcctgatcggctccgatgcaggtggccggcatgagcgtcgcgtcgttcaccgcattccagttgccgccgttcaggaagcggtacatgctggagttgtgcatgataatctgtttggagacgctgccgatagacacgttggcgttgatccggacagcgtcgcccaccttgagcgccgcagccagcgccgcagccttttcgcccgtcacctgaagcacccagtcggtcttttcgctcacgaacggcacctcgaccgaggctccgttgcggccgtccacgatcgccgtgaccgtcgcgtcgaaccagccgtcgttgacggtcatctgctgcgagcagcggcccacgacgaagagcgcatcgctgcccaccggattgtagatgcccggatgcggctcctttcggaagcgcgaagtatagagattggcgtcgtaaccgtcggtgttgttgagccggacgatcgtatcgttcaccgagtagtattcatagtccgtatcgttcaccttgagatagcccgtgaagctgcggttgtcgaagctgacggtacggtcctcgaagaaggtgaagccgggacggtggttcgaaagcgactggcgcacggtcgggttgttgatgaagaccggttcgccgtattcgatgtggaatccgcgcgggaaaccgtcgtgcgaattgaagaagcccgtgttgatgccggcaacgatgttgcggccctcggcgcggcggcgcgtacaggtctcggagagcgtttcgcgcagtttcttgccgttgttcgagttgttgttggcattggggttgagacagagttcgtcggccatgaccgtttcgagcaccacgttgggattggtcaggtcggcctcgacgacgtagacattctgggcgaaattcttcatcgcgtagtggtagaacttcacgccctcggccagctgcgtctccgccttcacctcccagtcgtagaactcctcgtactggtcgctcaggccgttgagcgtcggatcgaattttccgtgtacgatcgccatggcataggtcgcttcgggagccgactgcggattgtccttgtatgcggtatagtcgcccacgcggccgccgaccacacattcggtaatcaggtcggcgctcttgttgtagcctgccgcccagcccgaaccgtggtaattggtccccgacagcgtgtggtccgaaaggatgacgcccttgttctcgcacttggtgatcttggcctcgttatggccgacgaagccgcccgtgcggcagcccagctgcgagaagacgtcgccgttgttgacgcacgaagtgaacgcggcgtcggccgaagcgccgccggcgagtccgcccatgcgcttatagcccggattggcgccgaaaataccgttcacgtcgtcctgcaccttcccgttgttgacgcatgcggtcacttgaccgctggtagccacggccacgatgccgccgccgcgtcccgacggagcgctcagggcgccgttgttggtgcattcggtcagggacgaggtcttcatgtaaccgacgatgccgccctgatggaatcccgaattggagccgttgcccgtgttggcgatcgtaccgcaggtcagcgcaccgtcgttgacgcagtgcatcagcgtcgcgttctggagatatccggcgatgccgcccagacataccgagatgttggcggcgtcgctgcccgcgaatgcgatcgcggccttattggtgcaggaggtgattttgccttcggcatagccgacgaaagcgccgatcgccgcaccctgcggagccgcgcccgtcagacggatgacgccttcgatggtgaggttcttgatttcgccgtcggcgccgagggccgagaagagaccgtgggcgacgttgccgtccgcaaggtcgaaggtccaatcgacgttcttcagcgcgaagttcttgccgttgaacactttattaaagacattttcacccattgcataggtgacagccttgttcgcatcggcggtgctgggagttacgactccgccgatcacataatcgctccagtccgtacccgccatgtcgatgtcgttcatcaggcagacttcgccgtcgatcgtatatttggccagactcttgccggcattgaccgccgaggcgaaagccttgaggtcgtcggcgttgcggatgcccgtcggcgcgccctccatcgtcgtaaagatcagcggcttgataatcacgttgtccgcgccgtcgtagaacatcacgaccaaacggccctcctcgaagccgtcggggaaggtcacggtaatggttttggcctgttcatcgagtttggccgcgagtccttcggccttctcgacggtcagcaccgaagtttcggtctcgcccacgagcgtataggtgatcacgagcggctgcgcgacgtcggtcaccacggtccggggttcgacgctcagcagcacgttgaagccgttctgcacctgcgccgtgacctgcacgccgtcgcccagcgtgaagaccaccgtgccgtcgtccttcatttcgaccttggtgatcaccgaagcgctcttgccctcggccttcaccggattgcccgacgcgtcggttatccgcttgccgaagagcgtccagtagccctgatcgtctacgccgatttcgggcgtacggcccgtaacgggaattttggcgccgtcggtatcgagcagccacgaggtcttgccgcccgtggtgacggtccaatagtagatttcgccgtcggccttcatgccgatgatcggctgggtattggcgtcgtccatggtcgcgatgtcgatcgtgtgctccacgttgtcggcatccttgtagctgaggacatagtgcccgtcggcatcctgcgtgattccggtaacggcgccgccgctgacgactgcggccagtgcgtcgagctgctgctgcatcgtcgtgacctgagccttgagttcattgaggctcttgtacatcccgtcgatgtccttccacagggccgaatcgtcgaagttgtcgctgcatccgtaagcgaaaacggtcgcagcggcgaacatcagagtcaagattcttttcattcgttttaattttaaggtttgttgagtttcggtcggttcaggggcgccgccgtaacgacgcctatattaagaacacatatccggctccgaatacgtaacccgcaaaagatgtttttgcctgacgaatgaaaaaatccgctccgcatgccccggcggcgggaacggcccgaaaagagacgtcccggagaccgcaacggtctccgggacgcaccttctcagatcggttccgcgcgccgctattcggcgtcgtgcgggaaatatttcatgtattgaacgcgctggtagacgtcgctttcggcattgccgtaattcatcttcccgcggaactcggccagcgacccgaagccgtggcgttcggcccacaagtcgatgaagcggttgatgtccacgatcacgccgtagccctgctcgtggatcgccgagcagatctgcacggcgttcgcgccgcacaacagcgccttcacggccgcttcgccgtcgtgcacgcccgtcgatacggagacgtcgagctgcggcacggccgtcgtgcagagcgccacgctgcgcaggacgttgcgcagttcggccggctcgctgaacggatcgccgttcacgaaggtcatgcgctccacgtcgatatcgggttcgaagaagcggttgaacatcaccacgccgcgggcgccgcgcgccagcagcgaatcggccacggccagcacgttggtcaggcgcatgggaagcttcaccgacacgggaatcttcacggcctcggccacgcggcgtacgacgtcggcgtactcctgttccagctcctgcgccgaacggtgacggtcggtcggctgcaggaagatgttcagctccagcgccgcggcgccggcctgctccatcgagacggcatagtcggtccacgcttcggccgaagcgatgcagttgatgctggcgatgacgggcacgcccgtcgtgcgcgcatcggcgacgagtttgaggaattcacccttgtaggcatcgccgatataacgttcgaggtactcgcccgaatcgcccatgccctgctgcgacgcatagtcgagggccgcggcatggcggatgatctgctcctcgaagatcgacttgaggaccacggcgcccgcaccgttgcgcacgcactgttcgatgttggacatcgtggccgtatagggcgaactgctgaccacgacgggactcgaaaggtcgagtccgaggtattttgctttcataaaaagagctttttatagttactaatcgctttcacggccgggactggcccggctcaggcggctgttcggcacagccccgccgcagcggattaaacgaacggaattttcaccacttcggcgcggaggggtttctcgcgcacgacgacggcgatttccgtacccgccttggcgtattcgggcgtcacgtagcccagtccgaaaccgaccttcatgcagggcgacatcgtacccgaagtgacatggccgatccgcgtgccgtcgggcgcggcgatctcgtagccgtggcgcggaatgccgcggtcgatcatcttgaatcccaccagcctgcgggtcacgccctcggccttctgcttctccagcagggggcggtcgatgaactccttgccctcggcgaatttggtgatccagcccagtccgccttcgagcggcgaggtggtgtcgtcgatgtcgttgccgtagaggcagaagcccttctccagacgcagcgtatcgcgcgcgcccagaccgatattcttgagtccgaactcttcgccggccttccagagcgctttccagagtttgtcgccgtcttcgttggccgcgtaaatctcgcagccgcccgatcccgtatagcccgtgatcgaaaggatggcgtcgcagcctgcgaccttcatctttttgaaggtgtaatactccatctcctcgaccggctcgtcgcacatcttctgcacgatcttcatggccagaggtccctgcacggcgagctggcagatttcgtccgaagcgttgtaaagctccttgccgtggcctgcctccatgccgaacgcccggccctgttcgcagatgtggttccagtccttttcgatgttggcggcattgacgcagagcatgtaggtctcggcatcgacccggtagacgaggatgtcgtccacgataccgccccggccgttaggcatgcaggtatactgcaccttgccgtcgtaaagtttcgacacgtcgttggtcgtgatgcgctgcagcaggtcgagggccttgggtcccttgacccagatttcgcccatgtggctcacgtcgaagacgccggcgccgccgcggacggccatgtgctcgtcgttgatgcccgtaaactcgatgggcatattgtatcccgcgaattcggccattttagcccccgcggcaatgtggtacttggtgaatgcagtggttttcatatcaggattttaaggttttattcgcggcgtttgacacccagacgcggacagcggtggaactccttcgtccggtcgaacaggtagcggtaggtggtgtgcatcttgtggcgcgtggcgcagacgtagctttcgatcatgcggttcatcaccggattgaagtcgcccacccatgcgaactcgatggtcttgtagtggttgcgtggcgtgcgcatgtatttttcgaggatgaagcgcatcatgcccgactcgacgcccttgccgtggaattcgggcgcgatgccgaagatgatgccgaaaatgcggtcgctggccttgcggaccttcaggtcccagagcatccgcagcttctgaatgagtccgaatttgccgttgaacttgccgatgatgcggttcaggtcggggaccatgatgaagaaaccgatcggctcgtcgttgaaataggcgaagaagatgatctccgggtcgatgatcggcttcatcgtctccatgatcttcatcgcctcctcctgcgtcatgggcttcacgcccgaaaagagcgaccacgccttattatatatgatgcggaagttctcggcctcctcctcgatgcgcgacatgtcgatctggcggaaaccgtagcccggcgtcgagaagagacgcttggcccggtcgtggaccatggcgttcacgtcgtcgtcgtagattttccagatgtaggtgttctggttgaagtagttccggaatccgtagttctcgaacagctccttgtaataaggcgggttgtaggggttctcgtacagcggctggaactcatagccctcgaccagcaggccccaccacgcgtcgcgctgtccgaaattgatcgggccgtccatagcctccatgccgcggctggccagccacatgcgcgaagcgtcgaacatcaggtcggcgacctgctggtcgtcgatcgactcgaaaaatccgcagccgcccgtgggctgctcttcaagtgcggccttctcgcggttgtagaacgccgcgatgcgccccacgacctcgccggcacggttgcgcaccacccagcggacggcttcgccgtcggcgaactgctcgttgcgggccggatcgaaaaccttgcggatatcggtatccagcgggcagacccagttgcggttgcccttgtaaatcttcttggggaggtcgagccactcgcgttcgagcgcgggcgtgacgacctcctgaagcacgtatttgtcactgttcattcatgcatgttttttatagaccagaacaaagatagaaataaaaaacgaaaatggaatgaaacgggcgggaaagtcgcaaagccgcagacccgtacgcggcggccggttcgcttgtccgcaaggaaaaattgtttatctttgtggaaactgcgtccgcacaatcccccgatccccatgacaacagactacagcgaattcggctggagcgatgctcagcccgcattctaccacgaactcctctgcaaatacatcgagcggctgcttccggccgacggctccccgattctggatgtcggctgcggcaacggcttcaccgcaaattatctggccggcaagggctacgacgtttacggcatcgacgcatcgcggcagggcatagccatcgccaatcggacgggggggggaatcccggccgtttcttcgtctgcgacgtaacgacgggcgagctgccgcccgaactgcggaagatccccttcaggaccgtgatctcgatggaggtcatcgagcacctttacagcccgcggacattcgccgccttcatccgcagcatcctcgaagccaacggcggcggacgtttcatactcaccacgccttaccacgggtacctgaaaaacctctcgatagccctcgccggcaaagcggaccgccactacagcgcattgtgggagggcggccatatcaaattctggtcccgcaggacgctcgccatcctgctgcgggaagccgggttccgcaacatggccttcaccggcgcggggcgcatcccgtacctgtggcggcacatggtgttcagcgccgaagcgccggcggccgcggaagtccgggcctgcgacccggctgcggaaccgtgaaaaccccgccgccgttccggccggcggagccgtatggaaacagatgccgccgaaacagcgcggagacggtacagaggcagcacagggtatggtgcggaagcagtacggggtacggcacggaagcagcacggggtacggcacggaagcagcacggggtacggcacggaagcagcacggagacggcagggcggcggcacggaggtaaaaacgcacggtttctcatttcgcggatttttttctatttttgttaaaacaaatcaggcgacacgatgaacaagaatctcgaacaatccctttcggacggaaacaggccccagtaccgcttcatgaaataccgcatccacaaaatcctgctggtctgctgcagctacgacgggtatattctcgaagaagacggacatatcgagtcgcagatcaatcaggagtacctcgacctgaacatgtcgaacccgccgtcattcacacgtgtcagctcgacgcgcgaggcgctggacctgctcggacgcgacgattcgttcgacttcatcctgacgatgtacaacgtgggggaactggacgtcttcacgttcgccaagatcgtcaaggagcgccatccgcagattcccgtggcgctgctcacctccttttcgaaggacatctaccgccgcatcgaggagcaggaccgttcgggactcgactacattttcggctggcacggcaacaccgacctgatcatggcgatcatcaagctggtcgaggacaagatgaacgccgaggaggatatcgtcgagggcggcgtgcaggccattctgctggtcgaggactcgatccgcttctattcgacctacctgcccgaactctacaagctgatcctgctgcagaacaccgaattcctgaaggacgccctcaacgaacagcagcagatcctgcgcaaacgcgcacgccccaagatcctgctcgccaccaactacgaggaggctgtggagctttacgaccgttacaagaagaacatgctgggcgtgatttccgacgtggggttcgtactccaccgcaacgacccgcccgaaagcgagaagcgcgacgccggcatcgacctctgccgccgcatcaaggaggacaacccgctgatgcccgtactgctgcagtcgtcgcagaccgaattcgaggcgcaggcccgcgggctgggagccggattcatcgccaagaattcgaaaacgctgctctcgcagctgcacgaatatatcgccaaggagttcgcattcggcgacttcctcttcaaggaccccgatacgggagccgtcatcggccgcgccaaggatctggcgcagatgcaggagatgatcgccacgattcccgacaaggcgttcgaataccacacctcgcagaaccacctctcgaaatggctctactcgcggggactcttcccgctggccgcggccatccgccggggcaacaagagccagttcgccaccaccgaagaacaccgccagcgcatcgtgaacctcatcaaggactaccgcatcttgctcggacagggcgtggtggcgcgcttcgacaccgagacctacagcgatgcggtggctttcgcccgcatcggcgaaggctcgctcggcggcaaggcccgcggtctggcgttcatgaactcgatgctgctcaagcaccgccagtacgacaagcacgacaacctgcgcatcatgattccccgctcggtggtgatcgcaacggactatttcgacgaattcatccgcaacaacggactcaaatacatcatttcacaggagttttcggacgaggagatactctcggagttcgtcagttcgacgattcccgtcaaactgcagcgcgagctgaaagcctacatcaagaccgtcagtacgccgctggccgtgcggtcgtcgtcgaagctggaggattcgcactaccagccgttcgccggcatctactcgacctacatgatcccctatgtggacaacgaggaccagatgctgcgtctgctgctcaaggcggtcaagagcgtatacgcctcggtctacttcgcatcgtcgagagcctacctctcctcgtcgcagaacctgatctcggaggagaagatggccgtcatcatacaggaggtgtgcggcacggagcagaacggacttttcttcccgaccttttcgggcgtggcgcgttcgatcaactactaccccatcggcgacgaagctcccgaagacggcgtgtgcaacgtcgccatgggactgggcaagctggtcgtggacggaggacgcacgctgcgcttctcgccccgctatccgcagaaggtgctccagacctcgacgcccgaactggcgctgcgcgacacgcagaacgaagtgctggccctgagcctgcagcccgaagagttccgcacgtcgatcgacgacgcggtgaacctgcggcggctcgacatcgcccagatcgccgagctgcgcaattcgcgcttcgtctgctcggtgtgggaccgcgagaacgagcgcatctcggacagccccttcgaccggggccgcaaagtcataacattcaacaacatactgaaatacaacaccttcccgctggcggagatcgtcaccgacatcctgcacatgggcgccgaggagatgcgctgccccgtggaggtcgaattcgccgtcaatatggacgtggcgccgggggagcagcagattttcaacctgctgcaaatccgcccgatcatcgacaatcaggacaaccggccgatcgactggagcgcggtggacacctccgatgcgctggtctacggcgagaacgccctcggcatcggcatgatgaacgacatctcggacgtcatctacatcaaaagcggcacgttcagttcgctttcgaccgagaagatcgccgacgaactgctggagctgaaccgccgcatgcgcgacgaaaaacgctcctacatcctcgtcggtcccggccgctggggttcgtcggacccgttcctcggcgtgcccgtcaagtggaaccacatctccgaagccaaggtgatcgtcgaatgcggcatcgagaaattcgacgtcgagccgtcgcagggcacgcacttcttccagaacgtcacctcgctgggcgtgggttacctgacgatcagccccttccgcggcgacggcgtattccgcgaagagacgctcgacaaatgcgccgcgatctacgaaggcagcttcctgcggcaggtgcgtttcgagcgtccgctgtgggtctgcatcgacggccgctcgaacaaaggcatcgtcaaagagacgccggacgaagcgcgggaggaatagcccgcagcgcaccgatacgacattttccggagaaaaggagaaataaataacgaattttcggaaaaaatcatgttgcagttacaatttataagaaatagttttatatttgtaataaagaaacaacctttaaaacttcaggcaatatgaacgtaaacaaattaatggcggaacttgagcgcaagcatcccggcgaaagcgaatacctgcaggccgtgcgcgaagttctcatgacggtagaggaaacctacaaccagcacccggaattcgaggccaaccgtatcgcagagcgcatcgtggagcctgaccgcagttttaccttcaaggtggtctgggtagacgacaagggcgaggtacaggtcaataccggttaccgcgtgcagttcaacaacgcgatcggtccctacaagggaggtctgcgtttccacccctcggtgaatccctcgatcctgaaattcctcggtttcgagcagattttcaagaatgcgctgacgacgcttccgatgggcggcgccaagggcggctcggacttcaaccccaaaggcaagtcggaccgcgaggtgatgcgcttctgccaagccttcatggtcgaactgtggcgtcatatcggtcctgaaaccgacgttccggccggtgacatcggcgtgggcggccgcgaaatcggctatctgtacggcatgtaccgcaagctggcgcgcgagaacacgggcgtgctgaccggcaagggcatgacctacggcggttcgctgatacgtcccgaagcgacgggattcggcgcggtgtacttcctgcgccagatgctcgaaaaggcaggcatggacatcaagggccagaccatcgccatatcgggcttcggcaacgtggcgtggggtgcggcgacgaaggcgaccgagctgggcgccaaggtcgtgacgatttccggcccggacggctacatctacgatcccgaaggtctcgacgccgaaaagatcgcctacatgctcgaactgcgcgcctcgaacaacgacgtggtcgagccttacgtacataagttcccgaacgcgcaattcttcgccggcaagaaaccgtgggaggtcaaggtggacatcgccatgccctgcgccacgcagaacgagctggacggcgaggacgccaagaaactgctggccaacggcgtgaagatcgtggccgaagtctcgaacatgggctgccgccccgaagcgatcgacgccttcatcgcggcgaagatcccctacggaccgggcaaggccgtcaatgcgggcggcgtagcgacgtcgggactcgaaatgagccagaactcgcagaaatacaactggacggccgaggaggtcgatgccaagctgcatcagatcatgtcgtcgatccatcacgcatgtctggaatacggcaccgagaaggacggcttcatcaactacatgaagggcgccaacatcgcgggcttcatgaaggtcgccaagtcgatggtcgagcagggcatcctgtagaccggcgaatacaatttaataaaagaagagcggaccgcaagtccgctcttcttttattaagtccgcacattttctcaggcccccctgccagcgtcagtctgtaaatgactcggaaaaggcggcagcgagcggcggggcatccctctaacgtttccgccgcagagcgcggaccgcttcgccgccgatagccagcagcgaggtgcagccgatgacggccgcccattcgcgccacgcaagcggttcagtgcggaacacttcgccgccgaactcgacgatgagcacctgtcccgcggcgatggccagcaggatgaggaaaaactcacggcacccgcgcaggcaggtaaagaccgaatggcgcgtctcgaagcctttggcgttgaacatgttccagaactgcaggaagacgaacgtcgagaagaaaagcgtcagctggcgcacggtgagtccgccttcggtgatcgtccaccagaagagcatgcccagcaggacggcgaccatgataccgccgcaaatgaaaagcgtgcgggccatgccgggcgtaatgatgaactcgtcgcgcggacggggtttttcgagcatcacttcgggattgggcggcagcgaggccatcgccatcgccgcaaaggtgtccatgatgatattgacccagagaatctgcaccaccgtcagcggcatgtcggttccgaaaaccgcgccgacgaagcagatcacgatcgccgcgaagttgatcgtcagctggaaaagtacgaaacgctggatgttgcggtaaagcgagcggccccacatgacggccgtcgcgatcgaagcgaacgaatcgtcgagcagcgtgatgtcgctggcgtccttggcaacggaggtgcccgatcccatcgacagccccacattggcgaagttgagcgccggggcgtcgttcgtaccgtcgcccgtcacggccaccacctcgccgcactgctgcaacagccgcacgagccgctgtttgtcgagcggccgggcgcgggacatgatcttcagctcctgcacgcgtccgagcagctcctcgtcgctcatcgccgcgaactccgtaccggtcatgtggttgcggtcgttgtcgcgggcgtcgtcccacaagccgatctggcgggcgatctcgcgcgccgtggcgggagtgtcgcccgtgacgatcttgacgtctatcccggcgttcaggcagcgccgcacagcgtcgggaacatcctcgcgcaccggatcggagatagccgccacacccgaaaaatgcagctgcgacgccgctacggcacgcagacagtcgtcctcggcagtttcggcccacgccacggcgagcgtacgcatcgcgcggccctgaaacccggccagctgctcggcgacctgcgcatccttgccgtcgggggcgcacatggcgcgcacgatttcgggcgcacccttgacgcagacgatccggcggcccgaaacgccgctttcgatgatcgtcgccatatatttgcgttcggtcgagaaggtcagccggtcgacgatcttcgcctccgaacgcaggggttcgtaatcctcgccctgcgagcgcatccactccagcagggcgccctcggtcgggttgcctataacggcgcccgaagcgtcgaggaaagccgtggagttggccgccacgatctcggcgaaatcatgcgccggaagcgcatcgtaacgcaccagttcctgcacgtgcatccggttctgggtcagcgtgccggtcttgtcggtgcagatgaccgtcacggcgcccatcgtttcgcaggcgtgcatgcgccgcacgaggttgttggtcttgagcatgcgccgcatggacatcgccagcgacagcgtaatgctcatcggaagtccttcgggaacggccatcacgatgatggccaccgagaccatgaaaatgtgcagcacctgctgcgatatttcgagccagtcgcgctcgaacagcccaccgacgaagaccgccttgccgagcatgacgcagaaaatagcgaccgcaagcgcaatgccggcccggccgatgagtttcgagaggcgcgtcagctggcggttgagcggcgtctgctcgtcgctctggacggtcgcctgctcggtgacgcggcccgcttcggtcgcatcgcccacggccgtagcaaccagaacgccgtaaccgtccgccacggtcgtaccgcgcagtgcgacgttcgaaggataggtcgcttcggaatcgaaatgcgcctcgtcgacggttttgtccacctccagttcgcccgtgagggtcgattcgttgatgcgcagcgacacggcttcgaccagctcgccgtccgcgggcacggtttcgccgctttcgatatagaccacgtcgcccacgaccacgtcgcggcggggaatctcgcggatcgagccgtcgcgcatcaccttgaccggaatatcgtcgttgacctgattcagccggcggaaacgccgcatggcgtcccactcgaaccagaacccgacgcaggtcgccagaataatggcgcatatgatgccgatcgactcggtgaaatccttgtgaacgaacccgatggcgagcgacagcaccgcggccagcagcagaatgcggatgatcggatccttgaacttctcgacgaaaagcttccatgccgaatcgtctttgggcggcgtgatgacgttgtcgccatgcgcccgccggctgtctgcggcctcttgcgaggataaacctttgggattgtaacggatcattgatatgcagtatttaattcagggaaaactgccgcgtcgaagcgtcgagccgcacggcgatgaacaacaaaatggtaaacgcaataagcgacgaaccgccgtagctcatgaacggcagcggaatgcccatcacgggcatcaggccgatggtcatacccacgttcaccagcacgtggaacaacaggatcgcggccacgcagtagcagtaaatccggccgaaaggctcctgctgccgttcgcccatgcgcatcaggcgcaggatcagcatgcagagcagggccagcacgaccatcgtccccagaaagccccactcttcgccgaccgtacagaagatgaagtcggtatgccgttcgggcacgaagccgtacttgatctgcgtgccttcgagaaatcccttgccccagaatccgcccgaaccgatggcgattttcgactggttgacgttgtagtccgtgccgaggggatcgctgatgatgcccagaaaactcaggatgcggtcgcgctggtgctgtttgagaatcgaattgaagatatagtcggtggtggggaggaagatcatcgtgcagagaaaaagccccacggtaatcagggtgctgctcaggttcatgcggaaggcatagacgagcacgccgaccagcgacagcagcgtcacggtcagcaggcaggcgtgcaggtccatcacgccgggcgcgacgagcgccatcgtcatgcagagcaggatgctcgccagcgccagcgacgccagatagatcaggcgcgagcgccactccccggtcatcatcgcttcggagagcgtgcagaccagaatgatcgacacgagcagcgtcatgggcgaaagcaggaacgacacgatgaacagtgcggcgatcagcagcaccggaatgcagagccacttgttgagtccctcgcggtaaagcacgaagaggaacgagccgagcacgatgcccgaaccggtgtcgttctgcaggatgatgatgaaaagcgggatgcagatcaccacgcccaccttgaagaggtcgcccggacggttgatcgagaaagagtaggcgctcatcacgcgggccagcgcgagagccgtggcgatcttcacgaattcgacgggctgcaggcggaacgaaccgaattcgaaccacgccttggcgccgttcacctcgcggccgaacagcagcgcgcccagcaacagcgccaatcccgcgaaataggccggataggcgaacatatggtagaaccgttcgtcgagcagcagcaccacgagcgccgtggtccacgccacgccgatccacatcagctgcttcatgtagaagtgcgagaaggagaagatatcggccgtgccctcgtcgtacgacgccgaggtgatcgacacccaccccgccagcacgatcagcacgtacagcaggaccgtccagaggtccactccgtaaaagatactatggcggttagcggtcatacgaagggtaatagatgttcatattcttgatatgctccagcagggccggacggcggatcgtgtcggtcaggtagtactcctccagcaggctggcgatcggcagggccgccgaagcgccgaaaccgccgttttcgacatagaccgaaatggcgatcttcggattgtccttgggcgcgaacgagaggaaggtcgagtggtcgcggccgcggggattctcggccgtaccggtcttgccgcagacgtcgagtccttccagacgcgccgccgtggaggtgccgccgacgttgacgccccgccacatgccgtcgacgatcggttcgaagtgcttgggatcgaccttggtatagtggcgttcgtaaaaacggcggtcgagcgaatcctgtccctcgatcttcttgacgatatgcggaatgtagtagtagccccggttggcgacgatggccgcgagattggccagctgcaagggcgtacagcccagcgcatcctgaccgatggccagcgaaatgaccgtcagcgaattccacgaacccctgtactggcggtcgtagtacgagcggtcgggcacgtagccgttgccctcgtcgaggaagtcggagccgagtttgcggccgaaaccgaaactctcgacatactctttccagacgtcgtaaccgtctttcacgctctcgtatttgcggttgtcgagaatgtcgcggaagacatagcagaaataggcgttgcacgaggtcgccacggcgaagcgcaggtccagcggcgaagcgtgggcgtggcatttcatgcgtcggcggccgacctgatagccttcgtggcagacgtgcaggtccgagggtctgagcacgccctcctgcagcccgatcaggccctgcacgagcttgaaggtcgatcccggcgggtatttggccttcacggcacggctgaaaagcggatgccgcttgttgtagatcatcttcatgtagttgttgccgcgctcccggccgaccagttcgtcgggatcgtacgtcggcgaggagaccatcatcaggatctcgcccgtcgagggttcgatcgccacggccgccccgaccttgccgcgcatcagctcctcgcccagcagctgcaggcgggcgtcgatcgtgctgacgaggtagcgccccggttcgggcagcgagtcgtaaacgccgttcatataggaacccttgatcgccccgtgggtgtcgatctcctgaatcttcacgcccttcttgcctttcagcaggggttcgtaagccgactccacgccgctcatacccacgtaatcgccggacttgtagtccgggtggcgcttcaggaaatcggcgttcacctcgcccacgaatcccagcaggttgccgcccaccttgcggggataacggcggaccgtacggtagacggcatagaatccccggaagttgcattcgtcgaaacgcagcttgtcttccttggaaatatagctcgtcaccacgcggggcgcacgggggcgcatccgggcattggcaagctccttttcgagcttttcgcgcgaaaggcccagcacctcgcacatgcgcagggtgtcgaagcccttcttgtcgatctcgctgtagatcaccatcaggtcatagcactcgcggctctggaccagatactccccgttgcggtcgaagacttcgccgcgcggcggatactgcaccacatggcgcagcacgttggctttggccagttcgttgtagcgcgagtcgacaagctggatataggccagacggccgccgatcagcaggaagacgaagagcaccacgcactgcagggtgcgcatccggacgaatccttcggagtctctcatacgcgcacgggaagttttgcggtgaaaatacgggcgataatccagataaaggccaccgacacggcgccgctgacgacgatacgcaccaatgtgcgcacgacgtgcatccacgaaagggcctcaagcgagaagaatacggcatggtgcaggagcaccagcacgatcaggtaattcaggaatacgcgccgtccgagccgcccggcgcaggggacgccgccttcgcggagatcgtcacgggtatacagcgtccgcagaagcgccggacgcacgaaggcgacaagcagcgtggcaatggtgttcacgcccgcggctcccatggcgaaatccatcgtcacgcccatggccagtcccgatgcgagcagcaccacgggcggcgtatccagcggcagcagggcgacgaacgccacgtagacgagcggattgaggtagatgctgatcgagagattgtcgaacagaaagacctgcaaaagcaccgtcacgacgaaaagcgaaatgtatggaagcgttctgtgcatttagttcagccgggtatgttgttctactttttcactgttctgcaaatcgcggatttcggtcaggtcgcggttctcgaccagaatcacatccgtcaggcgcgacatttcggccgccagccgcacgcgcaccttgaacgccgtgcgggtttcgttcagctcggcgctttcgacccagccgatcagcacgtcggcggggaaatactgcgagaagcccgtggtcacgacctcctgtccgggctgcggatcggcgtacttcgacagttcgtccagcactacggtatggggatccgcaccgtcccagtagatcgagccgaaataatcggcgcccaccagcttgccgctggcgcgaaacgaagtgttgagcaccgacatcgccaccgagtagcgctccgtgcagtcgaccacatagcccgccatcgagccgtcggaggccagcagcgccatctcctcggccactccgtcgcggcggccgcggttgagaacgacgaggttctgcgcacggttgaccgtattcgaaatcaccgacgcggtgatgacgcggtatttcgagattccgacgtcctgcatgtagctgtccagccgcgcggcggtctcggcctcctcgtacacggccagccgctctttcatctcggccacgtgcgcgagcaggtcgcggttctcgcgtccgagcgaaaagtaatgccggatgcccgcgaacacgccgtgcacgccgccgaccacctgattcgaacgcgccagcagccgggcctgcgtgtagtaggtcgagtgggcgtaatagccgacggctatcgcttcgagcacgacgaacagcaccatgacatagatgcttcggataaactctaagagcttgcgcacggtttctcgttaatttaagattgcggacactatgcccgcaatccgtattcatttattcacctctcacctccggtccggccggagtgcgttacaactatttcattaagaacgagaagcggttgatgttcttcagcgcgatgcccgtaccgcgcgcaatggcgcgcagggggtcttcggcgatgtggaacggaatgccggttttctcgttcaggcgccggtccagccccttgatcagggcgccgccgccggccagatagatgccgttcttcacgatgtcggcgtacagttcgggcggcatcgattcgagcaccttcatcaatgcggcgtcgatcttcgtgagcgacttttcgagcgcataggcgatctcgctgtaactgagcgacacggtctggggcagggccgtcagcatgttgggacccgtcaccacgaagtcttcgggctcctcgtccagatcggagacggccgcaccgatcgagcacttgatggcttcggccgtacgttcgccgatacggatattgtgctgctggcgcacgtaactctgaatgtcgttggtgaagacgtcgccggcggtgttgatcgactcggagcagacgatgccgcccagcgagatgcaggcgatctccgacgtgccgccgccgatgtcgatgaccatgttgccttccggagcctcgacgtcgagaccggcgcccagcgccgcggccatcggctcgtagatcatgtagacctcgcggccgccggcatgctcggcggagtcgcgcacggcgcggatttcgacgttggtcgaacccgacgggatgcagatcaccatacgcagcgagggggcgaagagactgcccgaagtcttgactttcttgatcatgccgcgcagcatcagctccgtggcgttgaaatcggcgatcacgccgtccttcagcggccggatcgtcttgatgttagggttggtcttctcgtgcatctggcgcgcctgatggccgatggccacgaccttgcccgtatgcacgtcgagcgccacgatcgacggttcatcgaccacgaccttgccgttgtagattatcagcgtgttggccgtaccgaggtcgatggccagctcctgtgtcagtgaaaaaattcccatagtgctacacccaactgttatatttccttaattattttataatcaacgttctgtatctcgcccggcctaacctcccgccggggccgccgccgtaaggcgacatatccggacaaaggtaacaaaaagcgagggatatttttacatttttttattattttttttgattacatttgtagaccgaaacaatcgatccgtacatggaatacaaaatcggaaaagaggcccgctgcgccgtgatcggctacggcagctgggcgacggccatcgtggggctgctcgccgcgaacgaagcccgcgtaggctggtacgtccgcaatcccgaagtgctcgaaggactgctcggcgaaggccgcaacccccgctatctgagcgacgtggagttcgaccgccggcgcatcgccccctccgacgacctcgacgaggtggtccgcgaagccgacatcgtcattctggccactccgtcggcctacctcaagacgttcctcgaaccgctgacggtctcgctgcaggacaaattcgtcgtctcggccatcaagggcatcgttcccggcgactacaagcccatcgtcgaatacgttcacgaccgctacgacctgtcgtacaaacagatcggcatcatcaccggtccgtcgcacgccgaggaggtctcgcgcggcaagctctcctacctcacggtggtctgcaccgacccggagaacgcgcagatgctgggcgagaaattcgccacggactacattcacctgagctactcgaccgacctgtacggcatcgagtacgccgccatcctgaaaaacatctacgccctctcggtcggcatcgccgtcgggctgggttacggcgacaacttcctcgcggtgctgatcgccaacagcgccggggagatgcgccgctttctcgaagagagctatccggccgagcgcgacacgctggtgtcgggctatctgggcgacctgctggtgacctgctactcggtctacagccgcaaccggcggctgggactgctcatcggccacggctgcacggtcaaaagcgccctcaacgaaatgacgatggtcgccgaaggctacttcgccgccgactgcatccgtcacatcaacgcccgccacaagatcgaaatgccgatcgccgaaatggtttacaacgtgctctaccaaggggcttcggcgcgcaagtgcatgaaagaactgacatccaaattaatttgacaataacatggaaactctgaaattagacatctccaaaacgggcgttgcggtttcggccgcaatgcaggccaaggcgcaggcggccaacgccctgctcgaatcgggcaagggtgccggcagcgacttcctcggctgggtgcacctgccctcgtcgatcacgcccgaccggatcgaagccatcgagaagcaggccgcgaagctccgcgagaaggccgaagtgatcatctgcatcggcatcggcggctcgtatctgggcgccaaggccgtgctcgaagccatgagcgattcgttcaagttcctgcacaagaagcggacggaacccgtcgtggtgttcgcaggccagaacatctcggaggattacacccacgaactgctcgaagccgtgaaggagtactcgatcgccacgatcgtcatctccaagtcgggaaccacgaccgaaccggccatcgccttccgcctgatcaaagccgagatcgaaaagcgttacggcaagcaggaagccgccgaacgcatcgtggccatcaccgacaaggcgcgcggcgcgctgaagacgctcgccgacaacgagggctacccgacgttcgtcattcccgacgacgtgggcggacgcttctcggtgctgactcccgtgggcctgctgccgctggcggccgccggcgtggacatcgccgcactggtgcgcggcgcgcaggagatggagcgcgcgacggccgacggcacgccgttcgaaaagaacccggcggcagtttacgcagccgtgcgcaacgagctgtacgaaggcggcaagaaaatcgagattctcggctcctacgagccgaagctccaatacatcaacgagtggtggaaacagctctacggcgagagcgaaggcaaggacggcaagggcatcttcccggccagcgtgacgctgacggccgacctgcactcgatgggacagtatattcaggacggcgaacgcacgctgttcgagacgatcatttcggtcgccgaacccgccggcaaggtagtcgtcgaagccgacggagaaaatctcgacggcctcaacttcctcgcaggcaagcgcatttcggagataaaccgcatggccgagctgggcgtgcagctggcccacgtggacggcggcgtccccaacatccgcatcgagattccgcagatcgacgcgcatgccgtcggctcgctgctctacttcttcgagcgcgcctgcggcatcagcggctacattctcggcgtcaatccgttcgaccagcccggcgtggaggcgtacaagaagaatatgttcgccctgctggacaaacccggctacgaagaggcctcgaaagccatcaaggcacggctgtaacagccgcacataaggcagaaggcggagtctccggactccgcctttttattttgcccgaatctaccggggccgtccatgaaaaacagcttcccgttggcacaaaaaatgctcccggaaatttattccaccgtcgatatgattatgaaaggacgtccgttattggttctgctgctgttcgcggcatcggcagtcatcctcgcagggatgtactacgccgcgacgcgcgagggaacgacgacacggcaggacaaatgggccggcgtgctgtcggacctcgacgcatgcagccgccgcaagcacgtcaaatcggcgcagtacgaccatttcgcgggcatcgcccggcaagagcgggagcacgacgccgaacggctgttccgggccatggcccacgccgagcggcttcaggagtacaactgcgccaacgccatcgtccggctcggcggccgctacgcaccgccggagcgagtcaccgtcttccacggcacgaccgacgacaacctgcgccggagcatcgacttcgcacgccgtccgccggaggggctgcatgcagacgacatcgagcgcgccctgcaaagcggcaaccgctatgcggcacgcgtgctgatctgggcgaggtccggggacatgcggcatctggcgctgatggagacctgccgccgccggctggcggccaacggacctgcgggcgcacagggcaacatcgccggcaggagggcaaataatgacatggcccgcggcccggcgaacggaacggcaatcaattcggaaaatagcacggcccgcaattcggcaagcgagacggcacactaccgggcaaacggagcggcacaccgggcggataaaggcaaggcccgcggcccggcgaacgggacggcccgcgattcagagcgcggaaccgcagacggttctggaaacagtcggcaggacgctatggcagacaacgccccgaaaggctatctggtctgtccgacctgcggcaacatctacccggcggagtgcagcgattcctactgcccctgctgcctgaccgacgggcggagattcgtcgcgttcgaagagtgacgcgccgccgaagtcggattttcacacgcctttcgcgagccgcgcgaccgaatcggccagagaggattcccagcgcgcgtcgcatccgaaccgcccgatatggatcaggggcttggttttgccgtgaaaatcgctgccgcaggtcatcaaggccccacggcgccggaccagcggcgcaaaataggcgatctgccgatcatcgtggtaattattgaaaacttccaatccctcggccccgcgctccagcagcttctcgacgatacgctcccggccccgcaggttgagtccgggatgcgcgaccaccggcacgcccccgttgtcgcgcaccagctcgacggcgtcacggaagctcatatattccaccgggacgaaagcgggcctgccctgcgcgccgaagtcgaggtaaaagttgatatagggcatatctccgcgcgcaccgccctcccggtagggagccagcagcggcgtatcgcatgcggggtcggagagcatcacttcggcgatcagctccatcgtcggcagtttgcccgccgcagcggccagcacggcctgctcatcgacggcgaaacccagcctgcggagtttcccgaccgtctcgccgaacgacgccatgacttcggcggctacggtctcttcgagcgtccggaaatcgggagacttccagtcgatgccatagcccagcagatgcaggtccgtaccctcgaagctgcaatcgatctcgatgcccggcacgaactccattccggcctgcaaagccccgtcgcaggcttcgtccagcccccggacggtgttatggtccgtcagggagaagaggtcaacgcccccggcggcgcatttgccgacgatgtcggcgacacggaactctccgtcgctgctgtattccgaatgaatatgtaaatcggcacgaatcataagctacaattattacgggcgcccttttcaggaatgtaaagataaggacaaacggccgcaaaacaaaatccgccccggacgggcttgccgttcggggcggaccgtatcgtcctgaggcgggaaactactcctcctcggcctccttcatgttgtggtaaacgttggtcacgtcgtcgtcctcttcgagtttctcgacgagtttctcgatcgactcgcggccttcggcatccagctccttcgtatcggtgggcaggtaaaccgactctcccgacacgatctcgtaccccttgtcgtcgagccatttctggatggcgccgaacgactcgtagggggcgtaaaccgtaacgccgtcctcttcgggatagaactcgtccacgcccagatcgatcatctccagttcaagctcctccatatcgacgccttcggccgggcggaacttgaagacacacttgtggtcgaacatgaacgccacgctgccgctgttgcccagcgtaccgccgcatttgttgaaatacatgcgcacgttggccacggtgcggttggtattgtcggtcgcggtctccacgaggaatgcgatgccgtgcgagccgtatccttcgtagatgacctctttgtaatcggcggcatctttttcggtggcgcgcttgatggcgcgttcgacgttctccttgggcatgttctcggccttggcgttctgcatcagaatacgcagacgggtgttgcccgaaggatcgggtccggcggccttgaccgcgatctcgatctctttccccagtttggtgaacgtgcgggccatatgtccccaacgcttcattttacgcgctttgcgatactcaaaagctcttcccatatgaatttttcgttattatttttcgttcgtggtgcaaaggtataaaattaagaattaaaaattaagaattacggccaaaatttattatgcgcggcgcgtatgcggattttgggatatttgtgtaattttgcgcagcactaaatccggtaattatggaaatcaaaagcagattcgaccatttcaacatcaacgtcaccgacctcggacgcagtctcgaattttacgacaaggcgctgggcctgaaagaaacaggccgcaaggaagcgggcgacggaagcttcatactggtttatctgggcgacggggagacgggattccgcctcgaactgacatggctgcgcgaccacgccggcgcctatgaactgggcgaaaacgagagccatctctgcatgcgcgtggcgggcgattacgacgccgtccgcggataccaccgcgccatgggctgcatctgttacgagaatcacgacatggggctttatttcatcagcgatcccgacgactactggatcgaggtgctacccgtaaaataagcggaatacccatacggcgtcattccgcgccgccggccgaagccgcggcgcgcgaaacggcgcaaaaccgcagcgcatgcggcccgaagggcggcggcgcgtcaaaacaaacacctatgcaaaacaacaccgaattgcagcgggaggccgatgaggcggtccgcgtgatgaaagcgggaggcatcatcctctaccccaccgacacggtctgggggctgggctgcgacgcgaccaacgccgaagccgtggagcgcatctacaaactcaaacggagcgaaaacaagaagtcgatgctcgtgctgtgcgcgtcggccgacatggtcgtgcgctacgtaaacaaggctcccggcatcgcgttcgaggtcatggagctggcgaccagcccgctgacggcgatccttccgggagcggccggcgtcgccgagaacctgattcccgaagaacggacgctcggcgtgcggattcccgaccacgaattctgccgccggatactgcgggggctgggacgccccgtggtctcgacctcggccaacatttcgggcgaggcgacgccctcaggacttgccgaagtgtcgcgcgagatcatcgacggcgtcgatttcgtcgtcaatccccgcttcgagggcaagcccacgaaaaaggcgtcgtcgatcatcgccttcggcgagggcggcgaagtgaaaatcatacgcgaataacacacatggcaaaaacgttggaaacctccatccagaagcgcttctcggacgtcgatccgttccagcatgtgaacaacgtctcgcagcagatgtatttcgacgtgggaaaaatggagtattacgaaaagatactcggcgacgaggtgctgctcggcgatctgcgcatcgtcaccgtctccacttcgacctcgtacatggatcagatccgcctgcacgacagggtgcgcgtcacgaccacctgcgagaagatcggcaacaaaagcctcacgctcttccagcggctgctcgccggcgaccgggtgtgcagcgagagccgctcggtgatggtcgcattcgacttctcgcggcagcaaagcatgcccgtgcccgacccgtggcgcgaacgcctgctggcggactaggcccgcagtttcccgtcgctgcccacgggcggcagtccatggcggacgtaatacttatagccgatcaccacaagcaccacgcctgcgaagatgaagacaagggccacgacgttggccgtgtcgaagacggcctgcccgcggacgatggccagtatcccggcgatcaccggctggatatagcggtagagcgccgtatggaccgaggtgagtttctccgtaccccggtacagcaggtacatgggcaggaccgtgcccagaatcaggatataggccagttcggcctgcgcctgaaggggcagtttcaggaactgcgtatgggcgatgtatttccagaagaatggcgccgtcacggccagtccgatgatgtagtaccaccccatcaccaccagcgttcccagccgttcgagctggggtttgataatcaccgtattgatggcgatcgccaccacggccaccagcaccagtgcgttgccgtaggcgcggctgccgtgggtgagcacgaacccgtggtcgaagagcaggacggcagcgccgatcagggcgcagacgacgcccacgacccgcgccctgatgtacttgtgcgggtgcatcaggtggtccatgatcaacgtcacggcgggaccgagggtcgagatgatcgaagcgtcgatgggcgaggtgtaagacgatccccacaacagcatatacatccagccgtagacgatcagcatcgtgacgatcaggatattgcccgcgtcgcgccagcggatgcggaacgactgcttcgagaagagcgcgaaggggatgaagaacaccgccgccgaaaggacctgaagcatgaatatctgctggaagtccagataattgcgcgtaagggagacgtagaacgaaaaattcgctccgaaaaagaggttggcaaataccagatcgatattgtaacgcgttttgctcacgggaattccgaggggcaattattacaccaaattttacctatatttgccgcgtcaatcccgcaatgacatggacaaaggaaaactgaaaggccacgcggccctctgggtcgcaaatctcgtctggggcctcaacgcgccgatcggcaagagcgtgctctggtcggagcacaaccccggcggggtcagtccgttcgcactgagcgtctaccgcatgctgggagcctgcctgctgttctggagcgtctcgcttttcctgccccgcgagagagtcgcacggcgcgacatcgtgctgctgctcttcgcgtcggtgttcggcatccagctcaaccagatgcttttcctctgggggctgtcgctcacctcgcccatcgactcgtcgatcatcgccacggtggtccccgtactgacgatggtgctggcgacgctgttcctgcgcgagccgatcacatggctcaaggcgggcggcgtgttcctcggctgcgccggggcgctgctgctgattctggtcagccggcacgggacggggcacacgagcagcgtcaagggcgacgtattgtgtctcgtcagcgcggtcagctacgccacctacctcaccgctttccgcaacgtaatcgtcaaatattcgcccgtaacgaccatgaagtggatgttcctcttcgcggccgtcgtcgctgccgcggtctattaccggccgctcgcggccgtggactacgccgcgctcgcgccccggacatgggccggaatcggctacgtggtcgtctgctcgaccttcctctcctacttcatggtgccgatcggacagcgttacctgcggcccacggtggtgtcgatgtacaactacgtacaacccgtcgtggcggtgcttttctcggtcgcaatcggtctcgactccttcgggttcaccaaggccgcggcggccctctgcgtcttcgccggggtctggctggtgaccaaatccaaatcgcgggcgcaggtggaggcggaagcgggcatgaaaaaaggttgagtatctgcaactcaaccttttgatttacaaatacgccctgaacggacaagaccgttttcaggggttctgaaccgcggctttggtcaatcccttctccgccgccagccgctccatcagggcataggcagcgtcgtaatcgttggggatttcgccgtcgagaatggcgttctttatcacctccttgatgtcgccgatggcacggcagggaccgatgccgtaggtctgcatgatgatctcgcccgtgatcggcggctggaagttgcggatacggtcgcgctcctccaaatccttcatcttgcggcgcaccagttcgaaattggccagatagcgtttgaccttggcgtcgatgcccgaagtgatgtcggcttcgcacaggatcatcagctgctccacgtcgtcgcccgcctcgaacagcagacgccgcacggccgagtccgtgaccagatcttcggagaggatgatcggccgcaggtggaggaaaaccagcttctgcacgaatttcatatgctcgttgagcggcagcttcaactgccggaagatcgccggaaccatcttcgagccgaggacctcgtggccgtggaacgtccagccgaccttgggatcgtaagccttcgtcagcggcttggcgatgtcgtgcagcacggcggcccagcgcagccacagatcgccgctgcggcgggcgacgttgtccagcaccttgagcgtatggataaaattgtccttatgggcatgcgcgccccgcttctcgacgcccttgaggttgtgcatctccgggaaaatcagctccagaagccccgtcagctccagcagttcgaagcccatcgagggtacgggcgaaaggacgatcttgttgagttccgcagcgatgcgttcgcgcgacacgatccggatgcggtgcgcattgcggcggatggcgtcgaaggtctcgccttcgatcgtgaaccccaactgcgacgcgaagcgcacggcccgcatcatgcgcagcgggtcgtccgagaaggtaacgtcgggatcgcacggcgtgcggatgacgcactcttcgaggtcgtccatgccatcgaacggatcgaccagctcgccgaacgaaccggcgttgagcgaccacgccatggcgttgatcgtgaagtcgcggcggcgctggtcgtcttcgagcgtgcccgcctcgacctgcggtttgcgcgaatcctgcgtataggactcacggcgggcacccacgaactcgacctctacgcccttgtggcggagcatggccgtgccgaaggtcttgaataccgagaccttggcgtgcagttcgcggcccagcgcttcggccagcgcgataccgctgcccacgaccaccacgtcgatgtcggtcgaggggcggcgcaggaaatggtcgcgcacgtaaccgcctacgacgaaagccctcacgccctgctcttcggccagacgcgagattcgccggaatatgggattcgtcagcggcacgcggctacctcacgaatttttcgatcaccgtcttccacgccagatagccctcgcccatcaggtgcaggccgtcgttggtgtactgcttgtcgagcatgcccttctcatcgaccagcgcggaatagacgtcgacatacatcacgttcttacgcccttcgcaaagcgtttcgagcagcttgttggtttcgatgatctcggcgcccttcttccagtggttcttgggcttggccttcgtatccacgccgtttacgggaaggatgctctgcacgtagatcttcgtccacggcgactcctcggcgaaacggtcgagcagtttttcgacattggcggcgacctcttcgggcgtgatgccgacggccagatcgtttgtgccgatcatcaggaacagctttttgggatgaccgttgatgatcggatcgagccggtcgagcagccagccggaacggtcggcgctgatgccgcggttcttgacatggcggttgttgaacaactcggcccactcgccgccgtcggtgatgctgttgccgaggaaaacgatgtcgttgccgcgaatcggcagctgttcgaaaagactgcgtttctggtagttgtattcgctttgggcgaacgacgcggcggcagcgagaagcgccgcggcaaggagaacgatttttttcatggtcggcttctttttatcattttctatttatcggagttcgcgtttgtaaagctggaccgtgttttccagcccgtaatagagcgcgtcgcagatcagcgcgtggccgatcgagacttcgtcggtccacgggatgcggctgacgaaaaagcgcaggttttcgagattgaggtcgtgtccggcattcaggccgagtccctgacggcgggcctcctcggccgccgcgagatagggcgccagcgcggcttcggcgccggcgggatattcgcgggcgtaggcctcggtataaagctccacccggtcggcgccgcaggccttcgccccggcgaccatcgccggatcgggatcgacgaaaaccgagacccggatgcctttctcatggaaccgcgccgtgacttcggtcaggaatccgcggttggcgagcgtgtcccacccggcattcgacgtaatggcatcatgggcgtcgggcacgagggtcacctgcgtcggcacgacctccagcaccagatcgacgaagctcggaatcggattgccctcgatattgaattcggtggcgaggacccgtttcaggttccgcacgtcgtcgtagcggatgtggcgggcgtcgggacgcggatggaccgtgatgccttccgcgccgaaacgctcgatatcgagggccgcacggaccacgtcgggaagatttccgccgcgcgaattgcgcaccacggcaatcttattgatgtttacactcaactttgtcataaaattcgctatatttgcattcgggacctgtctgcggccgccgccggatgaagccggaatgcggactgcgttgtccccgatgttgaaccaagttgcgccgggcgatccggacgaggcacgaaccggcttcctgtatcgtcttggcgtggtaaagttacttattttttcgaaactccgccgatgaaaatcatacttttttcccgccgccagctgcctcacaccgccggggagatctgccagctgttcgaagccttccgcattttcggattcgactacgccgtcaacgaggagttcgcgcctctggccgaagagcttacgggcatccgcattccgccggaaaagatctacggacaatgcacgggcaaacagcctgccaattcggtgatggtctgctacggcggcgacggcacgctgctcgaaggcgtgcaccgtctctgcggcgcgccgattcccgtcatgggcatcaacgccgggcatctgggcttcctgaccagcgccccgtccgccggcctgaacctgatcttcaaggagatcgcggagggacgtctcaccaccgaggcccgctcgatgatcgaagtcacgggcgactacgccgagcagcccgacaccacgctggcgctcaacgaattcaccgtacagcgccacggcgcaggcatgatctcggtcgaaacctacgtggacgaccagatggtcgccacctaccacggcgacggcgtcatcttctcgacgccgaccggctcgacggcctactcgctcagcgcgggcggcccggtcgtagctccgacgtgcgcctgtctggtgatctcgccgctggcgccgcacaacctgacgatgcgccccgtggtcattcccgacaccgccgtcatcacgcttcacgtacacacgcgccgctcggacgcattcgtcactctggacaaccgcgtctatgccgtcgggcaggaggcgacattcaccgtcaaacgcgccgaacagaagatttttttggccgtaccgcacaatatatcattttacgacacgttacggaataaaatgatgtggggcatcgacatccgcagttaatgccctgcacaaaaacggtgtaaagttgttcatttaataggtatttttcatttttattccctatatttgtgccctaatatgagcgagcagaatcgcataccgcaacacgtcgccatcatcatggacggcaacggccgctgggccgagttgcgcggcaaagagcgttacgaaggccatgtcgccggcgtcgaacccgtacgggcgtcgctgcgcgcagcggcacgctggggcgtgaagtacctgacgctctatgcgttctcgaccgaaaactggggacgtcccgcgcaggaggtcgatgcgctgatggaacttttctgcaaaagcgtggtcaacgaaacgcccgaactgatccgtcagggggtggagatccggatgatcggcgaccgcacgcgtttttcggaaaaggtgcagcgttatctggccgaagccgagcagcggaccgccggaggcaagaccctgacgctgatactggcgctcaactactcctcacgcagcgagatcacccgcgccgtacgccaaatcgccgcacgggccgcatcgggagagctggcgccggaggagatttcggaaggcacgatcagcgcggcgctcgacacggcgccctaccccaacccggacctgatcgtccgcacgagcggcgaacaccggctcagcaacttcctgctctggcaggcgtcctacgccgaactctacttcccggaggtgctgtggcccgatttcaccgaggaggagttcgaccgtgcaatggaggaatacgcccggcgcgaccgccgtttcgggctggtaaaatagatgaagttaagattagatttaaatagatgaattatttcggtaagatattcacggcagccgctgccctcgtgctgtgctgcacgaatatattcgcccaagagcagaatcctgctgacaccgcggcttcggccaagcccgcattcccggaagacgcacccatattgcggcaggacggcgcgcagaaactctactacatccgcgacgtcaacattcacggcgtgcagtacctcaaccccgacattctcaagtcttcggccgggctgatccccggcgattcgatttacctgccgagcaacttcatcgcaaacgccatctcgcgtctgtggagccagcggtttttctcggacgtgaagatcggagccgagatcgagggcgacagcctcgatctggaggtgttcctcaaagagcggccgcgcgtcaacaactgggacttcgaaggcatctcgaagggcaagaagaaagacctgctcgaaaagctcaagctcaaacgcggcagcgagctttcggattacgtcatcgacaagaaccagaaactcatcaaggcctactggtccgagaagggcttccgcaacacggaggtctcgacgcgcatcaccaacgacacgctgcgcccgcagatggtcaacgtaaccttcctgatcgaccgcaaacacaaagtcaagatcggcaagatcaacttcacgggcaacgagcagttcaaggacaagcgcctgcgccggaccttcaagaagacgcaccagaagagcatcaacttcttccgcggcaccaaactcaacgagagcgactacgagaacgacaaggacctgctgatcgacttctacaactcgaaaggctaccgcaacgccacgatcgtcagcgactcgatctatccgatcagcgacaagcggctggccatcgacctcgacatttcggaaggcaacaaatactacatccgcaacgtgtcgtgggtcggcaactcggtgtacgaaaccgacgacctgcagcgcatgttcggcgtcaacaagggcgacacgtacgacaagaagtcgatgcacaagcgtctgggcatcggcaaggagaccgatcccgaagcaatgtccgtatcgtcgctctaccagaacaagggctacctgatgtcgcagatcgaacccgccgaaaccatcatcggcgccgactcgatcgacatcgaggtcaaggtattcgaaggcaagcagttcaccatcaacgaagtcggcatcacgggcaaccagcgcgtggacgacgaggtgatacgccgcgagctttacacccgtccgggcgagctttacgaccgctcgctgctcatgcagaccatccgcacgctcggctcgctgggccacttcaaccccgaagcgatcatgcccgacatcaaacccgtttcgaacgagctggtgaacgtcaactggccgctcgaagagcaggcctccgaccagttcaacatcgccggcggctggggttcgggaacgttcgtcggatcggtgggcatcacgctcaacaacctttcgatcaagaacttcttcaagaagggcgcatggcgcccctacccgatgggccagaaccagcggctgtcgctgtcggcgcagaccaacggcacctactacaaggcgttcgccctgagtttcaccgacccgtggctgggcggcaagaagcccaattcgttcaccatatcggcccacttctccgagcagaacaacgcctattacgtatggcagaagagtacgcagtacttccgtacgtacggtctggcggcaggtctgggcaagcgtctcaactggcccgacccctacttcacgctttacggcgaggcgagctacgaacgcttctcgctcaaaaactggaatacgttcggcatgaccaacggcgccgccaacctgctctcgctcaaattcgtcttcgcacgcaactcggtggaccagccgatctatccgcgccgcggttcggagttcagcgcatcggtgcagttcacgcccccctactcgctctgggacggcaaagactacaagaagctggcggagcttgccaacagcacggacagcaaggtggcggacaaagccaatcaggaacgttaccgctgggtcgagttccacaagtggcagttcaaggcgcaatggttccaagcgctgaccaagaactcgaatctcgtgctgatgctcaaggccgaaatgggttacctcggcaactacaacaaatataaggtttcgcctttcgaacgcttcgaagtcggcggcgacggcatgtcgggatacaacatctacggtatcgacatcatctcgatgcgcggttacgaagacggcgccctcgatcctacgaacgactattcggtggcatacaacaaatacaccgccgagatccgctaccccgtcatcctgaaaccttcgtcgcagatctatgtgctgggattcctcgaaggcggtaacgcattcgattcgtggaagaagttctcgcccttcaagatcaagcgttcggccggtttcggcgtacgtctctatctgcctgtggtgggtatgctgggtatcgactggggttacggcttcgactcgccggcaggtcagagcggcaagagcggaagccagttccacttcgtaatgggccagcagttctaaccggcgcacgattccgcggacaatccccatgtattcgaatctccctttgaaaaggagaacccggaattccggcggagggcgtttgcaaaaaaagagaggctggcaataaatttgaaagaaaatagttatatttatggtatggttccgggaaaccggctgaatattaacttaaaaacataagattatgaaacgtctgattttaatcgcggcattcattctcacggccggcacgctggcagcgcagaattacataatcgtcaacagcgaaaaggttttcaaatccgtcgcggcctacaacaaggcgatctccgatctggatgaactcgccaagcaatatcaggaacaggtggacgccaaattcgccgaagtggaggcgctttacaacgcctatatgaatcagaaggcttcgctctcggcgacaacccgccagacccgcgaaaacgccattctcgcccgcgaaaaagaggcgcagacctttcaggagagcctcttcggcaacgacggcgcgctgatgaaaaagcggatcgaaatgatcgagccgatccagaagaaggtcttcgcggccatcgaagcctacgccaagcaggccggcgccgacgtggtgctcgactcggcgaacaatcccacgctgctctatacgaatcccagtgtggagcgcacgcagcagttgatcgacatgctgaagaagtagaaacatcaaacaattaactaataatcttttatgaaaaaagcaatcaaactaacccttgcggttgtattcgtgatgggcgcgacatcgctcttcgcacaacagaaattcggacgcatcaacactcaggagatcatcgtgggtatgcccgaaacgaaggagatgcagaccaacatggaggcttatgccaaggatcttcaggacaatctggagtccatgaccgtcgaatacaaccagaaactgcaggagttccagaagaatttcaacaccctttcggagtcggtacgccagctcaaggagaacgatctcaacgccctgattcagcgccgcaacgagttcgagcaggccgctcagcaggacttccagaagcgtcagaacgagctgctggccccgattatcgagaaggccaagaacgcgatcgacaaagtggctgccgcaggcggctatctggccgtattcgacacttcgacgggttcgctcgcctatttcgacgaggcttccctcaccgacatagcccccgcagtgaagaaagaactcggcatcacggacgctcccgccgctgcggctgcccccgaagccaagaaatagagtcgctccgggaatatcccgatatgaaaaaggcgccggcgattccggcgcctttttcatgcccttccccaagcggcgatcaaaagagacacaaagctgttcatttcgttcgaagataaaactatatgaactgaatatgagtttttatcgctatatttcatccaaaatccagagacgaaatgaacaatacagagagccaaacaccgatcaactcatttacgctggccgagcttatagatttggccggcgaacaacgacagggactgatgcgcgaatgcattacggccagcagcgactcccagatgcaggtcttccggttcccgtgccgcatcgacgccttcataatcggcgtcggcaccgaaggggagacctccgtatcgttcaacctacatgaattcaaactgaagaaagattcgatcttcatcttcacgcccaaaaacgtcctgcaggtaaactcgcagcagtacttcaaagccgacgtcatcgccatatcgcccgacttcatgcgccgcatcaacatcgacatcaaaaacatgatgccgctgttcctcaaattcgtcgaaaaccccgcactgacgctgacgcccgaagagagccgctccatgcgcggcatgatcgcccagatcgaacgcgaaacccgcgggccggagacccatttctcgttcgacatcgtcagcggactgatcgccgcaacgatttacaaggtcggggatatcatgtaccactacctcgcggagcatcctgaagggcagaacaattcgcacaaccgcgccgaagagtatttcaagcaattcacccacctgctgggcgaacacttccgcgaagagcgcagcgtcggattctacgcccgccagctctgcatcacgcccaagtacctcaccacgctcatcaagcgcatcagcggacagtcggtttcggagtggatcgacaactatgtgattctggaggccaaaaccctgctcaaatactcgacgatgagcatacaggagatcgcctactacctgaacttcccgaaccagtcgttcttcggcagctacttcaagcgcaacacgggcatgtcgccctcgcagtacaaggcgcagaactgacaagggccagcatccggcggaacacgtccggcacaatacgcatccgatagagcatatccggcaatacgcatccggcggagcatacccggcggggcatgtcggggcggggcatgtcggggcggggcatgtttgacaatgcatatccgacagtatgcacacccgcctgcatacgaaaccccggccgcagcactgcgccggggtttgtcgtcgcgaagccgcgtcagaagggatatccgacgccgaagttgagcgcggtattcttccagcgcaggttgtgaatccaccgttcgcccgccggattgttgggattgtggagctgcacgccccagtcgagccggagcacggcgaacttgatgtcgaaacgcagacccagtccggtgttgaatcccagctgcttataaaacttgtcgaaaaagaagacggcgtcgtcggagtactccgaaggattccgccggatataccagatattgcccagatcgaagaaagtcgcgccgtgtaccatgccccagatcggaaagcgcagttcgaggttggcctccagcttgacgtcgcccgtctgtatcgggaaagagtcgtgcggattgggcaccgacccctgaccgagcgtgcggggcgtccagccgcgcatgccgttgctgccgccggcatagaactgccggtcgaagggcacggccgacgagttgccgtaggccatcgccacgccgccgtagagaccccccacgagagccgacacctcgccaagcattatcttgcggctgacactcaggtccgtacggaaatactgcgaatattcgatgccgaagattttggcagactcgccctccttcggccgcgcatagaacagccggtccaccgcgtcgatcaggttgcccgccgtctccagattgaagcggatattggtggcgttgccgcccagattcttacgctggttgttatagctgtagccgaacgaaagtccgccgataaactgggtgcggaaactgtttttcaggtatttattcgtcgtcttgccgaggaaggtcgagtccagccgattcacatcgaccacattgatatcgacgggccgcagcgagaacgaagagtaacggttgttggtccactggtaggtgattcccgcactcgaaagcgtacgccgataataggggcggtcctgaaaattgaccgaaagctccaccttggtctttggctggttcaccgaacggaaccgccgcgtacgccacggcaccagaaaacgcgggaaggtgagtccggtggtaacgccgaattccgtggcgcgctttttcttggcgtcgggcgccttcataaactcgtatcccgccgtaaacgaaacgtccagcgcctccgctccccggaagatgttgcggttctggtaaccgacggtagccttcagcccgtagaaactcgacgtcgtactgccttcgagatcgaccttgaaactctgcttgagcgccggggtgcataaaatattgcactccagatagccctccttcgtaaagcgggtctgcgtggaatccgccgaggcgccgatgaaggagacgtaattggtgacatcgacgctccggggctgctcgacgaaggcgatcttggcgctcttgaaatagccgagcgacatcaggtcggtataggcgcggttcacctgcgccgagttatagacgtagttgggatagagcggcaccgactgacgcagaatggccggacgcaggttcggacgcttctcatagatgatgttcagaccgcggtaatagagcgtatcgagccgcgaaagaaaggtcgaatcggtccgcgcgacggtcggatcgtacgccggaaagacgttgatccggtcgatgcggtagaccatgttgttgtccatcacggcctgtccgcgttcgttgtaacccgtaagatactgcttgatattgacctgcacatcgacctgatggtttccgccgagcgtgtcggcgacatagtcgatgttgttgaccgtaaagttgtaatagccgcgctccttgaggaaagccgtgacgcgctcccgctcgcggtcgagcaccgcgatgtcgaaaacccggcccggacggatcagcgtattggcggtgtcgggcaggatgatctgttcgaggaacttgtcctgaaaatcgtacgaaatgctgtcaatgcggtaaggctcgccctgccgggtgcggtagacgaccttggcgcgcctgcggcgcgaggtggtatcgacttcgaacgtcgcttgggaagagaagaacccgcgcgtgtccatatagaccttcaggttctgcgcgctccgctcggtcaggctcatgtcgagcagcacgggttcctgaccgatcttgcgtttccagttgttccaccagttctgcttgcccggattggcctgctcgtagagccagacataaaaattcgtccccagaaaacgcttgttgggggtctggcgcacgtatttttcgaggtcggcagccgtgatgcgctctttgcggggcgtcgatttgtcggactcgatcgtcaccttctgcagcaggtactgcccttcgggaatcttgcgcgtaacgctgcacgcggagcacaaaaagcccagcacggcgacagctaatatacgactcaagccccgcacgcccccgatcagttgttaaagaaccccttctctttcagcagagcgaagtaggaattcgagatggagaggttgtcctcgcgcacataacggcgctgcgtgaaaatctgcgccagattaggcagcccgttttcctccagcagacgcttggtcagctccgactcttcgcgctcggcccacaattcgtcgatctcggcggccgtatagtcggtgtatttctcgtaatgcacgacggcttccagcggcagacggtcggtcagttcgggcgattcgtcgggatagcccagcacgatggtcgtcacgggaatcacccccttcggaagttcgaggatctcggcgatcatcccggccgtatagatcgtcgtaccgaggtagcagatgcccagcccgttcatttcggcctcgacgcagaggttctgggccgccagcagggcgtccgtcgaagcgttcaggaaccatgcgaagttgtcgtatgcgggatcggcgtcgcgctgctcgcaccacatcgagaagcggtgcacgtcggcgcagaccgtcaccacgcagggcgcctgcgtcaccatcggctggttgaaatggcacggagcgagtttcgcgcgcagggccgcatcgcgcgtcacgaccagcgaatagagctgcatgttgccgcaggtcgaagcccgcgaagccgctgccagtatctcctgcagcagctcttcgggaatgggtgtggaacagaatttacgtatcgaacgatgcttgaaaagcacacttttcatggattttttcttttatcggttctgtataaaaacaatacaagcgtccgccggtccgggcgaatgcgcttattttccacaaaaatagtaaaacttttagaagttttattatttttgcgatgatataaccactatccggaatgctggtatcattcgtaaaatacgagggcgcaggcaacgatttcatcctcatcgacgaccgtgaagagctgttcagcgccgacgcacggctgatcgcggccttgtgcgaccgccacttcggcatcggagccgacgggctgatgaccctgcggcgcagcgtcgagatggactgctcgatgcgctactacaacgccgacggttcgccgggcgaaatgtgcggcaacggcgcacggtgtttcgcgcttttcgccgagcatctgggcatcggcggcgaaaccaagtatttcgacgccacggacggcatgcacaccgcacgcatacgccgcacgaagaaccggacgggcgagatcgagctgggcatgataaatgtatcggaaatccgcagcggcggaggctggtggtttctcaatacgggcgttccccactatgtggaattcacggaggagctggacggcgtggacgtaaagggtctgggacggatgatccgtcacgacacggcgcgttttccgcagggtacgaacgtcaatttcgcagagatcgcaggcgagggcgaaatccggatgcggacctacgaacggggcgtcgaaaacgaaacgctggcctgcggcacgggagccacggccgcggcgatcataaccaattacgctttgcagcacgaaacgaccaaataccgaatcacggtgcccggaggcgaactgcacgtacgcttctcgcatgaacccggcacgcagacctatacggatatccggcttacgggccgcgcgcgacgcgtcttcaaaggggtattcgaaaccgacaatttctaaaccactcatcttttcccatccatgaaaacacaaaagggaattcgcgaacatgaagcggacgaacttcggaaagccaaacgtctcgaaccgatgcgcaaaagcggcaaggagcgccattcgctctaccgttcgatcgacgaagaggaggaggaagaactcatgccccggcgcgaatccgtactcgactacctcgacgatcaggacgaggagtaacccctgtaatcatgactgaaaaatttattatggccggctccacggccctgcacgtctgcgactcgcaggccggagacaaatgcgtcgtgctgctgcacggctatctcgaatcgctgctcgtctgggaggatttcgtaccttatctatataaggaggtgcgcgtggtgacgctcgatctgccgggccacggcatttcggtggtgacgggcgcggtccacacgatggattttctggccgacacggtcgccgacgcgctcaaggccctcggcatcggacgctgcacgctcgtaggacattcgatgggcggatacgtggcgctggctttctgcgaacgccatcccgaaatgctcgacggcgtggtgctgctcagctccacgcccaatcccgacacgccggagaaggccgaaaaccgccgccgggagatcgcgctcgtcgaggccgggaagaaagagatgctggcacgggtagctcccgccgcaggatttgccgaagagaaccgcgcccgcatgcgggacgaaatcgaagaccttaccgagcaggttttcgtcaccgaagacgagggaatcatagccctgctgggcggcatgatcgcccgcagggaccagaacgaaatgctgcgcacgtcgaaggtcccgcagctctttatcctcggccggaaagacggttacataccgcccgaagccgccgaaaagatggttgcggaacacccgcaggcgcaggtcgtatggctggaaaattcgggacacatgggattcctcgaagagccggaagcggcggctcaggcgatactggatttcgtccacgatgaaaaaatcggatagcgcgaaaaaactgttcgggcgataatctctccggggttcttcagccggcgcgattcgatcctattcccggaacagaccaaactgatcccgccgcgcctcatcggctgcggcaggatataaaacctttgaacgatgaacgaagagatgcgattctgtcagagctgcggcatgccgatgcaggcggctggcgacttcggcacggaagccgatggcagcgcgagcgcggactactgcgtctattgctacaaaaacggcgcctttaccgaagcgtgcacgatggaagagatgatccggcactgcgccgggtttcacgaagaattccgcgacgagaacggcaaaagctatacccgtgaagaggctgtcaggctgatgcgggagtattttccgacgctcaagcgctggagcaaataacggaacgggccggaaattccggtccgtttttgtatccgcagcagaattgcgctatatttgtcccgaaaaaaaccacaaacgctaattaaaacataattgaaatgaaaaaacttttctttatgggctttgccctgcttctgtgcgccatgtggcccgccgacgccgcagcccagctgaaaatcggcggcaggaaactcaacaccgggaaactgctcgaagcgggaaaggacgtggccaaagccgtgacattgagcgacaaggacattgccgacctgagccgcgaagcggtcgaatggatggatgccaacaaccccatcgccgacgaaacgaccgaatacggcgcacgtctcaagcggctgaccgagggaatcaccgagatcaacggactgccgctcaacttcaaggtctaccatgtcgtggacgtcaatgccttcgcctgcggcgacggttcgatccgcgtattcagcgccctgatggacctgatggacgacgacgaactgatggcgatcatcggtcatgaaatcggccatgtggtacatgccgacgtaaaacacgcgatgaaaaacgcctacctctcatcggcggcgcgcaatgcggcaggagccgccgagggcagcacgctggccaagctgagcgactcgcagctcggcgaggtcgtcacggcattcaccggcgcccagttctcgcagaagcaggaatacgcagccgacgaatacggattcgaattctccgtaaagaacggtttcagcccctacggcatgggcaattcgctgaacaagctggtcgagctttccaagggagcgaagtcctcgacggtacagaaaatgttctcttcgcatcctgacagcgaaaaacgcgctgcgcgcatgaaagagaaagccgatgcctacacggccgcacaacagcagtagatcgtcaagccgcagcggagtccccgcgttcaacggccgagaaatccggcaacgaccatattcggaataaaatcgactgtccggaataaaacccgcagcagcagtacgccagccttcgcatcggcaccttatacaacagaaaagccgccccttttagggcggcttttttgcatatcccgctattttatcagcggctgacagacaggacaataatagacggctccgcccagataagcctccttgacaatcgcaccgccgcagcccggacaaggctccgcgaaggtatttttagagagcagggtcttgtagccgccggactggcccagcaaatctttctccgtatcgcgtccgccgcgatccgccatatccctcagggtcgatttcaccgatgaatacatccgccccagttctgcatcacccagcgtcgccagcctgcgcttggggtgaatatgcgacttgaacaagatatcctgcaaaacaccgtttccgagtccggggatacgctgttccgtcgccaagaacgcctttgccgacaaattggacttggcatcggagataagccggccgaaacaggcttcatcgaaagtgtcgtccagcggagagggcttcgagagtgcgccgagataatacggattgtcgaagtgcttccggaatgcgatgatcccgccgtacatggcgaccgtaaaaaccagaaaactatcgtcgtcgaaagcgatcagaagctgatatttcggcggaacctccgctccgggcgcatgataacgcagattgacgccgtcggaaagagcgatatgcgtctcatcgtccagaagcaggtcgatgaatgctccgtgcccttcggcggcacgaaccgttttaccgacgagtcgtgcccggtaatcggccggatctcccaagtaccaagtaaatttgtggggatgggtggcattgaatacatccgtgaccgtgcggccggagagcatatcggcagcttgccgtgcaaacgagtaagattcgggaatttcgagcattttttcaatttcaggtgttgcagcaaagataatcaaatttccatacgatgccggtgctcggcccccatttcggcaattccgattttttatatatatttgcggagacgaatattaaataccgctgcctatgaattaacaacagaagacctccaattcagattattacgccctcgcattcaaaaataacagggcacacatataaaaagcgttagctttataccttgcttttcgaaacttaggaactttctgaagtagtacgaggaatgaagtttgacgctcacgtttccaacgtgggcttcattctatatttgtactacacggtttcctaagacctcgaaaagcagatatacgagttttgtcccacgttttttatgctacaatcccacttacatacgccgagggaccggctgactgatattatgaatagctatctactgctaatctgcatcagtttcgtccctgccacagtcagtatttgcgccacactgccgctctggttctcgaaacacatgcagaacagaatcatccgcttgtccggactggccctactttctctgataatggcaggcgggttgctccttgcatttgcctgccaagacccttggttcggattgtcctgcatcgcggtaagcagcatgaatatccccctgttcagacactatgaattgtta

SEQ ID NO: 12082 - DNA, 2009 bp, Unknown
  gut microbiota DNA sequence
ttcttgacctcttcggctacggtcttgccgttgtaaccgaacttctcgtcgagaaccgtatagggagccgaatagccgaagtgatccagaccgtggatcatacctttctcgcccacaagacccatgaggttcaccggaagtcccgacgtcaggccgtagcgcaccacgcccaccggaagcacgctctcctgatacgaacggggctggtcgcggaaaagaccctcgctcggtacgttcaccacacgtacggcgataccctcggcggcaagcaggctggcaccctccacgagcgtcgagacctccgagccggtggcgaccatcacaacttcgggcttggccgaatcaagcaccacgtaaccgcccttggcgacctgagaggcctcctcgcggcggctggcgcccagcgccggaaggctcttgatgttctgacgcgacagcaccagcgcaacgggacgctgctcctcgacggccagcttccacgccatgacggtttcatcgccgtcggccgggcgcagcacgaccatcgaacgttcgtcgtggtggtttcggaggtgttccatcaggcggatctgggcttcatgctcgatcggctggtgcgtaggaccgtcctcgccaacgcggaacgagtcgtgcgtccagatatagatcacatgcaggcgcatcagcgccgagagacgcactgccggtttcatgtagtccgagaagacgaagaacgtgccgcacgcaggaatcacacccccgtgcagcgccatgccgttggccacgcaggccatcgtcagctccgagactcccgcctgaaagaatttgccgctgaagtcgcccttcgtgaaggccttggtcttcttgaggaagccgtccgtcttgtccgagttcgaaaggtccgcagaagccacgatcatgttctcgatcttttcggcgaagacgcccagcacggcagccgatgccgcgcgcgtcgccacgccggccttcacctcgatcgacttgtagtcgatttcgggcacgcgccccgaaaggaacatatccagtttgcgggctagatcgccgtgttcggcgcgccacgtcttctcgacctccgcctgacgcgcggcccatgcgcgaagcgcttcgcggcgctcggagaaggcttcgaggctctcggagaaaacggcgaacggatcgttcggatccccgcccagattcttcaccgtggcggcgaagtcggcaccggccgccgtgagcggctgcccgtgggtcgaaaccttgtcttcgaagctctcgccggaaggacctttggcgcccttgcccatgaccgtgcggccgatgataagcgtaggacgctccgtttcggagttcgcggcaacgagtgcctcgcggatttcgttgatgttgtgtccgtccactgacagcacgttccacccccacgcctcgtacttcatggccacgttctcggtcatgacctcgtcgaccttcgtagaaagctggatgttgttcgagtcgtagtacatgatgaagttgctcagacccagatggccggcgatacggcccacgccctgcgaaatctcctcctccacggcgccgtccgagatgtaggcgtaggtcttgtgcgccatccactcgccgaagcgggcagccatgaagcgttccgcgatagcggcgcccagcgccatggcatgaccctgtccgagagggccggaagtgttctcgacaccgcgcgcgaagtctgcttccgggtgacccggcgtcacgctgccccactgacgcagagactgaaggtcttcggtcgtatagtatccggcaagagaaagcgtagaatagagcatcggagacatgtggcccggatcgaggaagaaacgatctcggtaggggtaagacgtattgtccggatcgtagcgcagaaattcggtatagagcaccgtcatgaagtcggcgccgcccatcgagccgccgggatggcccgatttcgccttctcgaccatagaggccgacaaaattcggatattgtccgctacacgcgttagtttggaattggt

SEQ ID NO: 12083 - DNA, 82316 bp, Unknown
  gut microbiota DNA sequence
cctctgagatattcgaataaactaatttcgcatgaaaaagaggctgtctaaaacttgttagacagcctctttttcatacagcggtcatcaaaaggctgccggtcaaaaagcctcccggtaaagcgccagaatctcttcggcactcgtatcgcgcggatttccgggcgtgcagacgtcggccagcgccgatgcggccagccgcggcagatcctcctcacgaacgccgagcgacgagagccgctgcggaatacctacacggacagccagcgtccggacggcatcgacggcggcctgagccgcctgccgggtgtccatgcccgccgtatcgacgcccatggcgcgagccacatcgccgaacttgaccagcgacgactccatgttgtattgcatcacataaggcagcagcagtgcattggccacgccgtggggaatatcgtaaaatgcacccagcgggtgcgccatgccgtgtaccagtcccagccccacattcgaaaagcccatgccggcgatatactgcgccacggccatcccctcgcgggcctcggtgtcggcgccgttctccacggcggcgggaagccagcgggcgatcaactcgacggccttcagttcgaacatgtcggtcagcgtccacgcgcctttggtgatataaccttcgatggcgtgcgtgagcgcatccatacccgtagcggcggtcagtcccctaggcatggcggccatcagctcggcatcgataatagcgacagcaggaatatccttgggatcgacgcacaccatcttcttggtattcgcttcgtcggtgatgacataattgatcgtcacctcggcagccgtgcccgccgtcgtcgggagcgcgaagacaggaacactgcggttggcggtcggcgccgtgccttcgagcgagaccacgtcaccgaacgcggggttggcggcgatgatgccgacggccttggccgtgtccatcgccgaaccgccgccgatggcgacgatcgcatcggcgcccgaacggcagaaagcttcgaccccggcctgcacattcttcaccgtcggattcggcttcagatcgctgaagatttcataggcgatacccgcttcgtccagtacgccggtcaccttgcccgccacgccgaagcggatcagatccttgtccgtaacgacaaacgcccggacatagccgcgcccccggaattcatcggccagcatacggcgcgccccggcgccgaaataggaggtctcgttgagaatgattctgttcacagccataatccgtccggtttaaaggttgaaagcctccttgagttgctgcatctgggcgtcgctcatgcctgcgggcgtgaatcccatcgcacggcccgacatgtagatctgcgccgacttggagagcgtgtcgatcatgtcgaacggctcgatgacgttttctcccacgcccagcgcgccgtgcttctcccacaacaccacgtcatagtcgtcgagctgcgcgatggtcgcatcggccagttcgatcgaaccgggcagcgcatagggcacgatgccgacgcccttgggacagaacgcgcgggtttcggggatcatgctccagaggagcctgctcaatacgtcccgccccagaaacgctgcattgtgggtcatcgccaccagttcgatgggatgggtgtggatcacaaccttctggttgcggcccctgccgagcagatagtcgtggatcgagagatgtgagggcagttccgaggtgggtgaaatatatttttcagctacgatcgcatagctgcggccgtcgtcggagatgcggatgaccgccatgttgtccatcggcgaggagcagacgtaccgcatgcggcggttggtgcccgtcaccagaaagaagtggccgcacaggttttcgaccggacgggccagcgcaacgggttcgcccagcggcggcagggcgcggagcgcgtcgtccgccacgtcggtaacgttataggagatattgccgccgttgcgctcggcccagcctttctgccagaggtatccggccacttcggccacctcggcgatgcgttctgttaattgtcggttgtatttcatggattgcagattttaaaacaacgaggggaaaaagatggaaaacaaaagaatcgcaagtcccagcacgagcatcgagaccgcctgtgcgccgctgcccttccactctttgagggcgatgccccagaagttggagaagagcacgttgagcgacatcaggatgctccacgagaaggccagcaggacaggcgtgccggagagaaagctccttcccatttcgagtccgaagaactgcgagtaccacaatccgccggccagcgcacagaagagcaggttcacggtcagccgacggcctttcaccgccatgtattcaccgcccgtacggttcttgcggttctcgcgcaggcagtaggccgcattggtcaggaatccgccgaaggtaaccagcaggatcacgggcagtccggcgacgagcgcatcggcgcccgcggtctgcatagcggcgcggaccggcgctccggcgtcgagtcccagcgcgaagcaggcgctcatcacgcccgccaacaaggcgaccagcagacctttggtcagggcaaagtcgcggacggcggcccgcttctgctcctcgctcatattgcgcgcccgcagcgaacccgcatagccgatcacggcgataccggccagcgtgacgcacacccccagcagcaacagcagtccatcaccgtgcagcaggtcccctccggcaaaaagtgcgggcaggagcgtgccgaacgccgagcaggtccccagcgagaccgactgtccgagcgccacgcccagataacgcatcgacagaccgaacgtcaggcccccgacgccccacaaggcgccgtagacgatcgccttcagcgcgccgccggctcccagcagtgcgaaaagagaatttccggaaggcacggcggccagcgcacccgccaaggggaacaccaaccatgcgaagataccctgcaccaaccagaaactctcccagctccactgcttcaccctgcggataggcacataggaactggactggccgaagctgccgacagcgatgatcaacaggccgagaaaagtattcatggccggttagcgtttcaaggtgacttcacgctcgtacttctccacgtcggcgatatagtcctcgcccgcgggaacgccgttctgcatgcagaaatagttgtaaacatcggcccacggcatcgacttgctctcctccagaagtgccagacgctcgaaatagcggcctccggcttcatatccgcgcagtttttcgatcggcgtgagcatcgccagcaggaacgccttctgggtcgcacggctgccgatgacataagcgccgatacggttgatcgaagcgtcgaagtagtcaagtccgacattcacacggtcgagcgccccggcccagacgatctcctgcgccagcatctgcacgctgtcgttgaaaatcaccacatggtcgctgtcccagcgcaccggacggctgacatggagcaggatttcgggagagaagagcagcatcgacgaaattttgtcggagacctcctccgtgggatgaaaatggcccatgtcgagcgtcgccatcagtccgcggctgacggcataccccatgtaaaactcgtgcgaaccgaccgtgaaactttcgaggcccgtgccgaagagtttgcactcgacggcatctttcacattggggcacttgtgctcgaacacgcggtcgagcgactccctgagcagcgaacggtaatagtaacggttcaccgtcaggtccttggaaccgtcgtgcacccagatgttgtggcaggccttgctgcccagctgacggcccatttcgtcggcgatgcggcggctgcgcacggtatgctcgacccagaaatcgcggacggccttgtcgggattggccagcgaaagatcgccgctcttggggtgcgagaacgaagtcgagttgaagtcgagcttcatgtcgttagcgcgcgcccagtcgatccaactctggaaatgttcgggttcgatctggtcacggtccacctttttgcccttgaaatcgccgtatatggcatgcaggctcagccggtggcggccgggaatcaggcttttggccttttcgatgtcggcacgcacctcgtcgatgttgcgggccttgccgggatagttgccggtggcctgaatgccgcccgtaagctggccgtcggggttctcgaaacccgtcacgtcgtcggtctgccagcagtgcagcgacagcgaaatccgctgcagggcggcgagcgccgcgtcggtgtccacgcccgtttcggcataacgcgccttggccgcttcgtaagctttgataatttgatcctgtttcatggtgtctatctttttttcgattatgagattaattgaactttttatccctgccggcaaccactcccgcaagcagggtttcgaatctttcataggcagcgttccacatctgcgcgtttccgggcagaaaggtttcagtcggcacgcagcgggcgatcatgcggcgcatttcagccagcgacgaaacccgccccgcagcgtacgcctgcatcatgacattgccgatggccgtcgcctcggcgggtcccgccacgacgggaatgccggtcgaatcggcagtgaactggttcagaagcgcgttcttcgacccgccgccgatgacgtggagtttttcgatggggaagggcgccagcgcccggaaatcgtcgagcaccatgcggtatttaagggccagactctcgaaaatcgcgcgcacggtctccccgtgggtacggggcggagtctgccccgtccgggtacagaatgcggcgatagccgccggcatgcagcccggacgggcgaacgattcgtcgtctgggtcgatcaaaatccggaagggaggcgccgagtgcgccatctccaccagttcggaataggcgtattcccggccttcgcgcgcccagactttgagacactcctccagcagccacatgccggtaatgtttttcagcaggcgcgtggtgccctcgacaccgccttcgttggtgatgttgcaggccgacgtgcggtcgtcgatgacaggctcgcgcacctcgatccccatcagcgaccaagtgccggaactcaggtaggcgaaccgctcgttccgggcaggaacggccgcaacggccgacgcggtgtcgtgcccggccacggctacgacgggaatccgcttcagccccacatcggccgccaaccgttcgtcaagcagaccgatacgatgtccgggcatcactacgtcgcaaaaaagcgacgggtcgatgtccatcttctccagcagttcggattcgatccttcgggtgcggggattcagcagctgcgacgtcgaagcgatcgtatattcggtaaccatactgcccgtaagcagatagctcagggcatcgggcatgaaaagcagcttcgcggcagcagcgagttgcgaagccccttttttgtgcaaagcatataactggtaaagcgaattgaacggcatgatctggatgccggtccgggcatatacctccctgcgggagagcactttggcgaaatactctgccggagcgccttcagtatggggatcccggtaggcatagggcattccgagcagcgaaccgtcgctgccgacgaatgcgaaatcgacaccccacgtatcgataccgaccgaggtgatctcgattccctcgcgcgccgcggccctcagcccttcgcaaagctgctcgtacagggaaaatatgttccaataaaagtggccgcccagcggcagtatccgattggggaagcgggtcagctcgcggatccgtagctctccgtcggagagcgttcccagaaccgtccggccgctcgtcgcgcccaagtcgaacgcaataaaatgctgcagactcattgtccaaatattacatttatacgatatttttcactatattgcagtctcgtcaacctaactttttccgcaatggataattccattcacctgaagtatctggccatcagccaaaccgacctgaaatggggcatgaccatcaactcggtgggtttccagaacatcgccgcccacatgtcctatccgccgaacaaccacccctcgcgctacttgttctcgaccgacaacgggcgtgtactcaacgagtatcagctgctctacatcacacggggaaggggacgattcgcatcccgcaccacgggctacggacgctaccagcccgtcggcgagggcaacatgttcctgctcttccccggcgagtggcacaactacatgccagaccgcgaaaccggatgggacgaattctggatcggattccaaggcagacacatcgactactggacggcaagcagtttctttacgcgcgaaaaaccgatctacaacgtaggcattcacaacgaaatcgtccagcactaccagcaggccatccgcgtcgccatcgaacagaagtcgggattccagcaggtactctcaggcatcgtcaattacctcttgggactggcctattcctacgacaagaactacgtcttcgaaacttccgaagtgatcgaccagatcggccgtgcaaagatcctgatcgctgatcagttcaaaaccatccgccccaagcagatcgccgaagagctgaacatgagctattcgaacttccggaagattttcaaggagtacaccggattcgccccggcgcagtacattcaggagatgaagctctccaaagccaaagaactactcacaaacagctccatgcccatcaaggagatcgcctatctgatgggattcgaaaaccacgaatacttcttcacggccttcaaaaagaagaacggagtgacgcccgccgattaccggcatctgacgcagggcaacgccctcatacaggaataaaaatcccgcagttgtcgggtcgcatgctttttaaaagaggtgccggtgattcttccggcacctcttcttttcaaccgttactgtccgtaaccgggattcggctcgataagcgggttgccgctgatcgcgtcgttgggaatcgggaataccttgaaatagggattattggtggccttgtgatcccaccagtcggcttccacgaacttgttccagcgcagcaggtcggtacggcggcggccttcgccgagaaactcgataccccactcgaccagcatgcgccattcgtcgaggttggcggcggtgcagggatcgggatcggcttcgttctcgaaattacgcttacgcacgtcgttgatcaaccgggcggcctcgcccttatcgccgtcacgccacttgcactcggccagcatatactgcacttcggccagacgcgccatcacaaaaccggctttccactggttgggatcgtcgtccggagcgatcgggtatttgataaggcgtacgccggtgttctcctcaccttcatacttggtcgaaggaacggcgtcgagcgacggataggtcgtgccgacaagcgacgtgcggccgacgtagtccaccagttcgagcggcttgccgtcatgcacgctgttctgcccggaaacgacgaccgacttgccgttcttggcgatcggaccgaacagaagcaggccttcgtaatcgccgttgccgttgtacttgtaacacctcttgcgcaggtcggcatcgttgaaacgggcgaaggtgcgtcccaatttgaaatcggcgtccgtataaagatcaccattaggcttgtgcgacggcatgatcgtaattccgttcatcgttccggcgcccttcaggccgaagaactggtccatcatgttgggctggtagaaccatgccgcataggtgttgttctgcagtttattcagggccgaaggcagtacccagatgttctcggcactgttgaggttgctgaacccgaacggttcacgccagtcggaggccatcgaatagttgccgtatttacctgacagtatctcgctgcagagggtttcgcactccgaatagtggtcctcattaatgtaggtctgggcgttgaaatagagccgggccagcagaacggccgccgcaccgcgattgatcgtgtagtcgatctccgtcgtctcgtccttcagcggcaatactttaagcgactctttgagcagtccttcgatatgcaggtaagtatccttggccgaactgcggggctggggatcgacgcccacggtaccttcgtaaatcggcatgccgccgtagaagtccagaccgcgcaggtagaagtaggcgatcagcgtcttcatctgggcgatgtgcccggcgcggtcgtcctcggtaaatccgactttggcgtagtcggccgccttgaggtcctcgatcacttcgagcgacagggcgacgcccgtggtaaccagactccacgcattgttgataaagggattcgaagtgccccagctatggtcttggaaacggaaccagtcgccgccggtccatttctgctccttctggatcaccgcgaactggtcggcgcaaagctcctgcagaaaccagaagccgacaccgtcgccgcgcatctccgaagcatagaggtgcgtaaacggacgccccatagccgaataaacatcattttttgtcttgaaaaaggtctcaggagtcacctcgctgtaccatacgggatcgaggtcggtacaggccgcgacgctcgccaaggcggtgagggccgcaatgctctttacaatatattttttcatagttttaactcgtctttagattagaaaccgatctcgatacccagaataaaggaacgcgtgcggggatattggctcataccctcgaaaccgggcgccagaccattgacgttcacttcgggatcgagacccgaataaccggtcagcgtacatacgttgcgcacggtgaagtagcagcgcagcttctcgacgtacttgatcttgttgcggggcagcgtgtaacccagcgtaacggcgtcgagcttcaggaagtcgcccttttcgagccaataatcgagcagcatcagacggtcggtattggtaatcgccttgttgcggcggtaagccgtacgcagcaggttctggccttcggtgatcttgcagttcacaccctgaatcatgtccgtcacgttgtaaacgtcctgtcccagccagctgcggaagaagagattgaggtcccagttgcggtaacgcaccgtgttgttccacgaaagcaccgccttcggaagaccgttgcccgtctgcacgcggtcctcgtcggtacccgaagcataggggatgaccttgttgtccttgctgtagatcatcggagttccatcctcctcacggacgccggcaaagcggtagaggaagtagcgtccgatctcctgaccgccgaagatgcgcacggccgaaccgccgccgtgaggcatcgcctgaaattccatatgggtatccttggccatgccttccagccgggatttgccgacgaacgaacctacgagcgacgtatcgaacgtccagtccttggtatccaccacacggccgttcagttcgaactcgaaacctttgttggtgatgtcgccgatattgaccgtcgaagtggcgtagacagccgggggagaagccacgggaataccgctgtagatggcgtcctcgatcttgcggctgaagtagtccatgcggccgttcaggcgacggttgaagagggagaagtccagacccacgtcgaactcttttttgatctcccatttcatgtcgcggttctggttgtgcatcaggccgtagacggtcatccactgaccgttgtaataggtccacgaatccttggaatacatacggtaggccgtattggtgttgaaaccctgattacccgtcgtaccgtagcttacgcgcagcttcaggtcgtccacggcccggacgttgcgcatgaatttctccgacgaaatgcgccagccggccgagatgccggggaaaagaccccagcggtcgctgtagaatttcgaagagccttcgtaacgcaggttcagcgtcacgaggtagcggtcgtcgaacgaatagttcacacggccgaagaaggcgatcaggcgggtcgtagggcttttgtaggaacccataccggctttgccgtccgagaggtaggttccggcgccgagatcccacggtcccagaccgtccacctgaaagtcggagttgctggccgagaagttgtcgccgttgaactcttggaacgaataaccgagcacggcattgaggttgtgacggccgaaacggcggtcgtaattggtcgtcagatcgagcatcttgtccatcgcttgtgagaaactgtgcgaagccgtgccgttgtaatggttttcgagcgactcgcggtgcagcttcgaaacgaaattctccgacttggtcttcacatgtttgtaggcggtctgtgccgtcaccgaccaatggtccgtgaggttgagtttgagcgaaacgttggccagcatcaggctcgacgaattcgaattgtcgcgcagattcacttcggccacgggattcttgaaatagggctggttcaggatcatatagtagcccgattcgctggcaggatcgtaaatcggataggtcgggttcaggctcgatgcccattcgaaaatgccgttatcgacgttggtccaattgacattggtatagttgatcgtcgcggaaagctccagacgatcgttcaggaatttgaaataggaactcaggcggccgccgatctcctgacggtcgttcttgatcgcgacgccctccgcatcgcgtacgtaaccgctggcgctcacgcggaacttgtccgtaccgccgttggccgaaagggcgtagcgctggctgaaaggcgaggacttggtcacggcgtcataccagtcggtcgaaccaccgaagtcatagacgttattgacgcccgtacgtccgtattcgcgaaattcggaagccgagagcaaatcgggcttcttggcgatcgactccaactgaagctcggtcgaaaaattgaccgaaatgcggcctgcctgcggacgtttggtcgtaatcagcacgacgccgcccgtagcgcgggtgccgtagatagccgctgccgacgcatccttcaataccgtgatcgactcgatgtcctctttggccaccagatcgatctctgcgcccggtacaccgtcgatcaccaccagcggtccctgatcgccgctcaccgaatttacgccgcgcagctggagcgaagcacctgagttggggtcggaaccattggtggactgaatcgaaagaccggggatcttgccctgaatagccatcagaggcgaactggtgccggctataaagtcgtcctgcgtgattttcgaaaccgagttggtcagcgaccgcttgtcgatcgtaccgtaaccaaccactaccacggcgtcgaggttgttgctcggttcgagcgaaatctcgaaagaggtccggttgccgaccggcagcgtttgggtgacgtaacccacatagctgacctgaagttcggctccgggcttcacctcgacggcgaaagtgccgtcggcgccggtcgaagcgccgttggtcgtacctttctcgacgacattgacgccgatcatcggctcgcccgcctcgttgaggaccgtaccggtcacactgatcttgggctgggccgcacacacgcaaaccgaggagaccgaaaagccggccagcaggagcaggaacagcacgttccgcttcaggcatgcgccgaaccggtcgagtcccgatttcgcatagaagttcatgacaatattcttcatttgttcatggattaggttaataaacagattgtatgatttggttttttgtcgggtggatcgctcctgtcattttcaataatgacctgtcaggaaaaagatacggagccggggaaattccttatctcatagagcaggaagttttaggttaataatcggattagattctgtcagttttaagttttaaacaaaattagagaggatttacaggagttttattaatcattttgatagaaaaatttgaaaaaatgacacgatagcaattttaggcaatccgcgcaatccagcaggctggaaacgatcgccgtatatactataggagcgtcggaaagcggttcatttgaaatgtcatttttttcaatccttatatcaaaaagtttaatttatgagcaaaaacatctccctacttttgtattaaccgaaacaaaacgcccactgcctcgccgcggcattggcaaccagaacgacaacctaaaacccgaatccgaaaactatgcaacgactggctttcaagatgaagctcaaacccggctgtgaggcggaatacgaaaaacgacacgcccgtctctggcccgaaatgaagctgctgctcaaagagggcggcatcggcaactactcgattttttacgatcccgacaccctctcactgttcgcctatcaggagatcggcggcgaaggttcctcgcacgagatgggcggcgaagccgtcgtccgcaaatggtgggactacatgagcgacatcatggaggtcaatgcggacaattcgcccgtctccgtccccctgcggcaggttttcttcctcgaataaccgccgcaccgacatccgatacaaatatgaaaacctataaaaaactaaaactatgagaacacgcttccttctgtttttatctctcctcccgctgctcctgctctcttcgtgcgacgagaaggacggccctacgatcattccgcccaaggaaaagcccgcctattacgacgtgacgatccgcgcgaccgaccatcaggcctgcaaggagatcaccccgcaggccgacggctcctacttcgtggactggaccgacggtttcgacgccttcttcttcatggacatccagctcgacgaggacgacaaggcagccggcgcggaattcaacctttacaacgtattggaattcgaagtcaaaggcgccacggtagtggaaaacaccccgctgatcatcttcctcggaagcaccgcatggcccaacttctgctccgactgcaagaacttcattcccatatcgaccgactgggtgaaggtgacttgcaactttatggaggacgtacccaacaaagcagcagccgcaccatggacgtggatgcgcgtaggtgtcggcgccaatgcgcacaccccgaccttctatatccgcaacatccgtctggtcaaccccaaccacgggaacaaataatcctgtaccgccaccgcggaagcctccgtccgaccggcacgggggcttccgcgaattaacgcaatcaacccgactaaatccgaccgccatgcgacagttgtttaaaaatctgctgacaatcaccctatccgccgcgctctgcttcatcgcgggatgctccggcaacgaccgtctcccgccgctcgaacccgaagggccggaccccgaaaaacccgccgtggagggcattccgctgtcgatccgcaaccgcgacttcaacaacatcaccttcacgcaggagggcgacgaatggatcatccgcaccacgggcctagacccgtacatctggttcgacgccgcgattccggtaaatttcaaaaagcagtatatgctcgccttcgacagtttcaacaccacggagacactgccgctggtaatcttcgtcggcgaagtgtgcgacggcgaccatctgctcgaaaacggcgactacacgctgccccgcaccgaagggtggtcggctgtgtcgtacaacctctcaaaagtcaaacaggcgcccgccgtaccgttcaaatcggtgcgcgtccgcttcggactcaacggcgaacatacgttccgcctgaaaaatccggttttgcgcgaacccaacaagcaggagatcgaagccgaagagaacgaagccaaccgactcaaggaggagcaggaactcaccaaacggctgaacagctacctcgccaaaagcttcacgtcgaaaatagagctggtcacggcggattacacggccggcaccgtctcggtaacgggtacgaccgacgcgacggacttcgacggcgtcggactggccgaaataccgatgtgggcggaccagaccaaactcaccgcagtcgaaagtttcacgcctcttacaggcggctccatatcgcagtcgttcccgcgtttcgccgaaaacggacgcgaccgcctgctttcgggatgggccgtggtgcggcaggaaggcaacggttatacgctgctctcggccgtacaccataccgaccgaatcgacaatccgcggacgaatcttcccgaaatgattccatcctcgatcaagggtatcggcggctgtccgtacgatcatgcggacatgcaggacctgaacatcgccaccggcacgttcaacatcatcctcgaccagattctctacaccgatccgggcggcgggcgcgaaccctacgaatatgcgggcaagacctattacgccgacgtgaacggcagcatgatcaaacagatagaccacgacgtaaaaatctcgcagcagctgggactcatggtctcggccatcctgctggtgcccgtgaaccggggcgcggccgaagggtcgtggctcgatctggtcgcccaccccgaaaacgaatacagcgcggccttctcgatgcccaacatgctgtcaaaagaggccgtggaagcctatgccgcaaccatgaatttcctctgcgaacgctacagcaccgagcagtacggacgcatccaccactggatcatccacaacgaaattcaggccggattctactggaccaacgccggcaggcgcaatctggagacctatatgaatctttacgagcgttcgatgcggctcgtgcagacgatcgcgcgccagtacgatcccaacgccaagtcgctcatctcactcgaccacggctggacggatcaaggttccgaccgttcgtatcagggtgtgaaactgctcgaacagctcgtgaaatactgccgtcaggagggcgacttcgaatggggcatcgccttccacccctatccgcaggacatcaacaatccgcgtacatggcttgacgacaaggccacctacagtttctcgacacagtaccttacgccccggaacctcgaagtgctcgacgcatgggccgaactgcccgaagtctgctacaaaggcacccggccgcgtgaaatccaattcaccgagcaaggcatcaacacccccgactacgaaccgctgtcactacagaatcaggccgctggcgtagcttattcactggccaagatccggcatatgaaacacgtcaccagctacgcctaccacctctgggccgacgcccgtgaggaaggctcgctgcggttgggcctgcgcaaataccgcgacgatgccgccgatccgctgggcaagaagccgagctgggaggtattccgggccttcggacaggatgactgggaaagcgtttcggccccctacctcgacgtcatcggcatcgaaagctgggacgacgtggtctacaagggaacaattacaaaataaaatcgctaactttcactcgaaaaaaaatgaaattcagacacctcgcatgctgcctgctgctgctcgccggaaacaccgtcgcacgggccgccgcgccgggtcccgaaacgggtccggtcaaactgaccatccggccgtccgactccaacaacgtcacggtcgaacgccgcggcgacgactacgtgatcaccaccacgggcgtcgatccctatgtattcctcgacgccgaacgtccggtcgacgtagacgaatatccgatgctggcgttcaacagcttcaacacttcgggcatcatgtcgctggcgctcttcgtggggcagctcgacaacgcccatctgatcgaggggaacctctatgaactgccccgcaccgaggggtggtcgtcgaacgcctacgacatctcctgcaccgatacgccgcccgcaggcccggtatcgtggatccgcatacgcttcggcatgaacggaggcaacaaattcaccatcagcggactgcagctgcgcgccatgaacgaccgcgaccgcgacatcttgggcaacatcgaacgccgcgaccgcgaggaccgggagcagtgcgaccggctggctgcctatctcaagacgtcgtttccctcgtccgtgacgcacgtcgaagtctcctatccagaatcgaaagttactgtcgaaggtatcctcaaaggcaaacccgacgccgcggtaggactggccgaaatcccgatgtgggaggactacaccgcactgaaagagatcggcgaattcctgccgctggccaaagccggaaaattccgcttcaccctgccgcgcttcgccgccgacaagcacgaccgtcttctctccggctgggccgtggtgcgcaggaccgccggcggttacgaactgctctcggccgtgcactaccccgacgacatcactccgcgcgagaagctgcgcaaagtgacggcaacctcactgaaaggcatcggagggtgtccgttcgaccacgaggacatggtcgaactgggcgtgggcggtgcgaacttcaacatcatgctcaacgaaattctcttccccgatcctgcaccggggcgcaagccttatgaatactgcggccggatatggtacgtagacgagaacagccacgccatccggctgctcgacctcaacgcccgcaaggcgaaggagcacggctggctcatctcggccatcctgctgctgccgctcgaccgcgacttcacgcccggaacatggatgatggaagccgcgcaccccgaacgtcagggcagcgccgcatttgccatgcccaacatcctctcgcgcacggggcttgaagcatacgccgcgacgatgacctatctctgcgagcgctacagttccgaggagcggggccgcatccaccactggatcgtccacaacgaaatccagaacggattctactgggccaatgcgggcgaccgccggatgctctcctacatgaatctctaccagaagtcgatgcgcacggtctacaacatcgcgcgccagtacgaccccaacgcgcaggtgctcgtgtcgatggaccacgactggaaccgcaagagcaacaaacgcagttacgagggccgcgacctgctgaatatcctcgtggatttctgccgtcaggagggcgacttccaatgggcggtagcattccacccctatccgcaggacatcaacaatccgcgcacatgggaggacgatcaggcgacctaccgtttcgacacgcctttcctgacccccaaaaacctcgaagtgctgaacgcatgggtcgaactgcccgaagtccgctaccgcggcctgccgcgcgaaatccacttcaccgagcagggtctcaactcgcccgactacagcgaaaagtcgctcctcgaccaagccgcaggcatggcctacacatgggaaaagatccgcaaaatgaaaaacgtgaagtgctactactaccacctttgggcagacgaccacggcgaaggcggactgcggctgggactgcgcaaattctgggattacgccgacgatccgctgggcaagaaacccatctgggacgtggtgcgcgctttcgagacgcccgaatgggaaaaggtcagcgagccgtacaaggccgtgatcggcgtcgaagactgggatgaaatccgctacaaaggcaaaatcgaataaatccgggcctttggccccaacgctatgagaaccaaacgcatcgtattcgccctgctcgcggcggccggtctggcggcctgcggcggcgacccgctgaaggaggcgttccgcgaccccgcgaacgaattccggccccagcctttctggcacctgaacggcgccctgaccagcgagcacatcgaccgccaactgaccgaggcccgcgacaaggcgggtttcggcggcgtggccgtgcttcccgtcacggcccagccccactggcagaaaggcttcatgtgtccgggcatgagtcccgaatacctcggccgggagtatttcgaccgctacaccgacatactcgaagtctcgaaacgcaacggaacgcaggtgatcctttacgacgacatcgactttccgagcggttcggcaggcggacgcctgctgcgcgaatatccgcagtacacccgtaaattcctcgccaagcatgaattcgcggcgcacggcggcacccgcttccggcaggaattccggcccaacgccgccacgaccgtcatggccgtttcggccctgaatccgcagaccaaagaggtcgcggacctcggcgacgcctaccgcgacggcgtactggagtggcaggttccggagggcgaatggaaggtgatgctgttcacctgcagctattcggtgggcggcgtacacggccacttggtggactacatgcagcccgaagccgtcagcaccctgctgggcatgacctacggcgaatacgacaaacgctacaaatcctatttcggcgacgttatccggaaaacattcttcgacgacgtgggcttcgtgcatatggagcagacatggaccccggccatcacggagattttccgcgagaagtacggccgcaatccggcgctctactaccctgcgctcttctacgacatcggacccgaaacgggcgcggcacgcatcgccttctacgacatccgttcggagctgatggccgaaggatacgtccggcaggtctccgaatggtccgaagcgcgccggatgcgcagcatgggccatccgcctgagaattacagtcccaattcggtcgtggcgcacggcgacatcctgaaatactaccgccatgtggacattccgctgctcgacgccatcctctgcttccgacgggggttgaacggcttcaagcaggtatgctcggcagccgatttgggcgacaagcccgtcgtcggcgctgagctgtgcggcgcctaccccgaagagatggattcggcgatgctctaccgcaccacgctcgaagccatggcgcgcggcgtgaacttcgtcgttccccacggcatgtggtacgacaccgatcctcagacggtacgcatcccgccgctgatcgctcccgaaaatccgttgctgggtcccgcgctgaaaggctacagcacctcgaccggacgttcatgcatgttgctgcagggcggccgccgcatcgccgacatcgccgtgttgtggcccatcaacgccattcaggccgaatcgtatatgttccgcgacgccgaatcgggacttcccatcgccaactggcatccgaacgacgtggtgaactacgcgctgagcggcatgctcaccaacgacctgcaccgcgacttcacctacatccaccccgaaaacctcacggacggcaaagtgtcggtcgaagacgaccgcctacggctcaacaatgccgagaacctgcaggaatacagcgtactcgtcattccgggaggcggctacatctcggccggagcgctggcccgcatcggcgaattctacgacaacggcggcaaggtgatcgcactggcgtcgctgccgtcgcactccgcagaattcggccgcgatgcagaggtgcagtcgctgatcgccgccattttcggaacggcggcacccgacgcagaagcgactgcaaccaacgaccggggcggcaagttcgtcttcgtcccccggacgacggtccaaagcatggccgacgccctcgcacagacgggctgcgaagccgacgtgattatcccggacgcacaacccgacgaatccggattcatcaactatacgcacaagcagcgcgacggacgcgacttctatttcgtcacgaacaccaccgcccggcccttcgcgggcgaaatctcgctgcggggcgaattcggcacggtcgaactgtggaatccccacacgggagagacagcgtccgccgaattccgcacagacaagggccgcacattggtttcagcccggattccggccgttcgttcgctctttatcgtaacccgaaaataaccggccgtgcgacgactgctctccatagccttttttctgacgctcgcggcggccccgccgtcgcaggccatgaaccccggcacgccggacgtgcccgaaacatccgccgcgccggaacccccgactgcatctgcgacgccgagcgcaccgaaaaccccgaccgcgccggaaacgcatgccgcgcccgccggcgaaattatccggtgcaggctctccagctcggaaatctatccggggaccgaacgcgactactggatttacgttccggcaacataccggggcgacaaacccgcatgtctctatctggacatggactgcatccattacgacgctccggcggtcttcgaccggatgatcgccgacggggaactgccggtcatcatcggtgttttcatggcttcgggcgccgtgaatgacgaacagggcaatcccgtgcgcttcaaccgaagcaacgaattcgaccgtatcgacgagcggttcgccgacttcgtcgagcgggaactgctgcccgacgccgagcgtcgcacgacggccgacggccgggcggtccggctgtcgaaagaccccaacgaccgcctgattacgggcggcagcagcggcgcgatctgcgcgttcacggcggcatggcagcgtcccgaccttttcagtcgggtattcagcgtcgtcggaacctatgtctcgatgcgcggcggccacgaatatccctacctgattcgcaaaaccgaacccaaaccgctccgcatcttcattcaagacaacgtgcacgacgtctggaacccgctcttcggccattggttcgaagccaaccggctaatgctctcggcgctcgacttcgcgggttacgcgcccaaccattcgtggggcgacacgggccacgatgacatcggcgccgcacggatattccccgaagcgatgcgctggctctggaaagactggcccgcacgcgttacggtgggaacgtcgcagaacgacatgcttgcggccatcctcgaacccggcgccgagtggcgggagattccgctctccttcacccccgcgggacaactgatgtccgatgcggcgggacggctgttcgtctccgacgaccggggttgtgtccgctcggtcacggcagagggacaaacggaaccgttcttagaactgccccgcggcgaaaaagcggcggcggccagcacaaaaggcatctacaccacggaccgcaaaggccgcatccggctctacgccggcagcggcgcatccgaaacaatcgcccggcttcccggcgtcagggcgctaattccggcaggtcccggcggcgaactgatcgcctcgaccgacaaggagcacgggagccggatcgtacgcatcggcgcggacgggaccctccggaccatcggcggctgtccggaaggcggagaaaggctcgccctgtttccgaatcacaaaatgttattatcttcgcgtatgtattccgactggatcgacaactacgtggtgcgccgcggcggttcgctcgactgccggcaggagtggtaccacctgcacaacatttacgccgatcacctgcggccgcgcggcaacatgcagtgcgaccggcagggcaatctctacgccgccacgccgaccggcatacaggtctgcgaccacaacggccgcgtaagggccatcctgcagcccgcagccggaggtgtcgcatcgctttgcttcgcgggtgcggaccacaggacgctctgcgtgctggccgacggcaaacttctcatacggcgcatgaaagcggcgggcgcgactcccgacatggcggccgcagaggtcgcggcgcagggagccggatgacgaaaacgaaccatgttaaaaaccaacccatgaagaacagctttttacttccggcactcgccctgttattatcgctcgcatcatgcgacggccggaaaaccatctccggcaacgagctggcggcgggcttcgcggaaacacccgattcgatacagacatcggtttactggtactggatttcgaaccacatcagcgccgacggcgtacgccgcgatctggagtcgatgaagcggatcggcatcgaccgcgcctttatcggcaacatcggactcgaagacagcgaatcgggcgaaggtcccgtcaaattctacagtgaagcatggtgggaggtgatgcacacggcactgaaaaccgccacggaactgggcatcgacatcggcatcttcaactgtccgggctggagccagtcgggcggtccgtgggtcgaaccgcagcagtcaatgcgctatctggccaacacctcgacccgcatcacgggcggacaactggtagagaccgacctgccccggccggccggcgagcggagtgccgatttccaagatgtgaaagtgatcgcctttccggcaatcgacgggcggacgctcaccccggccgacaccgaaataacaaccacaccgtcagtaccgcaccccgaacaactcatcgacggcgatcccgacacctcggtggaactgctgcccgccggttcgcagagcagggaggtcacgctggaattcacgaccgaccggccgttcacgctgcgcagcctgaaactccgcgtcaccgaagccccggtggattgtccggcccggctcgaagccgaactggacggcacgctgcatacgctggccgaatttccggtcacgcgcttcaaccccgccctgcacgtaggcttcgacccctatgcgccgatagtgatttcggtcccggcgaccgcctcgacccgcttccggctcgtgttcaccgatgccacgcccggcttcggactgcgcgaagccgaactctcgtcgctgcccacggtggaacgttaccccgaaaagacgctggccaaaatgtaccagaccccgctaccttactggcacgaatacatgtggcgcatccaacccgcaacagacgatcagtcgctggtaatcagaccgggcgacatcctcgacatcagcgactgcctagagggcgaccgcctgacatggaacgcccccgcaggcgaatggaccgtcctgcgaacgggcatgctccccacaggcgtcgtaaactccccggcgcgtcccgaagccgaaggactggagaccgataaaatgagcaaacagcacatcgaagcccatttcgaggcatttctcggcgaaatataccgccgcattccggccgaagaccgcaaatgctggaaagtcgtggtggaggactcctacgaaaccggcggacagaacttcacggacggtttcctcgaagccttccaaacccgctacggctatgaccccgtaccgttcctacccgtctatgcgggcacggttgtgcaaagcgaagaggtctccgaccggttcctgtgggacatgcggcggctggtagccgacaaggtcgcctacgactatgtcgccggactgcgcgaagtgagccataaatacgggttgacgacatggctcgaaaattacggacactggggtttccccggcgaattcctgcagtacggcggacagtcggacgagatcggcggcgaattctggagcgagggaagtctgggcgacatcgaaaaccgcgcggcatcatcgtgcggtcatatttacggcaagaacaagatttcagccgaatcgttcacggcgggcggcggcggttaccaccgctacccggccatgatgaaacagcgcggcgaccgcttcttcaccgagggcatcaacaacacgctgctgcacctctacatctcgcagccctacgaagaccgtgaaccgggcgtaaacgccaccttcggcaacgaattcaaccgcaagaacacatggtttccgcagctggacctcttcatcaaatacgtcaagcgcgtgaacttcatgctccagcagggactcaacgtggccgacgcggcctatttcatcggcgaggacacgcccaagatgacgggcgtcaccgaccccgcccttcccaaaggctaccagttcgactacatcaacgccgaagtgatcgaacgcgacatgacagttgctaacggactgctgacactaccccacggcacacagtaccggattctcgtactacccaaattggagaccatgcgaccgcaactgctggacaagatcgcccggctcatcgagcagggcgccgtcgtactcggtcccgcaccgcgccgctcgcccagctacgagaactatcccgctgccgaccggaaggtccgcagcacggccgacgcactctggtcgcagatcgacccggcggccggttacgcccgcatcggcaagggaatgctgatcgacggactgacgatgccgcaggccatggagctgatcggctgcgtccccgactgccgcacggccgacgaagatccggtgctctactgccaccacacggtggacggcatggagatctacttcgtctccaatcagagcggcgaaccgatccgcacggcccccgaattccgcgtcaaagacatgcagcccgaagcatggaacgccgtcgacggcacgatgcgccctctgccggcattcgccccgacatccgacggagtgcgggttccgctgaaactcgacggttacgaaagtctttttgtcgtattccgccgttcggccgcacatcccgaaacgaccgacattgcagccggaacggaggtcaacttcccgccctacaaagccctgaagacactcggaggtccgtggacgctcaccttcgaccaaagcaaacgcggtcctgccgaaccgctcgccacagacgaactgttcgacttcacgcaacatcccgatttcgacatccgccactactccggcacagtggtctatgaaaacaggttcacactcgacacgctgcccgaaggccgcgtctacctcaacctcaacgacgtgacagccatggcgaaagtcaaaatcaacggcgtttacgtcggcggagtctggaccccgccctaccgcgtggagatcaccgacgccattaaaacgggcgaaaacaacgtcgagatcgacgtggtgaccacatggaaaaaccgccttatcggcgacctgaacctgccacaagacgaacgccgcacgtgggtggcctaccagccgtggaaagccgacgacgaattgcagaagtcgggacttacaggcccggtagtactcgaaaccaataatttttaactgcataaaaccatgaaaaaaggaatactgatcttgacggcacttctgttcacaggcacgcttctgtcctttccggcggcagcgcagaaaagccgcacgtccgattacagaaaatatgcaaaaatcatccgcgaaaagatctactcgacctaccgcgactactgccgcgagccgggcgggcatctgccgtttccattcatcgtaccgggcggcgcacagtacggcaacgtactgtgggactgggattcgtggctgagcgacatcgccattcaccaagcagcggccgatcagggcggcaaggctctcaaggagatcgccgactacgaaaagggctgcgtgctcaacttcctccgctactcagggatcgacggctgggtgcccgtcaatatctcgatggacgccggaacccaaaagcccgaagacatctacaaggaaaacatgcacaagccctgtctggcccagcatgcggccttcatcgtacagcagaacggcggtgacgcagagtggctgcgcgacgagttcttccggctggaatacttcgtcggcggctatgtaaaccgctaccgccatcgtgtgacggggctttatttctggcagaccgacgtgatgatcggcgtggacaacgatccctgcacttatttccgccccgaccgcagttccggctcgatattcctcaactgcatgatgtataaggagctgcgcgccatggaatacttggcgggccgcctcgacctgcaggaactcgcagccgaatacgcccggaacgccgacgacctcaaggccgcggttcaggaacactgctgggacgagcgcgacggcttcttctacagcgtagacctcaatctgcgccctgtaagcaccgaaaaagagccgtatcacggcggagcgccccgaacgtgggactgcctgatccagcgcatcggcgtctggtcgggattcctcgccatgtgggccgacatcgccaccccggagcaggccgaacgcatggtacgcgaacacttctccgacgaaaggaccttcaacgccccgtacggcgtgcgcacgctgtcgaaaatggagaaaatgtactcgctcaaagccagcggcaacccctcgacatggctcggcccgatctggggcgtgtcgaactacctgacgtggcgcggactggtcaaatacggattcaaggaggaggcggaggagctggcatcgaaaaccatcgccctgttcgggcgggattacgaacgcacgggcgtgctgcacgaatactaccagccctcgaacggcgaaccgatcctcaatccgggcttccagaactggaatacgctggtcatcaacatgctcaactggatggacggcaaaccggtcgtggcggagttctgattcaccgcaccgcacgaacggccgcacaccgcgcactgcacaccgcacgaagagcttccggaacacctgtccggaagctctttccatacgggaccatttcccgttccggcatcgccccggccggaagatgacgcttcaccgggaattttgtcagaaattaaaatcattctgtcaaataacgcaacagccgggcttccgtctctgtttaattttgttcagaaccagatcaaaaaaccaatgacccggaaaaaactgcttatcctcacgctctctttctgcctgctggacaccctcgctccgctcgcggcgacacctgaaatccgcatcctccaacgccgcgccgcgcaggacgccgccgtcgtgcttccggccgacgcttcgaccatactccgttacaccgtctcggacttcaacgaagactgccgcgaatcggccggccgacgactgcccgtcgtcacaacgctcagggaagcgggttcgcgtccggtcatactgcctgccgtcatcgggaaaagcccgctgctcgaccggctgatcgccgagaagcgcatcgacgtcgactcgatccggggagaatgggaaagtttcgccatcatccccgtcgcccggcctttcgccgactaccccgcgatccccgaagcgctgatcgtagccggaagcgacgaacgcggggcgatgtacggactttacgaggtgagcgaacgcctgctgggcaccgatccccagaaattctggaccgacgccgtgccgcacagggtcaaaagcgcccgctgggaccaaggtatggtcgtacagggacccccgaccttcagattccgcggctggttcgtcaacgacgaacacgccctgctgggctggcaccaccgcgaaggagaggacaattcgatcaaggccgaagactgggccgagattttcgaaacgatctgccgcatgcgcggcaatttctatacgctgatcgaatacggccagacgcccgacagcgcttcgctccggctggccagcgaccgcggcctttacgtcaccgggtcacacatgcacatgctcgtcgccaacacctcctacgccttcgatccggggcctcatacgtggacatgggatgctttctgcgaaaagacctacggcaaacgctatccttacagctggatgacccagcgggagaaaatgctccgcttctgggaagaggagggcgtaaaacgccacaaggaccatctggcgatctggaccgtcggactcaaaggggccaacgacaccgatttccacgaaaacgactccgcagccccgcgttcggtcgtcgaacgggcgcggctcaccaacgaagcaatccggctccagactcaaatcgtcgaacgcaacctgcccggcaccgagccgctctacatgatcgccaaccgcaacgacctgttcgaccaatacctcacgggcgaactgcagtttccaaaaaatacccatatcctctggcccgacgacccgtcgttcggcgtcttccgcctgctgcccgaaaagaagcatctggagcgcgacgcccaccacggcatcttcttccacctcaccttctgcgacaaccattgggtgcaatggtacccgatgggcggcgtgcagcacgaactggtgaaggccgtacgcgccggagccgtttcgatggccgaattcaatgtcggcgacatccgcgaaatcccgctcaaaaccgccatggcgatggatctggcctacgacgcccgtccgtggctggccgataaggagcattggcgcgccttcaccgacgcatggatcgtccgtcagtacggcatgcgcgacccggcgcgcctgaccgatctgctggtccgctactgggacctcgaaatgcccgtgcggtcgatgatcatcctcgaacgcatgtcacagtacacgattctcgacgaagcgattctcaaaaagatcgagggcgcggcggacaaacgccgcgcgatggtcgaatacgtccgctcgatcgaggtgccgacgggaggccgttacggcaaaatgggccgggacgaactccggcgcaacgccccggcgtgggagcggttatggaaggacgccaacgccctcacgcctgaaatccgctccgaccggcgtagcttctactacgatttcgtcctgcttcagatcgccacgtcgcggctgatgaacctctggggcggcgaactgttccgggccttcgacgccataagcgcagagcgcttcgccgaagccgccgaccacatggagaaagccaaagactatgtccgggagctggccgaatgccgcgcccgcgccgagcacggcaaatggaaaggctggttcgacggcgaccagctctacccgtggaccaaccacatgtggggtttccattacgaacgggaactggccgccgaaaccgaaatgatccgcatgctccgtgcatggagcgcacggccttaaatacgaccgcccatgaaacgactcttactgccgctcctcgccgccctctgcgcaggatgcgccaccgcaaaccggcccgaagacctgaaggccgacgggcagacatcgccgccggccaccgacagccggcagccgcgtctgacatggacgctgccccaaagcgccgaaacccccgtcatgcagaccgcctatcacgtgcaggcatcctccgccgaagatttcccggcgcccgacctctgggacagcggcgaagtcgccggcacgcaaaccgcctgcatctacggaggtaaattcccggcttcgggcaatcccgttttctggcgggtccgggtccgcacctccgacggaaaaagatcggaatggtcgcagacggcccgcttcgagaacgggcttctgactccgcaggagtggaccgggccgtggatcggcatggacagcacggcccgcggccaccgtgccgcctacctgcgcggcaccgtccggctcgacaaacccgtcatctcggcacgggcctatgtctgcgcccccggctggtacaaactcttcgtaaacggacacgacgcggaccggaactgcgtcatgggtccggcccagaccgactacgaattgcgctgtctctacattccgaccgacatcagcggctggctcgccggcacacggcagcaggaggtcgaactcggcgtcatcctcggcgacggctggtacgaccagtggatcgcatggggcggcgcgatgagctacggccagccccgcctgcgggcgcaattcgtcttcaaccaccccgacggcacgcagacctcggcgcccgccgacctgacatggcgggccgcgacgggtccgatcggcgaaaacaacgtctaccggggcgaagtatacgacgcccggcaggagattccgcagtggggcacgaacgactatgcggactggcaggcggtcgtggaataccctgcaccgagtcccgccacccgtctcgaaccgcagtgcatgcctcccgaacggcccgtacgcgaagtggtccccgtctgcgtgaagcgaatttcggaacccgacggcgaacggccctacctctacgatttcggggaaaacctgaccggctggtgccgcctgcaactgcgcgacgccgcgcccggcacgcgcatccgtctcgaattcgccgagaaaataaaccccgacggaacgcttttccgcacccctgtcggcaacgagatcaacggcacggtgcaggccgactattacacagccaaaggcggcgcccaagagacatgggaacccagcttcaccttccacggattccagtatgcggccctttacgtcgaatcgggcgcactgcccgaagcgccgtcgagcgagaccctcacggccatcgtcgtccacaccgacctgccggagaccgcctcgttcgactgttccgatccccagctcgtccggctccaccgggccgcagggcgcaccctgctggccggcatgcacgggcttccgatggactgtccggtgcgcgaacgctgcggctggctcggcgacggacatgccatcgcccaactcctgctgacccgttacgacgccgcatcgttcctgcacaaatacgcccgcgacatcgaaaccggaggccgccgctccaccgacgaaccgcgcgtcggtcccgtttacggcacaaccgtccgcgaacccaaaccagcgggcgtgccccacatgatcgcccccggcaaacgtctctgcaacgcagcatcgcccgactggggcagcgcgcaggtattcatcccgtgggagatctgcacccaaacgggcgacatgcgcatcctgcaggagtttctggaaccgatgcgcacatgggtcggctacctcggctcgatcgccgatccccgaaccggactgccggttacgggattgggtgactggtgttcgccctcgatgcggcaggccgccgaatcgggaacgccgtggatcggcaacgccgaaatcccaattctcacctcaggcatgtatatccgctgctgcaggattctggcgcagaccgaagaactcgtcggcgatccgtcccgaagtcaatactaccggcagctggccgactcgctgagccgcaggctgaccgagcgctacttcctgccgccgcacgaacgggccgaatacagccagacggcgctcgcattcgcctattactactgcgatccgacgcttcttccgcgggagaaaatcgtcgaaaaactcgtcgccctgtgcgacgaaggccactgcttcgacgcgggcatcttcggcaccgcaccgatgctgcacatactcgccgccgagggttacggcgacatcgcccgccgcctgctgaccaaacccgaataccccagctaccgggccatgctcgacctcggagccacgacgctctgggaacactggcccgtgcagggcttcgacggcggatacgaagcctacgacggctcgatgtcgcatcccatgcatgccgcattcgatgagtggctttacacgggcgtggcaggactcgccgcccgcgggagcgtccgggaaccatggaccttccgctggagcgattttccggagctgaaccgcgcatcggccgcccgccggattcccgaaggacggatttcgagcgaatggcggcgtgacggaaacagcatcgtctggaaggtcgaagtgcccgcaggcatcgaagcgcaggtcgtcattcctgcccgtgccggtgaaatccgcgaaggcggccgccccattgcagaccgggccgaaaccggacgcatccggatactccccgcagcatccgcatccggcaaacagcaactctcggtcggttcgggaaactacgaattcagttttcccgcaccgggagcaaactcataatccgaaaataccgcacgatgaaccgaatcaaactattcgccggcatcctgctctgtctctccgtactgcgcaccacggcgggtacgggaagcgatccggcatccgaacgtaaaatcgacagcctgctgcggctgatgaccctcgaagagaaagtcgccatgtgcgccggagccgcgccccgcatggcgtttcagggcgttccgcggctcggaatccccgaagtgcagtgctgcgacggtccccgcggacccaacatcggcggccccgccacggcatttccgtcgggaatcgcatggggcgcggcgtggaaccccgcactggccgaaaaggccggcggagtaatgggccgcgaaacccggactatcggccggggcgtattgctgggtcccgccaacaacatcctgcgcgatccgctgtgcggccgcttcttcgaatactacaccgaagacccttacctgaacagccgcatcacggccgccgccgtgaaaggtatccagcgcgaaaaggtggccgcctgcctcaagcattacgcctgcaacaaccgcgagaacaaccgcaacttctacatgtccgcagtcagcgaccgcgccctgcatgaaatctacctcccggcctatgaagcggccgtcggcgaaggcggactgtggagcgtcatgaccgcggcaaacggcgtgaacggcgagttcgtgagcgacagccgccgcctgctgaccgacatcctcaaagaggagtggggattcgacggattcgtcatcaccgactggctccagacccgctcgaccgaaaaagcggcgctggcgggactcgacgtttcgatgccgggcggcgaagagtgcggctttggacggcccttgctcgacgcggtacgcgacggccacgtacccgaaagcgtcatcgacgacaaggtccgccgcatcctgcgcatctacgaccgcatcggcgcactcgacggctgcaacatctccgccggggccggcatcaatactccggaacatcaggcgacagccctgcaactggccgaagaaagcatcgtactgcttcgcaacgaaggcggcatgctgccgctgcgcaggggtatgaaaatcctcgtcacgggtcccaacgccgacaagcgtttctgcctgcccggcatgggcggcagttcgggcatcgaatcgccctacgaggtgaccgttctcgacggcctgcgtaacttgacaggcaacgccgacgtcagctatttcccctccgaacagctcggcggcttctcgcccatccccgccgaggcggtccacagcgacccgtacggccgcgaaccgggctggaagacgacctacgcgggagcagaacagacgctggtccgcaccgaaccgcagatcgacttcatgtgggagatgaaatcccccgacaggacgattcccgccgagtcgttctcggcgaattttcaggggtggatcaccccgcccgccagcggcgtctacacgctccgactgaccgtcggcggctggtgcgcgatcttccccgaaggttgctacggtgccccgacgatcgtcgccgacgactcgcgcgagggcgaacgcaccgtcaccgcgacgatccggctgcaaaaggacgaaccctattttttctgcgtcaattactcgaaaaaccgcgaatgcgacgcttcggtgcgactcgaatggaaactgcccgaatcaccggaatcggccggggagctggcgcggctcgacgcggccgcgaaagaggccgatgcggtgatcttcatcggagggctggaccacagcctcgacaccgagggccgcgaccgcatgacgatggagtttccgcaggatcaggaacgcctgatcgcgcgccttgccgcggtcaatccccgcacggcagtggtactgatcaacggctcgccgatggaactgggcggctggatcgacaaggttccggccatcgtcgaagcgtggtatcccggcatggagggcggcacggccgtcgccggaatcctctacggcgaagccgatcccgctggccgtctgccgttcacatggccaaaaaaactcgaagactcgccgtcacaccggctggccacgcaggacctcgccaccgtaaattacgaagaagagctgatggtgggctaccgctatttcgacacgcaggaggtcgagccgcagttcccgttcggttacggactcagctacacgacgttccgctatggcaggctgcgcgtttcggaaaagaacggcaaagtccgcggtcgcatcgaaatccgcaacaccggagaccgcgacggttcgcagaccgtacagatttacgtgcgtcccgaacggccttccgtcacacgccccgtacacgaactgaaggctttcgagaagctgttccttcgggccggggaacgccgcacggtggagttcacccttccggcgcgggcattctcctattactccgagaccgaaggccgctgggtcgaagatcccggaccttacaccatcgaagccgctgcatcaagccgcgacatccgctcgactgcacagatcaatataaaatagacttgcaacaaaactgaaaaactgcagccggccttcgatctgttgctaagcgcctgcgccgaagcgccgcaccaccctacaaatcaccggattgggtgaagtaagcgaatgacgttcgacaaacgtatggcaggcctcctgagtctcctccctacagcatcgaaatcacgaacctgctgcaacccggcgcccgcatattagaactctgccgaaagcattactccgggagtcatgtcccggagtaatttttttgtccctcgatccgtccgaatcggggccgaaagttatgtattaatatgaaattcgacaataatgcttacaatccgtaagtttaacaccggtaaaaacgactgcatcggcacataatttcccgtttcagcctaattaaacctccgaaaaggcctttcagaccgctttcaaggcgtcttggtccctgcaaagcgggattaacaaaattaaagaaattgttatcttttctcaatttcgggggtgaaaagccctccttcggcaaatatttcgacatttttttacggtttcctaaaaacggacgacaaaaggaggtcatttcttaaaatatatcaaaaacaaacgcccgttttccgcttccgtcccttccgattcgccgaaccgtcaacccgaaatccgaccgcgcaccgctcagataatgataaaatttcaaaataagcaaactcatttctacatttttgtaaaaatattttgaatattattcaacccaattacaacaaatcaaaacaaaaccttaagttattaattaagaaccgaatagaccgcagaaacacaccggacagagcaccgaaacagcccttttcaggcactccggcttacatttcatccattttgaatatttggcaaattcattttaattatttttctttgccgcgtaagaaagtatcatccacttatgcaaaaaacgaaacttctactcaacattcttgcacttttcctatgcatcctgccggccgtatctatggctcagggggggggaaacgtgaccgtcagtggcatcgtcacttcggcggatgacaagcaacccctgatcggggtcaacgtgatttccggagccacgagcggagtgagcacactcgccgacggcacctaccggataaccgtttcggcggggaccaccctcaccttccagtacatcggttacaaaccgttcgagttcacggttcccgcaggccgaagctccgttacctgcgacgtcgcgctgcaaggcgattcgcagacgctcgacgacgtggtggtgatcgcctacggcgtccgcaaaaagggcaccatcgcaggctcggtatcaaccgtcaaggccgagaagatcgaggacaccccggcggcggccttcgatcaggcccttcagggtcaggttccgggcctgacggtactttccgactccggcgaaccgagcgagaccgcagccatggccatccgaggcaccaactcgatcaactccggcaccgcgccgctctacattctggacggcgtcgccatttcgagcagggacttcaacaccatcaacccctccgacatcgagagcctttcggtcctcaaagacgcttcgtccacctccatatacggtgcgcgcgcggccaacggcgtgatcgtcatcaccaccaagcgcggccgcatggccgaccgcgcgaagatcaactaccgcatgcagctcggtttttcgcagatcgcctacggcaactgggacctgatgaacacttcggagcgcatccagtatgagaaagagcttgggctgaccgacggcaagaactacaacgtgctggccaaaaccgatgtcaactggctcgacgaggtgttcagcaacgccgcgttgctccagaactacgagctttccgtctcaggagccagcgaaaagaccaactactacgtttcgggcggctactacagtcaggacggtacggccgtgggttcgtcgttcgaacgctactcgatccgcgccaacgtcgagcagcgggccgccaagtggctcaaactcggcaccaacacgatgatgaactaccagaccatcgagaaggccgacgacggggaatacaccctgaccacgccgatctcggccgcacgcttcatgcttccctactggaacccgcaccgcgccgacggttcgctggcgtcggtgaacgacggttcgtggaagggcgaggggcagaacccgctcgaatggctcaagaacaaccccgtagactacaagaagtacaagatcatatccacggtcttcgccgaggcgaccccgatcgaagggcttacgctccgttcgcagttcggcgttgattattcgcactcgacgggccgcggcatctcctatccgagctacgcccccaacctcggttcgggtaccgtacagcgcaactcctccgacggaatgagcctttcggtcaccaacacgatcacctaccggttcgacatcgacaacaagcacatgttcaccttcctcgcggggcaggagggactcgactaccggtacgaggccttctccttgcagaccaaggaccagaacaacgacaaactggtgaacatctcgtcgagtccgcgcgccacccgctggaacgacaccaccgacgacaactacgcctatctgtcgttcttcggacgcgccgagtacagctattcggaccgttactacgccgacttctcgctgcgtaccgacggctcctcgcgcttcggcgcctcgaaccgctgggccggcttctggtcggtgggcttcatgtggaacctgcgcaacgagaaattcatggagaactcccgccgctggctgacgctggcgcagatcgccgtcagcaccggtacgtcgggcaactcggagattcccaactacgaacacctcgcgctggtgaccggcggtcagaactatttcggcaacgccggcatcgcccccacccagccgggcaacgaggagctgagctgggagaagctctggacgaccaacgtggccctgcatctgggcttctggaaccggctcaatctggacgtcgaactctacaacaagaagacgaccgacatgctgatggaggttcccgaatcctatgccgacaaaggctacggctaccactggagcaacgtgggcggcatggtcaaccgcggtgtcgagctgagcctgtcgggcgccgtcgtcgcaagcaaggacttcctgtggagcgtgaacgccaacgtatcctacaacaagaacaagatcaccgaactctataacggcgtcacggagtacgaaatgtccagcaccaacaccaagctggtcgtgggacaccccgtgggcgaattctacatcaaccgcttcgccggcgtcaatcccgccaacggcgacgccctgtggtacaccaagcagggcgagctgaccaccgaactccgcgacgaggacaaggtgctgaccggcaagagcttcttcgccccgtggcagggcggcttcggcacgacgctgacatggaaggggctttcgctctcggcgcagttcgcatgggtggccgaccgctggatgatcaacaacgaccgctatttcgacgagtcgaacggccgcttcgtctctttcaaccagtcgaaacgcctgctcaaccgctggaagaaaccgggcgacatcaccgacattccgcgccacggcgtctacaccgagttcgacgaccgcctgctggaggacgcttcgttcctgcgtctgaagaacctcatgctcagctacaccttcccgcaggagtggctgcgcaagacccggttcatcggaggcgcccggatttacgcgcaagcccagaacctgtttacgttcaccaaattcacgggactcgaccctgagggtaactccaacatgtaccaagcgcagtatcctatggcccggcaattcaccttcggactcgacttaacattctaaaacgggactatgaacatgttacgcaatataaaattccgactttccgcccttgcggtgcttctcctcgccacttcgtgtctggacaaataccccgaatccgccatccccgaaaaggatgccatgaagaccttcgcggatgccgagcagaccctcacgggcatctacgccaccttcaagagcagctcgcttttcagcggacggctcacgctgctgcccgacattcaggccgacctcgtctatgccgtcgagggcaacagcaaccagttcggcaacttctggcgctgggacgtccgcccgaccgacctcgacctcgaaggcgtttacgccgacctctacaccgtcatcagccgctgcaacttcttcctcgaacgcatcgacgaagtgatgcggaacgaaatcagcgacgacaacctcgaagagctcgaagaatacaccggcgaggtctacgccatccgcgcgctctgctattcggagctgctcaagaattactgcaaggcctacgaccccgccaccgcgcaatcggagctgggcgtggtcatccgcaccaaatactccacgccggagccgatccgccgcgcgtcgctgtacgactcctataagttcgtgctcgacgatctggcggaggccgagaagcgtctcgacaaggaggaggacgcctacagcaacgagtacatcacctcggcggccgctcaggcgctgcacgcccgcgtggccctctacatgcaggactgggataccgccatcgaatacgcgagcatcctgatcgacgaaaagaagagcaccttcaagctggccgacgccaaaaccaagtacaacgccgactacaccttcttcgactacatgtgggcctacgacctgagctacgagatcatctggcgcatcggtttcacggagacatcctacggcagtccgctcggaacggtgttcctgaacttcaccaaggacctcacctatttctaccccgactacgtgccggccaccgcggcgctgaacctgtacgacgacgccgacctgcgctattcgggttacttcgccggcaaggaggaggggctgacgatcggctacaccaacggactggactggccgatgctggtgaaatactacggcaaccgcaacttcaccgacaagctgatcttccacgtctcgatgcccaagccgttccggctggccgagcagtacctgatccgcgccgaagcctactgccgcaagaacgacttcacgaaggccggcaacgacctcacggcgctgcgcaagatgcgctacgcttcgggcggcacgctgaacgtctcgaaaaacaactggctgcagaccatctccgacgagcgcgtgcgcgaactctacatggagggtttccgcctgcacgacctcaagcgctggggcagggagtacgccgacctgaacggcggctacagcatccgccgcacgccgcagtcgtgctcgcagcccgaaggcagctcgctcaagatcactccggacaatccgctcttcgtatggccgattccccagcacgagctggagtctcccggctcggagattctgcccaacgaaagcaaccgatagcaacaacgaacagaccataaacaatgaaacaaattatcacggttttatttgcaacgggactcctcgccgccctcttcatcggctgcaaggaggagtacaagacctattcggaccgggagttcgtcatgttcgccgacactgcggcgacctacatggtgcttcaggacaaggaatacttctcggttcccgtcacctcgaccgtcgcgtgcgattacgaccgtacgttcggcgtggagatcatcgacaagggcagcaacgccatcgaagggctgcactacgccctgcgttcgaacaccatcaccataaaggccggccagcgcgccgccaacgtagaggtgcgcggcctgtacgacaacatcgagccgaccgactcgctgggcttcatcctcaagctggtcatgcccgaacaggtcaactggaatctgtaccacgaccagaccaaggtcgtgatgatgaagagctgcccctacgacgtcaacgacttcacgggctggtgcgtcgtgacctcgctcttcctcaaccagtatcccggcatcgagaacacttcgctccagcggcttatccgcaccgagaagcaccccaccgaggagaacatgatcatccttcacgactggctcttttcgggctacgacgtgacgatccgcctcgacccggccgatccggccgaaccgctggtgaccatggacaagaaccagatactcgcagacgaaggctcggtcttcggacagatcctcggcgataacaagattctggtcaccaacagcccgctctacgactcctacttcaattcgtgtcagaaatacgtcacgctctggatcaaggtccacgtcgagaacatgggcgagaacgtcggtctggtaggccacttctacaacatcatcgagtgggtcagcgacgaagaggccgaccggctccagcgtgaagagggcatgaaaccgggcggagtcatcacgccgcacgcgcgctaaatccattaaagcagaaaaagacaagagatatgaaaaggcactatttacacttggtgatgtcactgctcgcgggagcatgtctggcggccgcttcgtgttccgattcggacaaggagatcaaggctcccagccccaacttccccgaagcggtctccccgaccatcggagccggagagaccttcacgatcgaaatcgaccccaatcaggattgggaggcaagcatcccgaccgcaacggccgcatggttctggatcgaggacggaacgcagaaagtctggaccctgcgcggcggcgcgggtccggcccggatcgtcatcgccgccgccgaactggaagagttcgacgacaaccgcgtctgcgaggtgaccatgaccatgggcggacagagcaaggtcatcgccacgatcacgcgcggcacgctccaacgcggcttcacgctccgcacctgtcagctggacgagtacggcgacttcatctacaaccccgacggcaccgaaaccgggcttacctacctctacggcaccgacccggccgaaaacatcgccctgacgtggcccgaaggccgcaccggattttcgatgccggtactcgtggaggccaacttcgaatgggtgctcggcaaactgccggagtggcttgaaattccggccaagaccatcggcgaaccgggcgcgcagctcgaactgcgcctgcagggcgacgcttcgcgctacccgctcgacggagccgaggagacgctggtattcaccgacaagaacaactccgaagtgagctacgagattccgatctcgattccggcctgccgcgacatcttctccgtcagcggcatgagcgccgagaccaaattcaacgccaaggccgaatatttcaacagcatgaacggcgactgggttccgggcagcgcgatgggcagcgtccagagcatcgacggcgcgaagttctacctcttcgcggaggtcccgcagcagtggggcgacccctacctgagcgccgaagccgaagacctcgcatggatcctgctgaccgaggagccgtgggacagcacgcccggcagcgacgtcgtacagtcgcgccagttcaccgtgggcgtgaccgagaacggcggcgaagcccgcaaggcatacctgctggcgctgcctgcggcggtcgccgaaacgatctccgacccctatcagctcatcgacgcggagatccgcgacgaatacaaacaatatctcgtcaccaccatcaatcaggaggccaatcccggctccatctcggcgaacaaccccgcaggcatgaccgaaatcggcgccgccttcgagaaactgccggccgacgactggtacatcggcgaattcggcgtcagggacggctacaagctcatctatacgaaggagtggtcgaacgatcccgaatcgacgctgaccgtggaccgcgaatataccggcgtcgccttcttcgactacgacctgcagcccatgagcggcgaggagagctggctctcggtacgaaagaccgcggagggcatcatcgtcgacatggaccccgccaaggacaagtgcggcggcagctcgatggcgaacgagggcatcgcccacatcggtttcgccgtcttcaccgacaccgacggacggtttgcgcttatccagtgcatctacgacgagaattacccgatcggcggtggcggcgagggcttcgaagtgaagttcgccatgcccgatctggtgagcggcgcgacgctggtcgagatcacgaaggagaactacgaaacggtcgcaggcggcaacacggacctgctcgcctcgttcgccgagaacctcggcatgggagttccgcagtacatgctgacctacacctcggccgaaccttcgaacgccgtactggaagtctcgccctaccagcagatcatgctcatgccgatgtcgggcgccgagtggctcgactacgaacccctctccgacacgcagattctggtctccatggccaaacccgaagcggagcaggcttcctacggcatgctgcagttcatggacggcagctggaacatgaaatgcatcgtttactgtacgcccgcgttctaaacaccacccacacgacaggtccccgttcgaaggggcggggacccgttctatacgactacaatttatggagaatatacagaacaggtttttagatatgaaacttttaaaaattttcgtagcggcgattctcgcactggcagcggccctcaccggcggatgttccgacgacgacggcatcgacaaccgcgatctcgactacggatacgtccagttcaaactctacaaggaggcgtcctacgacgccgtcagccgggcgcagaaaccccagctcgactacctttacgaagccgccaaggtgcaggtgtcgctcggctgcaacggcacgaccgtcacccagacgctgacgctctcggcctccgacaaggagagcgccgagttcggcctgcgcagcgagaagctgcggctgctgaccgggcagtaccagatcatcaccttctcgctctacgacgcgaacgacgagctgatatacaacggcatgcccctcgacgacaggctcgtcgtcgaagccggcgggctgcaggtccacgacctgacggtcgatgtcgaaccgcgcggaaaagtgcgcttcaccatccgcaaggacctttcggacttcaccgagacgcccgtcacccgtgcggcagacaggcagtataccttcgacgagatcgccttcatcagcctcaccgtaaaacaaggcgagaccaacgaacagacgaccttcaagatgctgcccacgaagttctcgatccacttcgacgaggacgacgacacgttcggctaccagacctcgtcgctcgaatgcgacacgttgctttcgctcaaggccggcagctacaaaatgatgcggtacgagacctacgacaagaacaagctgctgctggagaccaacaaacggcccaagaacctcgacttcgccatcgaggacaacaagaccaccgaaacggaggtcggcgtcacgctctacgaggccgacgagtatatccgcgactactacgcgctgtacgaaatctggaaggcactcgacggtcccaactggtatttctccggcgagaactaccccgcaggcaccaactgggacttcaacaaggaccccgacctctggggcatccagcccggcgtggaggtgcactccaacggccgcgtggcgaagatcacgctcagcgacttcggatttcggggccacctgcccgcggccatcggccagctcacgcagctgatcgagctttatctgggttcgcacaacgacgccaacctgctcgaatacgatccctcgatcgcgcccgacaagagcctgagcgagcggaaccgcacccgcatggagcgcaacaaggagttcctccgcctgatccacacgccgacgcaaaccaccgagccgatcgcccgcgcgctcaaggagcacgacctgaccattccgggcatctcgctctacgaggagaactataccgaggacgagatcatcgaccgcaaaaccggacttcagaagcgcatccgcccctacgacgtggtgcacggcaagctgaccaacggactcaagtcgatcgacccggccatcggcaagctcgaaaacctcgaatacctgttcatcgccaacggcgagatcgaaacgctgcccgacgagctggcaaacctcaagtcgctgaccgacgtcgaggtatacaactgccccaagatgacgcagttcccgatggcgctcgccaagctcccggagatgatatcgctcaatatctccaacaactcgcagtggtcggccgaagaggtctacaagggtctggacgccatcgccaacggtcccgcgaaagagaagctacagattctctacgtccgcgacaacaacctccgggaagtgccggaatcgttccggaacctgaagaagatcggtctgctggacttggcccagaaccaaatcgagacgatccatccgctgggcaaggaggtggctcccgtgaagctctatttcgacaacaacaagctcacgtcgcttcccgccgacggaaacgggcttttctgcaccatggacgacatcgagaccttctcggcgacctacaacaaattcacgaagttccccaacatcttctcggccaagagcaagttcaccatcggggaggtcgatttctcctacaacgagatcgacggcttcgaaggcgaggaggacggcaccttccggggcctgaacatcgaacagctctcgctcgcggcgaacaagttcacgaagttccccaaatgcctcggcacgacgggatcgctcgtcgcgtacatcatcctgcgcggcaacatgatcgacgaaatccccgaaggatcgttctccggcaagtactcgacttcgatgacctcgctcgacctgacctacaacaagctcagcaagctgccgaaggatttcacggccgagcagctgccctacctctacgggctggacgtctcgttcaactcgttcgacaagttcccgtggtcgccgctcaactgcgcgggcctgacggtctacgccatccgcggccagcgcgacgctcagggcaaccgctgcctgcgcgaatggcccacgggactctaccagcacaccggcctgcgcggattctacatcggttcgaacgacctgcgcaagatcgacgacacgatctcctacctgatctaccacctcgacatcagcgacaaccccaacatcacgttcgatgcctcggcgatctgctactactggcagcagggcgcctacaacctgatttacgacaagacccagaatatcctgaactgcgataaaatgctcgaataaccactaaggagaaatgacaatgaaaataacgaattacataccggttatcctctgctcgatcgcattgtgcggctgctccgacgccgccaaaaccgtcggattcggcaccgacagcgacgccatcgaagcccccgccacgggaggaacccacaccgtcagggtgtcggcggagaaagagtgggtcgccaccaccgacgagccgtggatcaccgtctcgcccgccaacggccgcggcacgaccgaatgccgcgtactcatcgactcggccctgaccgaccagccccgcagcggcgtgatccgcatcatggagcagaacacttgggtcaagaaggagatcgccgtctcgcagaaaggcttcgactacctcatcggcatcgacgacaaggaggtcaccgtcgccaactacgcggcgtacggcacgcgccacttcgacgtcaagataaagaccaacgtggatttcgacgtcaaggttcccgaatcggccgaaaactggctcaagttcgagaagccggcggtcgaattcgaccgcggcatccgtccgcgcgaagtgaccgtgcgtttcaactggaacatcaactcgcagcccaatccgcgcatcgccgacgtcaccttcgcctccaagaaggaggtcgaactcgtacgccacgacaatctggtcgtcacgcaagaggccgccgaaccgatcgaggagaacacccgcggcggcgactcgatcgccctgctggccatcgcccgcacgctcgaaaccaacgtaagctgggaaaacggcgaacgcatggacaactgggacaacgtgatcctctgggaagagggcatggagggttacacgcccgaaaagaagggccgcgtgaaatacgcccggttcttcatgttcaacaccaaggaggagctgcctttcgaagtgcagtacctgacggccgccgacgagctgagcttctacagcaacgtcaacgccttcctcaaggacctcaccacgggagagtacatcaccaaactcacgcagctgcgccggctcaccatctcggcctacggtctggtatcgctggacaagaacttcacggcgctcaagaacctcgaatacctcgacctgagcagcaacaacttccagaagattcccgaagagatcaatccgacgaacttccccaagctccggacgctgaacatgggcgccaacacgcgcaagaacatctacgacctgagcaacaccgtcgaaaccaactacggcggccttgtcgaagaacagggattcccgcgccgcatgatcgaatgggacctcgacacgctggtgctctcggtcaactacctgcagggaccgctgcccaagatggacgactgggagaaatacaccgagcaggacatcatcgacgccgacacgctgccccgcgcgctgatcggcaccccgaaggtgatgccgcacaccaagcggttcgccatcaacctcaaccgactgaccggcgagctgcccgactggctgctctaccacccggcgctcgactggtgggtccccagcgtgctggtcttcacgcaggagggcaaggatgcgagcggcacgctggccggattcaccaacgaacccgccaatatgaactactactacgaattctacgagggatacaagaaagaccccggcacggaagaagaagaggaggagacgaccaaataattatgacgatgaaaaactatctatacggcattcttgccaccgctttactggcatttaccgcatgcaccaaagaggagctgtccgccccggagccggctccggcaccggacgttccggccgaataccgttcgggggaggtgctggtgaaattcgcaccttacgtaagcgacatcctcgaccgggagggcatcacccgcagcggcggccccgcgacccgttcgggcattctctccgtcgatgagattctggacatcgtcggcggttacgagatcgagcgcgtcttcccggtggacccgcgcaacgaggagcgcacccgcgaatcggaactgcacctgtggtacgtggtacgcttcggcgaggagtataccgccgccgaggtcgccgagagattctcggcgctgggcgaggtgcagcacgtcagcgtcaaccgcaccatccaccgcgcctacaacgccggcaaaaaggcggcgcccctctcccgcaagacgctggaagccctccagcagcagcgcgcgacccggacgggcgaagcctcggcctatcctttcgacgacgtgctgctcccgcagcagtggcacctcgtgaaccgcggcaacatgttcggcgggaaatccatcgtggacgccgacgtgcagtgcgagcaggcgtgggaactctcgacgggcgacgagtcgatcgtcgtggccgtcctcgacgagggcgtgatgatcgagcaccccgacctgaagaacaacatgtgggtcaacgagaacgaaatctaccgctcgcacaaggacaacgacggcaacggctatcagggcgacgtctacggctacaacttcgtcaagaacacgggcgtcatctcgtgggacgacgtcaacgacaccggccacggcacgcatgtggcgggcgtaatcgccgcgcagaacgacaacggcatcggcatcagctcgatcgccggaggccggggcagcatccccggcgtgaagatcatgtcgtgccagatattctccggcgacgccgccggcaacgccctctccacggtcaaggccatcaaatacgccgccgacaacggcgccgtggtcctgcagtgcagctggggctacgtctccggactggccaacagctacgaatggggcgatcagggcttcaagacgcaggaagagtgggagcaggcctgcccgctcgaaaaggaggcgctggagtacttcatacacaacgcagggtcgcccaacggcccgatcgagggaggtctggcgatcttcgccggcggcaacgaaaacgcccccatggccggattccccggcgccgcagactactgcatctcggtctccgcgacggccgccgactacacccccgccgtctatagcaattacggtccgggcatcacgatagcggctccgggcggcgatcaggactactattacgaatacttcgacgacgaccacaagcgcggcgagatcggctgcgtcctctcgacgctgccctacaacgtcagcgaaagcggctacggatacatggagggcacctcgatggcctgcccccacgtttcgggcgtcgcggcgctgggactctcctacgcggccaaactgcgccgccacttcacggccgacgaattcaaggccctgctgcatgagaccgcgacgccgatcgacgactacatgagcggcatgaaactctactaccgctacgtggccgacgtggggctgaaccagcccatgcagctcaacaaatccaactaccgcggacagatgggcgccggtcaggcgaacgccgccaaactgctcaacgccgttgccggcaacggcacgcaggtgtcgttccccaacctctacatcaacctcggcggcgaagtgacggccataccggccaactatttcctcggcggcgagacgatgacctatacggtctcgatctccgacacgacggtcgcaacggcctccgtcgagggcaggaaactgacggtcaagggactcaggagcggcacgaccaaggccagcatcacgtcgagcggcaacgagacgcacaccttcaacatcacggtgcgcaaggtcgcgaacggcaacggctggctctaaacccgcaacgatgcgcaaaacagcgacgataacacgcatgcttctctgctgcggagcgttgtgggcggctctcgccgccccgccgctccgcgcccagatccgcatcgtcccgcgcgccaaactcgacagtctggcccacccggccacggccgcgggaggagccgaagctatgcgtttcgaacgcacgcagatcgacgccgggcatatcggcgaggacgacctcccgccggtctacaccttccggtggcggaatacgggcggcaagccgctggtcgtcacccgcgtgcagaccacctgcggctgcgcggcggcgagctgggaccaaaagcccgtcgcaccgggcggcgaaggcgccgtgacggtgacctaccgtcccaagggacatccgggagttttcgaccggcggattttcgtctacacccagctctcggacaaggagccaacggcgatcctcagcctccggggcgcagtcacggcctcggtgcgcacggacgacgactatccccatgcgatgggcgcgctgcggctcaagcagcggaccgtccgcttcggccgcaccgacaaggtgcagagcgagcgtatcgagtgcctgaacgcgggcgacaaaccgctgaccccgctctgcgacgaggggttcgcggcgaccggcctgagcttcgcctgcgaaccggcgacgctggcacccggcgcaaaaggcgatctggtcgtccgcttcgacccggccaaagccccgcagccgctccggcggactcccctgccggtcgggggaccggacgtgccgccgagtcagcgcatgttgtggatcgagttcggggaaacagaataagaaacaggataaaaacaagtcatatgaaaagatttttgagatttgcggcccttttgtcggccctcgcgctgctcggcgcctgcgacgacgatatgtacgtaactccgctggaggtgaccaacaacaacatcgcgggtacgtggcagctggccgaatggaacggcgcgccgctcgccgaaggcagcttcgtctacatcgaattcatccgcaaggacgccaagtacgtcatgtaccagaacctcgacagcttcggcacccgcaagctgacgggccgtttcgtcatcgacaacgacgcggagctgggcgcagtcatccgcggcagctacgattacggcgcaggcgactgggcgcaccgctacatcgtgaccgacttcaccgagacctcgatggtctggacggccaaggacgaccgctcggacgtgcaggtcttcgtgcgctgcgacggcattccgaacgaggtaaccggcggaaaaacagaagaataaaggaaataaaaagttcgcgccggaaggcgccggaagggatgtccggaccgggcgtccctttttcgtcgtcccggccgtccggaacgcccgcagagagccgcggagagccgcaggagttggcaatgcgcggaatttgcactatcttgcgcaaaattacgacgacaatgacacaggagctgcaattcatacctttcgaatcccgttcggacaaaggctgggccgaagcgtgggacctttacgaagagtcgttcccccgctgcgaacgctggaacgcgcaagggtacgaccgggcgttcggcgatccgcgcttcgaagccgacggcatctggcgcggcgaagagttcatcggcattctgttccactggaacgccggagcgtaccgctacgtcgagcatctcgccgtttcgcccgccctgcgcggtcagaacatgggttcgaaggcacttacggcattctgccggaaggtcggccgcgtcattctggagatcgacccgccggtggacgacatctcgatccgccgccgtcacttctacgaacggctgggcttcgtcgccaacccctacgagtacatccacccttcgttccgcaaacccttcacgccccatcagctgatcctgatgagctatcccggccccctgacatacgacgaagcccgcggtttcgcggacttcgtacgggagacggtgctcggctattcggagcacgaagcccccacgctgccgaaattaccgtaaaacggaggctccgggcagacctgtttacaagattccgaccagatatttggtgacgaaataaccgcccgccaccagccagacgtacagcaggcccgccaagacgaagggtttcgccccggcctgccggaacttgtcgatactcgtctcggtacccagcgccgtcatggccatcgtcagcaggaaggtatcggcgtattcgatcgcgccgttgagcggaatctcgcggacgctctccacgccgaacaggtattgcagcagcgaattgaggcagatgatcccgataaacccgaaggcgaaccacggcacggcgatcttgctcttctccttctgcgctccggaggtcttccggcggcggcccagcacgaagcccatgacgaccagcaccggcgcgagcatcatcacgcggatcatcttggtaatcgtggccgtccccgcgattcccagcgcatcggtcgggtccatcgcattgccggctccggccacatgagccacttcatgcagcgtactgcccgtgtagacggccacgcccgtgtccgtaagtccatcgagcagccccatccggtacatcagcggatagaggaacatcgagagggttccgaaaatcacgaccgtggagacggcgatggcggtcttgtaaccctcgcacttcacgaccggttcggcgcccagcacggcggccgcgccgcagatggcgctgcccgtcgaggtcatcagcgccgtgtcgcggtctatcttcaagagacggcccagcaggactcccccgaaaatggtgaccgtcacgatgaccagatcgacggcgacggccggaatgccgacagccgccacttcggtcagcgtcaggcggaatccgtacaggacgatgccccagcgcagcagctgcttggtgcagaacttgatgccggggacccacgtttcgggcagtttgttgcgaaggctgttggcgtagagcatacccagcacgatacccacgatcagcggactgaacgacaatctttttacgatgggaaagccggcgatgtagaaggccgcgaacgaaaacagcgcgatcagcagaattccgtgcagggtgttagccctgttacctttttccagcatatgcttgtatttttttaatggtcactataactttttctttattccgccggcaaaggtcgcatcttttaatggaatatgaaacaagaaatcattatacaccataacaaaaagttatactgaagagcaaacgggcggatcgtctccggaagcggcggcaggaagaagggagaaaacagagtccggaaccgcaacgctgaaaccgccactaaaactgcaacaaatacgctcgtcgagactgcaccaaaaagcccgtccgatcagcggtcggcccttgcgaattcgatgaactgccggacgagagccgacggctcggtttcgacgtgcacgaacacgaaatcgcgccgcaggggaaggtcttcgaggtcgatgatccgcagcacgccgctgcgcagctcgtccacgaccgagatcaccgaaacgatggccatggcgtcgctgttgcggacgaaagccttgatcccctcggtcgagcctagccgcatgaccacgttgagctgcggaatgcggatgcccgcgcgccccagcgccgccttgatgacttcgagcgtccccgatccgccctcgcgcagcacgagcggaatttcgcgcagctcatcggccgttatcgactcggtccgcgaatagggaccgcccgtgcgggccaccagcaccagctcgtcgggagcgaaaaccgtatagtgcagcccctgacggcggctcaggctctcgaccattcccaagtcgatgccgtgcccgccgagcgcctgctcgacctgatcgctgttgcccgacatcatcgcgacccgaacgcccggaaagcgcgtcgtgaatctggccagaatcggcggcagaaggtattgggcgatggtcgtgctggcccccagccgcaattcgcccacgggagcgtcggcgcagagactcatttcatactgcatgcggcggtagtcgtcggccagccgttcggcgcaggcgagcagggtctccccggccccggtcagttcgagacggctgccgcggcgcacgaaaagctgtaccttatattgggattccagctcgccgatgtgtttgctgacggcgggctgcgagatgaaaagccgttcggccgtccgggtgaagctgagcgtccgggccgccgtaatgaagactttgagtcggaaatcgtccataacgttccaaattaatgagacagaatcttttgcggcaaccggcggaattcacggccggaattcgggtgcacgacggcccgaaaaccgggaaccgcacgcggctgccgcgagcgcaccggaaccgcagcggccgcaggggtccggcagaaacgatacggcagaccccggaagccatgcagccaaaatcgggcggcggaaatcgccaaaaaggcaatcggcaaccaaaaatccggtgcagaaaccgccgcaaaacgattgaccaccaaaaaccggacgaacaaaagtcgctgcaagacgattgacagccggcaaccggtctgccgaaaccattgacaaccggaaatccggccgcagagaactgccggaaaccgccgcagcgcggccgctccggcggatcagccgagatggccctcgtcggcgaactcctttaccgacttgatatagtgtgcgatagtctcctgcatcgaaacgaacgatttacctccggcggcgttcttatggccgccgccattgaagtacttgcgggcgaagagattgacatcgacatctccgcgcgaacgcaagctgacgcggatgaacttgcggtgggccagaaacatggccgacatcttcatcttcttgaccgtcagggcgtagttcacgaagccctcgctgtccccctgctggaactggaagcggcgcatctcgttctccagcagcgacatgtaggccaccgtgccgtcctgaataatctccatcttgcggttgatggcatagccgaacagccgggcgcggccctcggtataggcgttgtagacgttgttgtgaatgtcgggaatgctgatgcccgtcccgaccagcacggccacggcgcggaacagctcaggcgtgaggaacgaataggcgaaattgcccgtgtcggtcatgatgcccacatagagcgcttcggccatgcggcgcgtaacggcctgcgcgccgaacagcgcttcgacgatggagtagaccagaaagcaggtgctcgacgaatcgggatgcgagaacgagaggtcgaaaccctcgtcgggcgaaaggtggtggtcgatcagcacgcggcgggccgtcgtattggcgccgatggtctcgctgaggatttcgagccgcgaaacggcgttgaaatcgagacagaagaggatgtcggctccggcgatggcgcgggcggcgcggccttcggtgtcgttcttgaagaccacgacctcctcgatgccctgcatccagtcgagaaaataggggtatttgttcggaacgacgcacgtcacctcatgtcccatcgaccgcagcgcctcggcccatgccagcgacgatcccacggcgtcgccgtcgggattggtgtgcgacacgatcacgatctgctgatgggcgggggcaagcagttcccgcaggcgttcgagacgctctttcgataactccatttcggctctgtttcgctaaatgatctttgcaaagatacaaaaaaagaagagatatgcaaccgcggccgcgggaacgtaccgaaatagcacgtttccatactccggaaagccggcggccggcgatccggtttcggggcggcggttgtcggttcggtatttttgcgtagctttgcatacacaaaaaaacgcattatggcttgttgtcttcaggtggagaacctgaccaaatcgttcggcgatctggtactcttcgaaaatatatcgtttgcgatcgaggacgggcggcgcgtggccctcgtcgccaagaacggcaccggaaaaaccacgctcctgaacatcatagcggggcgtgaggatcacgacggcggggaggtcgtaccccgccgcgatctgaggatcgcctacctcgaacagagtccggaatacccggcggagatgaccgtgctggaagcctgcttccactcggagaatccggcgctgaaggccatcgccgaatacgaacgggcgatcgaagagccgtcgggcgaaggattgcaggaggccatggcccgcatggacgcgctcgaagcgtgggattacgaacagcgggccaagcggattctgtcgcggctgaagatccgcgacttcggacagcgggtcgggaccctttcgggcggacagctcaagcgcgtggcgctggccaacgcgctgataagcgagtcggacctgctgatcctcgacgagccgaccaaccacctcgacaccgatatgaccgagtggctcgaagagtatctcacggcaagcggcgcggggctgctgatggtgacgcacgaccgctactttctggacaaggtgtgcagcgacatcctcgaaatcgaggaccggcagctataccactacgcgggcaactactcctattatctggagaagaagcaggagcgcgagacggcgcaggcggcccggcgggagagcgagacgaatctctaccgccgcgagctggagtggatgcgccgccagccgcaggcgcgggcgacgaaggcccggtcgcgcatcgacgcctttcacgagctggaagcgcgcctgcagtcgacgcgcagccgcggcgaagtgcggctcgacgtcaaggcgtcgcggatcgggaccaagatattcgaagccaaggaggtcggcaaacggttcggcgagctggtgatcctcgacaaattcaactacaacttcacccgctacgagaagctggggatcgtgggcgacaacggctgcgggaaatcgacgttcctcaaactgctgacggggatcgaacgccctgacagcgggacgatcgaggtcggcgagacggtccgcttcggctattacagccagcaggggctggagttcgacgaggggaagcgggtgatcgacgtggtgaccgaaatcgccgagcagatcgacttgggcgacggacggcgcatgagcgcgtcgcagttcctgcagcacttcctcttcacgcccgaaacgcagcacagcttcgtggcgcggctcagcggcggcgagcggcggcggctgtatctctgcacggtgctgatgcgcaaccccaatttcctgattctggacgagccgacgaacgatctggacatcgtgacgctcggcattctggaagagtatctgcgcgcattcaaggggtgtgtgatcgtagtgtcgcacgaccgctatttcgtggacaaggtggccgatcacctgctggtcttctgcggcggaggcgaggtcaaggatttcacgggcacctactcggaatacgtggcgtggaaacgcgaatacgaagccgcacgccacgcgcaggaggcgcaggcccggcccaagccgcaggcggtgcggacgcaggcggcggacggcgcgccgcgcaaactctcgtacaacgaaaagcgcgagctggaggcgctggagcgggagattccggcgctggaagccgaaaaagcggcgctggaggagtcgctttcgtcgggttcgctcggagtggacgagctgacggcccagtcgcagcgcatcgcggagctgatcgggctgatcgacgaaaagacgatgcgctggctcctcctgagcgagcggtagtcgccggacgcagaacgaaaagccgggaaaacagagaacaggctaacagagcgagaaaaacgggcgggcggaagagcggagaaccgagacgggagaaaagcggaaaaccggccgcggccgggaaagcggggaaccggatgggaacagaaaagcgcaaagaaccggacacgaatggaagaacgggtaaccgggcgcaggcggcagaacgaagacccggataaacgaagaacggaaaccggacggaagaaaagcgggaaaccagccgcagccgggaaagcggggaaccggatgaaaacagaaaagcgcaaaaggacggataccgccggaaggacgggaaaccgaagcgaaagagaccggacgacttataaacgacaacggcggagcattcggctccgccgttgtcgtcttatccgggttcggccgtcgaatccggccgccgggttattcgagattgagcagcgtccggttttcgaggaccgtttgctgggctatgcgctggaggtattcggcctgttcgggcggaaggcccatcgtgcagtcggtctggtagggtttgccgtagatggtcgtgaagatcacgttggccgcgaggtagctgcccggcagcgcggggtgaaaacaatcctgcgcatagagcacgcagtcgggacgttcggcacgcacgcggcgccacgccatacccacgggggcgcaccacgcgtcgttgtcgtaggccatttcgaggtagctcgtaatcagccgctcctgcatggtctcgtagcggttgatgggcgggtattccggaatcgggaagcggttgccgttcttgtggccccacgtcatgtagaagatcacacgggcgtcgggtgaacccgcatgcacgaggctgtcgagcgtgcgggcctgcggatagacctcgcgggcgacctgccgcgtcggcatggcgggcgcggagctttgctcctgcaggacgacgtagtcccagccgcccgcggccagcgccttcagcagtttctggttcgtcaggtgaccggagaagcgttcgccgcctttgaggaagcgcgtgcaggagaccttcaccttctgcgtcgcggcgatctgctggacgatggccggcatgtcgttgtaataggtatagctgttgccgacccagagcacgcgcagcgaatcggcgtctttggcctgcccggcgaggggcagcagcaggaacaacagaatacggaagaggttttttgtcatatcgttgaagtttttagggttttcggtcggtggttcagtccttcggggccttatggtcggcggcgtatttgcggcaccacacggcgatgccgcactcgccgcacttcggagcgcgggccgtacagacgtagcggccgtggagaataagccagtgatgggccaccggcagcaggtgcggcgggatgttcttttcgagcgtcagctcggtctgaaggggcgttttggagttggtcgtcaggccgatgcggttcgagacgcggaagacgtgcgtatcgaccggcatcacctccttctgccacaacaccgcgcccagcacgttggccgtcttgcggcccacgcccggcaggcgctgcatctgctgcagatcgctcggaacctcgccgccgaactccgaacagagcatgcgggccatgcccgcgaggttgcgggccttgttgttgggataggagatgctcttgatgtaggggtaaatatcctcggccgtagccgcggccatatcgaagggcgtgggaaacgcctcgaacagcgcgggagtggtcatgttgacccgtttgtcggtgcactgcgccgaaagaatcaccgccaccagcagctggtaggggtcggtgtagtgcagttcgctctcggccacgggcatatgctccgagaaccatgcgattacgccgtcgtaacgttgtttggtcgtcataaatgctgttttttacgtcgaaaaagaattttcttcaccagaaaaatagccccctccgggcagaagacgagccgcggcgtccgccgcagatcggcccaccagcgcgcgaggtattcgccgactccggcccctttccacgagagcagccaaagccccaccacatgacggcggcgcagaatgcggaagcggttgcgcgaagccgtgaagcgttcgtcgaaccagaggctggtctccatcgccgaatcgcggctcgcaaggcgtcccctgtaggaatctccgtggctcacgctcccgaccatgcgccggtgcacggccgtcacgcggtctatgaagcgtattcgggaacggcaggcgaaccacagccacatgggccaatcgtcggtcagccattcgggatgctcctcagggcggatctcggcatagtaggccgcgatcagctcacggcgggccagcgccgtgcagttggggaccgaaatgccgagcagcatctgctcgaaatcggtatagtgccggtcgggatcgggtttcagggtcccttccgcctgccagtattcgtcggcgcccgtataacacatgccgcagccgggatcggactccatcagatcggcctgcatctgcagcttgcaggggtcggtccaccagtcgtcgccgtcgcagtaggccacgtatttcccgcggcaggcatcgaacgtgcggcggtagttggcccgccagccgacgttgcgggcgcccgtcaccagccgcacgcggccggggtatttcgcggcgtattcgcggcagatctccgccgttaggtccgtgctgcaatcctcgcccagcaccagttcgaagtcgaacgaggtctgctggctgagcacgctctcgacggcctgacgcaggtagggcgcgtggttgtaggtggtcatgcagaccgagacgagcggagtttccatcgcagttacagtttggtcagtttggcgaatttggccagcagggttttctcgcccacgctgtcgaaagccacgaccagtttatggtccgtggcgagggtttcgatgcgttggacgatgccgacgccgaatttggggtgttcgacgcgctggcccacggtgtagtcgccgctgacgggcatcgacgtccctacgggtacgccgccgtcgaccgcctgccgcacgcccacgcggcgcatgccgtcggtcgagggacgcggcgtctggacaagggccggatcgggtctgcccgcagggcgcgcgccctgcggagccgctgcgcgggcgaagcgccgggcaggaccggactggtcgtcggcggaacgcccgccgaaactgctgccccggccgccgaagccgccctgctgaccgccgttattgccgcctgcacggtcggcctgccgtttctgctggaagcggtagtcgaagcggcggcgcagttcgtcgatggccgaggggccttcgccgtcctgcgggcggcgcggacgctcctcgccggcgtcgaagtcggcgcggacatatttggggtcgatctcgcgcaggaaacagctcggacgcgagaactccatattgccccacttgaagcgcatctcggcataggagatcgtcgcctcgaccttggcgcgcgtcagggccacatagaacaggcggcgctcctcctcgatgccgtcgggcgactcggcggcccgctgcgaggggaaaaggttctcttccagaccgacgatatagacgtatttgtattcaagccccttggccgagtggacggtcatgagcgtcaccttgttgcggtcctcaggatcgtccttgtccatgtcggtcatcagcatgacgttctgcagccactcgtcgatggtcgcctcctcgtcctcctgccgttcgccgctgcggatctcggcgtcgcgctgctccttgaagagctgcatcgagttgagcagctcctcgatattgtccagcgccgaggtcgcctcaggggtattctcggtgcggtaggcggcgatgatgcccgaacgggtggcgatctccagaccgaagtcgtaaaggctcttttcgttgcgggccagagacaggccgcggatcatggcgacgaaatccgacaccttgcgggcgatagtcttctgcacgggatcggcggcgggttcggcgaccagcgtatcgaccgcctcccacatcgagacgccgcgcccggcggccagctcggcgatgcgctggacggtcgtgtcgccgatgccgcgcgcgggatagttgacgatgcgtttgaacgcctcgtcgtcgcgcggattgataaccagccggatataggccagcatatccttgacctccttgtggtcgtagaacgaactgcccttgtagatgcggtaggggatgccccggcggcggaggttgtcctccagcacggccgactggctgttggtgcggtagagaatcaccgcctcggaccactcgtcgcccgtctggcggatcttgtcgcgcaggtcggagacgaccatttcggcctcctcgcggtcggtataggccttgagaatccggatcggctcgcccttgtcgccctccgagaagcagtgtttctccatgcgtttggagttgcggacgattaccgagttggccgcatcgacgatggtgcgggtcgagcggtagttctgctccagcttgaagaccatggcgtcgggaaaatccttctggaacgagaggatattctcgatcttggccccgcggaaggagtagatcgactgcgcgtcgtcgcccacgacgcagaccttcgaatgcagctgcgaaaggcggcggatgatgacgtactgggcgtagttggtgtcctgatactcgtccaccagaatatatttgaactgctcctgataacgcgccagcacgtcgggagcgtcgcgcagcaggatgttggtctgcagcagcaggtcgtcgaaatccatcgcgccgttgcgcttgcagcgctggcagtagatgttgtagatgttgccgaattcgggaatctgcgcctgacggtcctcggcggcgtagaccgaattggcgaggtaggcgccgggggtcaccagacagtttttggcataggatatgcgcgaagccaagaggttgggcttgtatttctcgtccggaaggttcagctcgcggacgatggtcttcagcaggttcttgcagtccgaaggttcgtagatggtgaacgaatcggggaaaccgatgcggtcggcgttctcgcgcaggatacgcgaaaaaaccgagtggaaggttcccatgcggatatagcggctgcggttgtcggggatcatctgcgcgatgcgttcgcgcatctgctcggcggccttgttggtaaaggtgagcgcgaggatgttgaagggagccacgccctgctcgatcatataggcgatgcgcgaggtcagcacccgcgttttgcccgaacccgcacccgcgataatgagcgacggggcgtcgtaattcaccacggcggcgcgctgagcggggttcagaccttgtaaaataggtgattctttggattccatgacggcaaagttaataagaattgaataagtttttttcaaagaaaataatatctttgcattgcaaacgttaaaaaactaaatccgacggcaatacagcgaggttttcgccgtgcaggcgcaaaggctgcgggcagaatgtgcggggccggatttgtcgggcagagtgtgcggaaccgggtttgtcggcagaatgtgcagagccggggttttcgggctgagcatgcaggccgaatatgcggaaccggatttgtcggcagagcatgcggggccgggtttgtcggacaaagtatgccggaccgaatatgccggacgcggaaaagaggtaatgaaattcaacaatataaaacaatgagcgaagtcatcaacatcaaggaactcaacgagcgcatcgaacgcgaaagcgtcttcgtggatacgctccgtacggaaatgggcaaggtcatcatcggccagagccatctggtagacacgctgctgatcggcctgctgtcgaacggccacattctgctggaaggcgtgccgggactggccaagacgctggccatcactacgctggcgaaggccgtggacgccgccttctcgcgcatacagttcacccccgacctgctgccggccgacctgatcggtacgctgatctactcgcagaagaacgaggagttcgtcgtcaagaaaggccccgtattcgccaacttcgtgctggcggacgaaatcaaccgctccccggccaaggtgcagtcggcactgctggaagccatgcaggagcgtcaggtgaccatcggcgacaacacctatccgctgccgcagccctttctggtgctggccacgcagaacccgctggagcaggagggaacctacccgctgcccgaagcgcaggtggaccgtttcatgctcaaagccaaaatatcctaccccaagaagcaggaggagcgcgacatcgtgcgcatgaacctcgccgggggaggactccccgccgtcaacaaggtcatctcgcccgaagacatcgtcaaggcccgcaaggtcgtggaggacgtctacatggacgagaagatcgagaaatacatcatcgacatcatcttcgccacgcgcgaaccggcggagtacaacctccagaagctccagaacctgatcgcatacggcggttcgccccgtgcgtcgatctcgctggccaaggccgcacgcgcctacgccttcatccgccgccgcgggtacgtcattcccgaagacgtgcgcgccgtatgccacgacgtgctgcgccaccgcatcggcctgacgtacgaagccgaggccgagaacatcacctcggaggagatcatcaccgacattctcaacaacgtaatcgtaccctaacgatgcagcagaccgagaacgatattctgaaacgcgtccgtaagatcgagatcaagacccgcggtctttcgaacgagatcttcgccggaaagtaccatacggctttccgcggacggggcatgtcgttttccgaagtcagggagtaccgcgcgggcgacgacgtaagggacatcgactggaacgtgacggcccggtcgcgcaagccccacatcaaaatttacgaggaggagcgcgaactgacgatgatgctgctggtggacgtctccgcatcgcgcatgttcggatcgacggaccgcctgaagaagaacatcatcaccgaaatcgccgccgtgctggccttctcggccgcgcagaacaacgacaaggtgggctgcatcttcttctcggacaaggtcgagaagttcatccccccgaaaaaggggcgcagccacatcctgatgatcatccgcgagctggtgggcttccggcccgaatcgaccggcacgaagctttcggagccggtgcggtttctgaccaacgtcaacaagaaacgctgcacgaccttcatcctctcggacttcatggattcgtcgaaggacaaggccgcgctggacgacgcgctgaagatcgccgggggcaagcacgatctggtgggcatccgcgtatacgacccccgcgagacggagctgcccgacgtgggcatcgtcgagctgaaggacgccgagagcggccgcaaggtatgggtggacacctcgtcgcgggccgtgcgggagcactacgcccggacgtgggagcgacgcagcgccgagatcgactcgacgctcaagcacaaccgcatcgattcgacgatgatctcgaccgacggcgattacgtggccgaactgttaaaactgttcaaacagcgatgaaacgactttttgcaatagcactgctccttgcgggcgcggccgtccgggcgcagaacgcaccgacggtcacggcgcgcatcgagccggacagcatcatgatcggcgaccggttcgacctgacggtcgaggtggacaaggatctggtgcaggtggtgcagttcccggaattcgaaaacaaggagggaagccccctcgaactggtcaaggaccacccgatcgacacgctcgaacgcgacggacgccacctcaggctgcgcaagcgctacacgctggcggcgttcgaggagggcaagtggaacctcggactgccggccgtgctgtatgccgacaagaacatcgtcgacacgctccggacgcgcgactcgctctatctggaggtggccacgttccagatcgactcgacctcgcagtcgatctacgacctgaaaccccagcgcaacctgccgttccgtttcgcggaggtcagcggatacgccaaatggggcgtgctggccctgctgatgatactggtggcgctctatgcgctcaagcgcattctggcccgttacggcaaggggctgggcgacctgttcaagcccgcgccgccgcagccgccccacgtggtggcgatcaaggccctcgaagcgctgcacaaccagaaactatggcagaacaacaggcacaagcagtattattcgggactgacggacatcctgcgcacctacatcgcggcgcgctggggcgtgggcgccatggagatgacctccgacgagatcatcgaggcgatgcgcagcgaagagctgcccgacaaggcccggatggaccttacggcgatcctgcgcgacgccgatctggtgaagttcgccaaggcgacgcccgacggcgagcagaacgaagccgactacctgaaggcgttctatttcgtcgaggagaccaagctcgtcgtcgaagaggaggagccggagcagccggacccgatgcaaaaccaaaatgcgtaacaagatgtacagactcctatatatcgtatttctctttgccgccctcggcgcttcggcgcaggacatgcccgaacgcagcgaggtgcgccgcggcaaccggcagtacaacaagggcaattacgaaaagagcatcgagcgttacgagcgggctttggaggccgcacccgaatcgttcgaggcccgttacaacctcggaaacgcgctctacaaggccgaacggttcgacaaggccgagcagaccatgcggcaggcggcggccgatacgctgcgcacggacgacgagcgcgcccaagccttctacaacctcggaaacgcgcagttcaagcagcagaaatacaaggaagcgctcgaaagctacaagcagtcgctgcggctgaacccctcggatcaggaagccaaatacaactacgcctacaccaagcgtctgatcgacgacgacgaaaacggcggcggtggcggcggcgacgacaagaatcaggacaaagaccagaacaaggagcagcaacaggacggtcaggaccaacagaacggcgatcagcagaaagacgaccaacagaaggacgacaagggacagggcgacgacaaggagcagcagggcgacccgcagcagaaccccgcacagcccgacaaggagcaggagggcgatccgcagggagagccgcagcccgttccggccggcatttcgccgcaggagcaggagcagatgctcgacgccattcaggcgcaggaggaccgcacgcaggacaaactcaaggagaagcagggcgtcgtggtgcgcggatcgaaaaactggtaaaaaagaggaactatgcatttcgcatcaccatattatctgtggctgttgtcggcgctcgtgccgatgatcgcctactacgtgtggcgtacgctgcagggcggcgcgtcgatccagatttcgagcgtcgaaggggtcgtgcgcgcaccgaagaccgtacgctactggctgcggcatctgccgttcgcactgcggctggcggcgctggccctgctgatcgtggcgctggcgcgcccgcaggacgtcgagcgtctttcgcgcacgaacaccgagggcatcgacatcatgctggccatcgacgtttcgggttcgatgctggcgcgggacttccgccccgaccgcatcacggcggccaaggaggtggccggatcgttcatcgcggaccgttacggcgaccgcatcggactggtggccttcgcgggcgaagccttcacgcaaagcccgctgacgacggatcagggaacgctccagacgctgctggcacgcatccgcagcggactgatcgaggacggcacggccatcggcaacggactggccacggcgataaaccgcctgcgcgagagcgaagccaaatcgaaggtcatcatcctgctgaccgacggcgtgaacaaccgcggcgagatcgcgccccagacggcggccgaaatcgccaaggcgcagggcatccgcgtctacaccatcggcgtcggcaccgagggcatggccccctaccccgccgtggacatctacggcacgccgaccggaggaaccgtcatggcgaaggtcgagatcgacgagaaaaccctcaggtcgatcgccgagcagaccggcggacaatatttccgcgccacggacaaggccaagctcaaggccatttacgaccagatcaaccaactggaaaagagcaaggtggaagttacggaacacgtcacctaccacgagcagttcctgctctgggtgctggcaggtctggggctgctcgtgctggagttcctgttctcgaatctggtgctgaaaagaataccgtaaaacgtaatttgcaatgtttagattcgcaaatccgcaatatttctggctgctgccggtcatacccgcgctgatcctgctcttctggctggcggcgcgcaaccgccgcaggcggctggagcgcttcgggcgcatgcaggtattggaagagctgatgcccgaagtttcgaccgggcgtgtggcgctcaaattcatcctcttctgcgcggcggtcacgctgctcatactggcggcggcacgcccgcagttcgggtcgaaactccgcgaagagaagacgcagggcgtcgagatgatgctggccgtagacgtctcgaactcgatgctggccgaagatttcgaacccaaccggctggagaggaccaaatacgccatcaacaagctcttcgacggtctgcatcaggaccgcgtcgggctgatcgtcttcgccggggagccgaaggtgcagctgccgatcacctcggactaccgcatggccaaggccttcgccaagcgcatcgacccgtcgctggtgccggtgcagggcacggccatcggcaaggcgctgtcgcaggccctgatgtcgttttcgggcgaaaccgaggagaaccacagccgcgtcatcatcctcatcaccgacggcgagaaccacgaggacgacgcactggcggccgcacggcgcgccgcggagatgggcatacggatttacaccatcggcatcggcacgcccgaaggcgccccgattcagatcggcggcgaattcatcaaggacgagaaggacgacatggtcgtttcgaagctcaacgaggagatgctggcccagatcgccgacatcacgggcggcgcctatgtccgttcgagcaagcagtcgatcggtctcgacgagatcgtgaagagcatcaacgaaatggagcagagcgagttgtcggtgatgcgcttcgaagaattcaacgaacagtaccaatacctgctgctcgcggcaatcgtgttgctgctggcggagttcctgctgctcgaccgccgcaatccgctgctggcgcacctcaacatcttcagggaataacttacttcggaaagaattttatccgtaaaaaatacggtaaaggggggagacgatgatgcgtctccccctttgccgtttgccgcattcggagcaataaaagacaagcgtgaatcccggacggcgcgaaggctcgtcgtgtcaatatttaacaacaaaacaaacaggcaagagactttacatcacccgctacacccacgggtcacccccttcagaagagtttgcagggcaattttaaacaaaaaatccggagaaaatgcagcagaaatcatcaattttactatatttgaagcgatcactcagttcttttaaaccaatttctttaaagccttgccatgaaaaaaattcttctgatgattgtgccgctaatggcactgatcggatgttcgtacgacgatacggacatccaaaaacggttggacgacctcgacggtcagctcaccgaactgcaggcgctcgtcaaggcgctcaactccgacgtcacgacgctcaaggagcttgtcgccgggaaacggttcatctcagacgtacagcccggtgaagacggcggctacgtcatcacgctggtcaccgcggccggcgagacctcgacgatcaccatcagcgacggaaaagacgggacttcgtcggtcatcggggtgaaacaggattccgacggtgtctactactggacgctcaacggcgactttatcctcgacaacggcaaaaaacttcccgtatcgggcgtcacccccgaattcaagatcgaaaacagccattggtgggtatcctacgacaacggcacgacgtggaccgactgcggacaggcccagacggaccagaatctgttcaagtccgtcgccacgagcgaggacggcaagctggtttacctgacgctggccgacggaacggtgctgacgttcgagttgtacgtgcagttcggcatcgcgttcgacacggcctcggcgacgatccgcgtgggcgaaacggcggaaattccctttacgctgaccggagccgacgccaaaaccgacattcaggccctcgctgacggcgcatggaaggccgaagtgaaacgcacgggcaacgaaggcggaacgatcgccgtgacggctcccggcgacagctcgaccggcaaggtcatcgtgctggtcagcgacggcgacgccaagacgctgatgcgtacgctgacattcgtgtcgggcgtgctgaacgtctcgacctcctcgaaggaggcgacggccgcaggaggccccgtaacggtcgaggtggagaccgatctggattacacggcagcgattcccgaagctgcgaaatcatggattacgctggcagagacgagggggggggaaatccggaccgaaaccctgacctttaacgtcgcggccaacacggaaacccagtcccgcagcgccaacatcgagctggtggcgggagagacggtgatcgaaaccatcctgatctatcaggaagcctattacgacccggcccagatggtgctcaaggtcgaagcgaaggaatacagcagcagcgcctacaacaacaaggtctacctgcccctctacggcgccgtggacgtcacggtcaactggggcgacggccagagcgagccggtcgcagccacgatctcgaccgcggccgcgatggtgaaccacacctacgccgaatccggcatctattacgtaaccataagcggaaccacggagaaactctccggaagactcaccaacaaaaccgtggctcccgccattctcgaagtcagacaatggggcaaactcggcatgacgacgctggattacgccttcgcgaacacctcgctcgtaaccgtgccccagcccgaagaggacgccttcgccgccgtcacttcggtcgaaaacatgttttcagggtgtacgaagctcgaaaccgtgcccgaaggactgctggccggcgcgcccgaaatcacctcggtcgcctcgatgttctacaactgtacggcgctaaagagcgtcccggaaaaactcttcgaaaagacgacaaaagccacctcggcatccggcctgttcagcggctgcaaggcgctggaaagcgttccggcaggactgctggccgacatgcccgccctgaccaacctcggaagcatcttcaacaactgcgcatcgctcaagagcgttcccgaaacattcttcgccaaccagacggaagcgaacagcctcacgtcgggattcttcggctgcgcggcactcgaaaccctgcccgcagagctgttcaagaacatgaccaagctcaccaatgtcgcgtcgctgttcaaggggtgtgcaaacctcaaaagcgttcccgcaggactgttggacaccttcacggaggttaccaatatgacaagcctgttcagcggctgcaaaatgctggaagacctgcccgacgatatcttcaagaacatgggaaaggccaagtcgggcggctatctctacgaaggttgtatcagcatgacccaattcccctcgctgaaaaactgcgtctcgctggaggccgtccccgcgatctggaaagactgcacgcagctcgtggaggcgcctgcggactacttcccggaaagtgtgaaaaaaggcatatcggccgcttacatattcagcggctgtacggcgctcaagaccgttccccaagggctgttcaaagatttcgagtcggttacgaccatcagccagatgttcctcaactgcacgtcgctcgaatcgctgcccgcagacatcttcgacggcatgaagaagatcaattcggcaggcgcggcattcagcggctgcaccgccttcaccggcgaatcgccctatacgatggtgcaggacggcgagcagcaggtcaaggtgcatctctacgaacgcacgaattaccccgacatcttcggcgccaagatcttcacctcggccagcagttacaaggacaccttcaagggctgtacgcagatggcagattacgccgatattccgatcccgtggggcggcatcagcgacggcacgaaggccaagccgacgctcacgctgacggccgcgcccgccgaaggcaaggagtactaccagctgacgggcatcgtcaagagtacggagatgaaatcgggaaaggttctctgcacgacgaaagcgctgctcccggaactgatcgagcagatggagacgctcgaaaaggtgatgaaccgctacggcaaccccatcagctcggcagctgtgacgcaggccaattcggaagccggggccaccttcaatttcaacgtccaagccgacaccgaatacatcttcctcgcatcgggcaccaacgcccacggcacgaccatcgaacagaccgaggtgaagatcccggccgtaccgacgggcgaggccgactacgagcgttatatcggcacttggaccgtgacctcgacctcgtcggaaatcaacaaacagccccagacatacaccgtggagatcacgccctaccgcaccaacgaaagcttcagggtcaagggctggggcatcaccacgctgggcgacgactaccccttcctgctcaaatacaacgaggacggcaacgtcacgattccgacgttcgacccacagggcatgtacggcctgacggcatacgtatatctcaaataccacttctacgatccggcgcagacgccgccctacccgatctacaccaccgaccaagagctgatgaagggcagctacgacgcagccggcggttcggtacggttcgagggccagaagttcccccacaacaatacggaatacaccgtatgcggcatcgactacgccatctattcgggcggtcagtatgtcatttggccggatcttttcaaggccggatatacgctgcaggattatgcgatcgggccttacacgatgaccaaaaattcggcgtccgtaacgaagtccgaagtcaaggccgaaaccggcatcgcaccgcttgccggagcggagatgccgaaatccgcaaccccgacgggcgtacagcggctgatccgcaagtaacgacacaccgaaggtcctcagggacccgtcaaaaagagggatgcggccgtcaggccgcatcccttttcgcaaaacggacgcaacgcgacagttactcgacgatgatttcgtcggtgaagatccagccgccgggacggccgttgtgacgggctttcaggcggacgtaacgcgcctcggtctggcccgtccagccgaactccctgtagcagtcctgcttgaattcgacaggaatgtcgttcccgaccgtggcgaggggcgtgaagtgctcgttgtcgtccgagaccgaaaattcgaccgcacggggcatccagatatcggcgtagaagccctgcatgaaatcggcggcgatgcgccgcacgggctgccgctcacccagatcgacgaccagatcgacatcggtgtcgagccagcccagccagcgtcggtcgccgtagttccagccgccgcgcagtccgtcggtcagcgagccgtcgcccgcagcggcgtatttggggctgtagggcgtatggtaaatcacggtcttgccggtcgaaaggcagcggaggggttcgagcgattcgggacgcggccccacggcgttcttctgatcgaaggggtggtatccgcgctcctgaagccatgccacggcgtcgagcgcacgggcataaaagtcgtcgtaatccttcctttcaggcgcgctccaccccacttcggcgacggccagcaggcgcggccatatcatatgctcggcatgctcggcggtcgggacgtgctcgcaccagaggttgccctgcacgccgaggatcatcggcacgacctgagcgccgagcgaatcgggagccggatcgtaggaataggcctgttcgagggtcaggaacgccgcggcggcgaccggttcggtcgtaggatcgtcctgacagaagtcgaggtagcagtaattcgaaggggtcatgacggcatgatgtccggcggcggcagcggcgatgccgccctcggtgccgcgccacgacatgaccgtggcgtcgggcgcaagccccccttcgagaatctcgtcccagcccagcaggcggcggcccttggcgttgaggaaggtctcgatgcggcggatcatgtagctttgcagctcatcgacgtctttcagcccctctttgcgcatccgcgcggcgcatttggggcaggtgcgccagccctgcttcgaggcttcgtcgccgccgatgtggatatactccgaggggaagagtccgatcacctcggaaaggacgttttcgaggaattcgaacgtctgttcgttgccgatgcagaagtcggagttgagatagggtttcccgctgcacgaaagttcggggaagacggccagcacctcctcgctgtggcccggcatctcgatttcggggatcacctcgatatgcagggcgcgggcgtattcgaccacctcgcggatttcgtcctgcgtatagtagccgccatcggccgccggatcgtcgcggcggcagtagcgtttgccgccgaagttccacccctcccagtcgggatagggacgccatgcggcgatgtcggtaagggcggggtatttcttgatctcgatgcgccagccggcaccgtcggtcaggtgccagtggaagcggttgaatttgtagcgggccaagagatccagctgccgcttgacgaactccttgtcgcggaagtggcgcgagacgtcgagcatgaagccccggtagccgaagcgcggagcgtcctcgatcacaacggccggaatccggcggccgcagtgttcggccagctggcccagcgactgaagtccgtagaagagtccggcggcatcgggcgccgtgacggtgatttttccgcgggcgacgtcgaggcggtagctttcgggcgcgccgccctcggcaagcagcagttcgagaacggggatgtcgtccccggcggcttcggcgaaagagacggggaaaaagccgtcgccggaacgccgcatccacgccgcgaggtcggccttgtcctctccttcgaggttggtcgcaaagagcagcgtcgagggcatccggaaggcgccgtcgccccacgccacctgctgcggagcggggataatgcccgtcgaaaggtcgccgcgggagttcccgcatgccgcgaaaagcatgcatgcggcggtgaaaagcaaaagtcgtggtttcatcggtaagttttatggtgataagttcggttcttcgtacaaagatagcacaatccggcgccgcgtcaaataaatttgcctccgccggaagagagtatcgccatgccgggattcatctccgccggaagcaaacggtccgccgggaataaaaagcggaacaaaaagaagccgtgccccggcggcagtctcctgcaccggccgcacggcttccgttcagcggatcggaacgatatccgaaaggcggattacatccacttggtgtccatcatcgtcgggttggagcttccgcccacggcgtcgtagccgtgacccgtaaggtccttgacgatgttgccgccgccgtccttggcctcccactcgttcatgcgccagtaggcgaccagaccgttggactgcggatcgacgtaattcatgttgttggcgatctcggactggctcagggcacggctccagacacgcacctcggccatatagcccatcagcggacgcgacgactgccactgcgacagggcgccgataccgaagccgtagccgtcgttcgacgtcaggtccatggtctcgccctgcgtcgccgtaccggcagcgaactgaccgtcgatatagatgttccactccttggaattcgcattccaaacggcggctacatggtaccacttcttcgtatcgaacggtttggccgtagcggcgggctggtagttgtcacggcagatctgaagcacgttgcggtcgatcttcacgtcgccgaaacgtacggcgcaatggccctcgatacccatgaccgaagagttgtcggcgccgttggagaaggtatcgacaaagacacggcactcaagcgtcatctccttgagggccgaaagctcggtcgcttcgaggaacttgggcaccttgtacttgttgccgctgccgatgtagatcgccttgctgaatacgggggtcttcagcacgatgaaaagggtccgggaaggttccaacacggcaagaccgctgttttcgatccgctcgatgctcacgggcatgcagtaggtcgtaccctcctgaaagtcgtcgagcgacgtgacggtgaactcgacctccgacgaacggctgtaaccggccgaaatcaccacctcttcaccgctcaggctgtaactttcggcaggcggcacgacgtaattcttcccgtatttggcgttatactcctccagcaggtcggggcgcaacgaaatcttgattttggtatccttattcacgggcaccgaagaggagaccgaaatctccgttccggccgggggcgtatcgatggtgaccgacttggaaaccgtcttctgcgcatcggtcatgtaggccaccggatggatttccgccgtctcctgacagccgcaaagagcagccgcagcaaggacgaagggggcgattaaatatttcagtttcataacatacattttttctggttaataaatcgctagttggccgggccgtagatttcggcttcgttcatgctcgtatagcccgttacacgacccacgtaaacccggatatagcgggctttgaccgttctcttgaatttgaaccacttccagttctcggacagcaccggagtgaagggaacgccagccgaaaggctgtaccagacattgccgtcttcgctgtaggtgaggtcggtgcactgcggttcggaatcctgatagtagatatgccagcgcaggccggtcacgtcgttgacttcgcccatgtcgatggtgaagttgccgccgttgccccacgaataggaagcgctgcttgcataccagcagttggcatcgagcttgccgtcgaacatggccgccttctgcgcggcggagtcgcagttccaaacaccggtggcgccgctcgtcgcagtaccctgacagcaggtgatcgtccatgccgaggtcggagcgatcttcgagccgtcgagcgtcgtcgcgccgatttcgacatccattgagaccttcgtaacgaagacataatgtacggaaccctccttgacggcatatccggcgtcttcgatcggggcgatctcgatcggaatcaggtaatagcccttttcgatcgaagccggatcgacgtcgaccgcgatattaggcgagaagacctgattctcggtgcactgaaccggagcgatcttgaccagcgacggatcgagcggcttgtaattcgtgccgttcgcgtcgttgtaagcctgcacgagcgtattgttcacgttcagggaaatctgcatgtcattcaccacgggacgcgtgaaagagagcgacacctcgccgctgcgggacgtattgacggaaccgtcttcctcgacgaggaacgtgatgccggaagagtcggcagtcgagaaggccacgtcgataggagtcgtccagccgccggcgggattggccgcctgaatggccatgcgcatgtacttgtagggcatcgacgaagtgccgtattcgtactccatgtgataggctccgaagccggcgcaggcgccctgcgtggggttgaacgtcgccatgccgatcagcgacggcatcttgttgccttcgcggtcggtgaaggtcacgccgccggtctgccagtaggcctcgaaattctcggtaaagatatattgttcgggacgccagtcgccgatggcggccttgttgaaacggccctgaagcgtctcgtcgtactgcgagccggaagccttgctggctccgtaggcctgcacgataccgtaatcgaaacactgcgacaccgaaggatgcacgccgaaaggcacgccgtcgatcaccagcaggcggccggtgcccgaagccgggccgacccacttgctcagctccttaacgaagatggtcatgttgtcgttgtatgtacgcaggtcgggattgggctgatagtagaccgaaacaccgtcgaccagcggacctctgccgccccattcaggctcgtagtcgaggtcgatgccgtcgtactgatacttgtccatcgagtccttggcgtacgccttggcataggaggccaagccttcgggagtgacctctccgtccacgaggaactgttcggggacctcgtgcgcgaagatcgtatagatcaccttcgtacccatgatcttctggacgaactccttatcggccttctgctggggcgtgagcgtgtgccactggctccagatcgagatgatgtccatcgagtcgggggcgctgatcagacgcgactggtaggacgcgccgacggccgtccacgaaccgtaccagccgaaagccagtttgtgtttggtctgcttgtaggcgcggaggttctggtaataggcattgtcgcgcaggatgggcgactgctggtccggatgctggatgttgatccgctcaggcgtcgtctccttcgtacaggaggccaccgcggccaccagcacgagacaagctactgcatgtttcaatatatttttcatagtttactcaggtatagtttcaggttactaattctttttgtcccaccacagcttcgtgccgccgttgtcaggaccgccgagcagtttgacggcctcctgcacggccgcaccgttgttggagtattccgactgcgggaagaccatgcggcggatctgcttgttggtatcgacgccgctgctcggatagttgtaacgcaccgggaaaagccggggataacccgtgcggcggaattcggaccacgcctcggtgccgttggggaacatggcgatccatttctgggtgatgatgcgctcaagctgctcctcttcggaagcgccggagttccatttgatcgcaattttgcccaaggccgaaatattatacttggtattggctgccgaaacgtcggtgaaatcggtcggtttgctcgtttcgtcggcggcataccttgcggcggcatcggcgctcagaccgttttcgaggaaagacagctcgatacccttgttatagaactcctcggcggtaccgcccatctcggccgtccagccgcgcatggcaccctcggcgcgcaggaacgcaacctccgaggccatcatccagcgcaggggcgaatcggtggatttctcctgtacgttgggcgaggacatggccttgtaatcttcctgctggggattgggcattccgttggcgacaccgcggtattcgcccttgttgtcaccgtcggtaacgggctggaaataaaccggaagacgcgggtcgttgtaaccgttgagataggagtccatcgaagcgcccatgcgggtgtcgctgtagccgttccagatcttttcgagcgggttgatgaccgtaatggacccccagctctggaaaagcgcactgtcgtcggccgtctccatcacgccgtcgcggacggcttccatggcgtactgcttcgcaaggtcgggcttcacgtaacagatacgcatggccagacgcagcttcaccgagttggcgagcttgagccatttcgaataatcgccgtggtagagagcgtcgacctcttcgagcggcttggcgtcgggattgttctccacgacgtccttcagcaccgcaatcgcgctgtcgagcgtctcgaagaagtgcatatagcactcttcctgcgaattgtaggggttctccgtctcgccgaaatgcagcacgggcagcggaccgtagatatcgctcacgcgatgaagcgacatgactttcagaatattcgccacagcgaagatgtcatcgctgagcaaaccgttggcatgggcgtacttcagctgcagccaagcgggcatgacattggtgaacgactcgctgaaaggtacgttgcaccaattggtgccgttcagtgcataaatctgggtattgacaccgccgttccagttgttcgtgccggacatatagccggcgtagacgtcgccgatcaggttataggcagcctgatagcggttgttaggctcggtatccgaaccgctgcacgagtagacggcgtccatctgcatcgtggtaatgaacatcttgagatccacctcctgcgcggagttgggatcggtattgaagcgctcgaagtccccggtgcaggcggtgaacgccagacaggcggccgccagcgaaaggaatccttgtttgatattgtttcgtttcatagtcggttgagctttagaattggagttttacactgaatccgagggtgcggacgctcggctgcatgaagaagtcgactccctgatagtaggtactcgtcgaagcggtcacttcggggtcgaacggagccttgttgtagaacatgaacaggttgcggccgacgaacgatacgctcatattgaccttgttgcggaaccatttggagggcaggtcgtaacccagtgtaagctcacgcaggcggacgttggtcatgctgtagacatagtgcgaaagcatcgacatgccgtcgccgctgttggcatagaaggtcttggcgtcgggaatctgctggtcgtcggagatccatacgccgccgttctcgcgggcgtcggccgaatcctgcgaaacgccgaagcggtccatgagggcctgcgtggccgatacgccgcggccgccgatacgtgcgtcgatcagcacgccgagcgaaacgcccttgtaggagaactggttgttccagccccagcggaagcgggcttcggtgttgccggcgaagatgtaggcttcgggatcgggatcgagcagcacggtgttggagttgggatcgacgtagatatggcccttgtcgtcggtcagcaggcctttgacatagaagtcgccgatcgaaccgccctcgacgagcttgacgcggtagccgttgtaatccttattgacctccttgatgtcgaccagcgagcccgtatccggatcgcgggtgccttcgggaaccagctccttgatcttgttgcggttcatcgagaagttgagggtcgtggcccacgagaaatcgcgccatgtgttcttgtatccggccgaagcctcgataccccagttattgaccttgccggcgttgatgtatttctgtttgtagccggagctgggaggagcgtcgtaaaggaagagctggttgtaggtgttggtgttgtagtaggtcgccgtagccgagatcttgttgcccaagaacttgacgtcgagaccggcctcgaacgacttggtgcgctcggcttcgaggtgcttggccggggcgatggtcgccgtgctgacgacgccgttggtcagcgtgtagttgggaccggtgatgtaacgttcgggagcgttgcccacctcggcataggatccgcgcaccttgaggaacgagatgcccgccttcgagaggtcggtcatcgacgatatcacggccgaaaggcccaccgagggatagaagatgttctgtttgggcgtgaaggccagcatcgaggcccagtcgttgcggaccgaaacgtcgacgtagagcataccccgccagcccagctgcatggtcgcatacacggcctgaatctggtcgtggtagttctcctgcgtcgggaaactctgcgagttgtcggagatgatgttgttgtaggtgaacttgttgggaatgcccgccagataaccttcgtaacccgtcagctggttcttgttgtccatgatgctggcgccgaggttgaactgcagggagaaggcgttgtcgcagaagctcttgtcgatgctcagcagcacgtcgccgtagaggttgttgtgcgtcatcgtgcggttcaggtagctgccgtacttcgaagcgaagagcgtgttggtcgaagcgctgagcttgcgggtgtagttgatcgtcgcattatcggtacggatacggcccgtcaggctcatccagtcggtgatgtcgagcttcatcgtagcgttgaagctgtagcggtgctgacggttttcgttcagctcgcggttggtgatccaccacgggttctcgacgcccttgaggaattcgaggtcccagaactgctccatatagcgcgagtcggaacccggacgctcgtaaatctcgtatttgcggatgtcgttgccgcgcgggaagaggtagatgccgaccagcgggttgcggtactggccctgaacggtctggttgcgggtgtactgcttcatgtaggtcgcacccacgtcgagcgtcaggcggtccttgatcagcatcgtcgtgttgcggatcgagaagttgtagcggttgtagacattgttgggtacgataccgcgcgaattgacggcggaagccgacgcataggtctggttgcgctcggtgccggcggaaaggcccaccgagttggtctcgttgaatccggtctggaagaaatccgcgggatcgtacgaagtcggcgtggcgagtttgctgccccagctcatcatcggctcgatttcgctcgtgccgtaggtgttctggaatttgggcatcacgaagggatgggagaaggtcgtcgagttcgaatagttgacccgcacgcggccctccttgcccttcttggtggtgatgaggatcacaccgttggcgccctgagcaccgtagagggccgaagccgtggcgcccgaaaggatcgacatggattcgatgtcgtcggggttgaagttggcgataccctcgaagtcgccgccgtcgggcgtttcatacgtgccctcggtctggctcgaacgcaggctcggaagcggaataccgtcgatcacgtagagggcgttgttctcgccgttgatcgacttgacgcctcgcatcaccacgcgggtggaaccgccggcgcccgatgcgctggcattgatctgaaggccggccaccttacccgaaagggagttcatgaagttggcgtccttgaccgaagtgacgatgtcgccggccacctcctgcacattgtaggtcagcgatttctcggcgcgcttgataccgagggcggtcaccacgacggcgtcgagcacctcgttgtcttcgagcattacgacctgaaggggtgcggagccggttacgggaagggtttgcttggcatagccgatcagcgaaatttcgagcgtgtcgccgaccttggcctgcggcagcgagaagttgccgtccaaatcgacggcgacgccggtcgtcgtgccctgaatcagcaccgtggcgccgatcagcggcatgccctgagcatccttaacggttccgcttactccgccctgagcgctgtggggggggg

SEQ ID NO: 12084 - DNA, 84863 bp, Unknown
  gut microbiota DNA sequence
ctgcgaaaagtttgtcgagcagagctgtcagcggctcgtcctgcgcggaaacggtcactttgcggtcggtgtcgatgtccgacgtgttgtagacgaacgagcagccggtctgctgctgaatggtttggaaaacggtgacgatagcggcgtcccggacgtcgaggctgacgcgcgaaacggcctgctgcgtctgtgctgcggcatgagcgccgaagcatcccaatacgaaaatcgggatgagaagcagacaacggaaacatgcggagacggcatgcactcccctgcccgctgcaaggtaagtttttttcatggatctggatttaggtaagattttgaaagtagtttgtcaagagccgccgctgcgtacagcggcctgcgaaaacagacgtattattcttccataggctgtcagacggtttttaggttcgtattaggttatcgtttaggattcgggtagatttcgatgtcgttgccgacgaccttgtaggtgaacttataggtaagttgcagcaccgacatgatgtggtagatgccgtcctcgacgcggaagtcgccggagaagcgttcgctgcgcagggcatcgtccatgaagcggacgtcgacgttgtagtagcgtttgagttcggcgacgatctcggcgaaggtgtcgtgctcgaagcagaagcggccgtcgatccagttgatcgaccggtcggccgaaggttcgtcggtcagacgcatggcgccggtccgggtgtcgaagaccagctgctgcgagggacgcaggcgtacggcggccttctcgtcgcccgaagcgtaggccttgacggcaccttcgagcaggacggtggtgatgcggtggtcgttgtcgtcgttgcggatgttgaagcgggtgccgagcaccttgatgtcgagtccgttggtcgagacgacgaagggcgcctgagcgtcgtgctgcacctcgaaataggcctcgccgtccatcttcacgcggcgttcgcgcgaaaagaacggagcgatgtactcgacgctgctggcggagttgagccagaccttggtgccgtcgggcaacaccacctgcgaacgttcgcccagatgggtgatgacggtcaggggctgcgcaaggcgtttggaaagcgacacggtggtaacgcccccggccagcagaatcactgccacggcggcggcagcggcggcgcggagcgtgatgcggcgcagggagatgcggcgtccggcgtgcatgcggcgcttgaactgccggagcgaacgctcgacgtcgatgccgaccgtatcgttgatgcggtcgttgacatacaatatgtaataaatctcccccagcagtctgcggttggcggccgacgcgtcgtaccacgcttcgacggccgcggcttccgcagcattcagctcgcctctcaggtaggctgtcaatacttcttcgttgatctgtaaatcggtcatctgttcgcttgtctacatagtaatacaatccgtcggcagaggatgctaaacggaattcaaaaaaaatatggaattttcggtattttttcagtgcaggtccggccacaacagcaaaacgatgagcggccagtagtccttaagctcctcgcgcagcaggcgcacggtctggccgatccggtaattgaccgtctgcggcgacacgccgagcgcggcggcgatctccttgtgggtcttgccttcgagccggtgcatgcggaaagtctgctggaattcgggcggcatcttgcgcagcgcggccgtgagacgttccaccagttcgccttcaaggtaaaaatcgggatcgtcgaactcctcctcgtagtattcggcgagctggcggatcacgcggtttttgatcgtatcgcgcgacatatggttgatcgacttgttcttgacgatggtgaacaacagcgacttgaggggcatttcgggcagcagcgacgtgcggttttcccagacccacatcagcgtatcctgcaccagctcctcggcgcgggccggagcgacgaaacgggtggcgtaggtgcagaggggtttataatagcggcggaagagcgcgtcgaaacatttttcgtccccggcacgcagcaggccgacaaccgtacggttgtcttgcatgttgattgtttgcacgttatcagtcataagccgggttattcgcacgattcggctgccgccggagacggaatcagccttttagcaaaagtactatttaatccgatatttccaaaaaagttcgcccgcgccgcatcgggacggcccgcacggaggatggaaacgcattttccgaatatcgctgcccccgaagcgggaataccgccgaattttattacctttgcggtgcaggtccgctctgtcgctgccggccgtggccgggagaggaaagtccgggcaacgcagagcgccgcgcaagctaatgacttgatatccgtgagggtataggagcgtaacagaaaagaaccgcccacaagggatttcccggcgggtaagggtgaaaaggcggggtaaaagcccaccgcgggggcagcgatgtcgcccggcagtacgtctcgcgggttgcaagaccgtgtataccggcaattaagggttgctcgcccgatgccggggggtaggttgcttgagacggcaggagactgccgccctagataaatgacagaggtccggggttcgccccggaaacagaacccggcttacaggacctgcacgtacggaacgttctcgaatagagagcgttccttttttttcgggcgcagccttatccgcatctgcgggttttgccgcccggacgccctgcgttgcgattccccggacacgggtcgtacagattgctctgcggcggctgttcaggccgccggttttccccgcccttcggtccgccgccgcagtggtggcattttttttgacgcattgccgcgcaatggcgaatctgcgcgaacacatacggcaaagcagcggctacaaatggtggattctgggcatgatcatgctcggaacgttcatggccgtgctggacgtgacggtggtgaacgtcggactgccggcgatcatgtcggcgttcggcatcggcatctcgtcggccgaatgggtcatcacggcctacatgattacgatgacgatcatgcttccgtcggccgggtggtttgcggaccggttcggcaacaaacgcgtctacatgctcggactggtgctgttcacgctcggctcgtggctctgcggcaaggcttcgagcgacccgttcctgatcgggtcgcgggccttgcagggcgtaggcagcggcatcatccaagcgctgggactggcgatcgtgacgcgcgagttcaagcccgcggagcgcggtctggcgctgggtctgtggtcgatggccgcggcggcttcgatctcgttcgggccgctgctgggcggctatctggtcgatgcgtacagctggcacaagatattcgacgtaaacgtgccggtaggactgctggccgtcctgctcgcggcattcgtccagaaggagtggaaggaccagacgcgcagcccgttcgactggcaggggttcgcggccatcgtgctcttcatgccgctggcgatctatgcgctggcgcggggcaattcgcggtcgaatcccggcgggtggagcgcacccgaagtgatcggctgtttcatcgtcgcgggggcggcgctggcgtggttcatcgccgcggagctgcgcaatcccgcgccgctgctgcagatccggctgctcgcggagcgcaacttcggaatttcgatggccgtgctgacgctcttcgccataggcatgctcggcggcacctatctgctgccgctctacatgcagcggggactgggatacacggcgctggcggcgggaagcatgtttctgcccgtaggcgtgattcagggtgtgctctcggccgtttcgggttatctgacccgctatgtcaggccgctgctgctgagcgcggcgggcattctggtcatggcgctgagtttctggctcgccagccgtttcacgctccacaccacgcacggacatattctcttcatactctatctgcgcggcttcggcatgggacttacgttcgcgccgctcaacctcttctcgctcaagaacctcacccagcaggacatggccgcggcggccggcatttcgaacagcatcaaacagctggccggaagcatcggaatcgccctcctgacggtgatcctctcggcgcggacctcctaccacgccgcacacgagaccatctccgcggcgcagacctacgtcgaaggggtcacggacgccctgcgcgtggtggcggtcatcacgctggcggcgctgcttccgctgctgtgggtcttccggaaaaaacggccggaaaagagcggagtgaaaggtgcggcaaccccctcgccgggagaggccgtctccggcaaaaccgacaagacaaccatttaccggacaaaacccgaatagggcggcatccgccggacacaaataaaacgcctgcacccggagaaggatgcaggcgtattcgtatgccgggcagggtcattccagccccatgcgtttgcgggcgaagggcatgacccacgccggagcctgctgtttagacagcaggtcgcgcatgtattccatgtacggctccacgtggcggaagtagattttcaaaccttcgcagagcgagtttttcgggcttccgtcggcgccgcggtcgaagcggtgcttggggcactcgccacggcaggcgaagtagaatttgcagcgcaggcattccgagggcagcgtgttgcgtttgttcagaccgaattcgcggcgtttggccgtgcggtagatttcgtcgagcggggtctgggcgatgttgcccagtttgtattcggggtagacgaagtggtcgcaggagtagacgtcaccgttgtgctcgacgaccagcgcgtcgccgcacgtctcgcccatcgaacagacgcccggctgcacgccgcaccactgagccagcgaggcgtcgaacatctggacgtaatagcggcccacgtcgcccacgacccactggtcgaaaacgtcgcacagaaaacgcccgtagccttcggccgtgacggaccactcggccacccgcgcgccttcgcggtcgggggagacgatcagcggacggtggaagcccggcttgtcgacgacatgctccacggcgggcaggaactgcatgtatttgctgtggaccgtgtcgcggaagaaacggtagatctccgcgccgcggccttcgcagcggcggttcacgacgctcagcgtattgaattccacgccgcagcgttcgaacatccgcacggtctccatgacgcgcgcgaaggtcggcttgccgcctttggtaaggcggaaagcgtcgtgaatgtcttcgggaccgtcgagcgagacgcccaccagaaaattgttcgacgcgaacaggtcgcaccacgcctcgtcgaccagcgtgccgttggtctgaagggtgttctcaatgcgtttgccgtcggcgtatttccgctggaactccatggcccggcggtagaaatcgacgcccagcaacagcggctcgccgccgtgccagcagaactggaccgtatcgacttcgttggcgcagatgtattgtttgacgtaaagttccagcagttcgtcgctcatcacggcctgccggccgccgtactgcaccgccttgtcgaggtaatagcagtagtggcagtcgaggttgcaggccgagccggccggcttgagcatcgtcgagaaggcaacggggccggcctgcttttcggcgtcgcggaacgtgaagatgtctttcgatttcataggcaagcgggaaagtccggacaaaaataataaaatcccggcaatatccgccatgaatgttcaaaagagtctccgaaacggcaaatccggaaagccgccgcgacaccgcgaatggccggcgtccggaaagcggaaggagcgcggcgggtccggcacccggcccgcagagcacggccggagtggacaacggaaacaaaaaagtgaccatataaaggatttattgagatagtttttgtatttttggagccataaatccgttcaaaaaatgcactattcggacttggactccattaacggccggattttcaaccggacagaagtttcgctcggcgaagcggaactccgggaagtcgaggcctgctaccgttttctcgaagatttcgagcagggaaaagtaatatacggcatcaacaccggtttcggccccatggcgcagtaccggatcggcgacgccgacctgaacagcttgcaatacaacatcatacgctcgcacagctgcggcgcgggcgagacgctgcccgacatctgcgtgcgggcggccatgcttgcgcgcctgcaaacctttctcaacgccaaatcgggcgtacatcccgacgtggtgcggattctggccgatttcctcaacaacgaaatatatccgctcgtgccgcgccacggcagcgtcggcgccagcggcgacttggtgcagctggcgcatatcgcgctggcgctgatcggcgaatcggaagtctcgttccgcggcgaagtcgtccctgcggccgaagcgatgaaggcgtgcggcataacgccgctcaggctccgcatccgcgacgggctggcgctgaccaacggcacggccgtgatgacgggaatcggcatggtgaacctcgcgcaggcccgccgcctgctcgactgggccgtgaaggcttcggtgatgctcaacgaggtggtcgaatcgtacgacgacttcatggccgagccgctcaacgcctgcaagctccacgccgggcagatcgaaatcgcccgccgaatgcgcgaaatatgcgcgtcgagccgccgcctgcgcaagcgcgaaacggaactttacagcggcgacacgggagaggctccgaccttcaagcacaaggtgcagccctactattcgctgcgctgcacgccccagatactgggtccggtgctcgaaacgctcgaacaggcggagaagatactcgtcgaggagttcaactcggtggacgataatccggtggtggaccccaagacggggaccatctaccacggcggcaacttccacggcgactacgtttcgctggagatggacaagctcaagatcgccgtcacgaagatgacgatgctcgccgagcggcagctgaactacctcttccacgaccgcatcaacgagacgctgccgccgttcgtgaacctcggcaagctggggcttaactacggcctgcaggcggcgcagttcacggcgacctcgaccacggccgaatcgcagacgctttcgaatccgatgtacgtccactcgatacccaacaacaacgacaatcaggatatcgtcagcatgggcaccaacgccgcgatgctgacccgtcaggtgatcgaaaacggctatcaggtgctggcgatcgagatgctggcgctggtgcaggccgcggattatctggagtgcgccgcagaactgtcggcccagacccggcagctgtacgacgacatccgccgcatcgtacccaagttcatcgacgacacgcccaaataccgggagatcgccgccatcgaaaatttcctcaaacagcaagcatgaccgaaccgaccaaatatgcgctcgtcaccggcggaagccggggcataggccgcgagatatgtctcaagctggcccggagcggctactacgtactcatcaactaccgctcgaacgccgacgaagcccaaaggacgctcgaaggcgtccgcgccgcgggcggcgacggggagaccctgcggttcgacgtggccgcgggcgaagagaccgcggcggcgatcgcggcgtggcaggagcggcacaagggagccgtcatcgaggtggtggtgaacaacgcgggcatccgcagcgactctctgatgatgtggatggagccgcagcagtggcattcggtggtggataccggcctcggaggattctacaacgtcacgcgcccgctgctgaaggacatgctggtcaaacgtttcggccgcatcgtcaacatcgtctcgctgtcgggaatcaagggactgcccggacagaccaactattcggcggccaaaggcggcgtgatcgcggcgacgaaggcgctggcgcaggaggtggccaagaagggggtgacggtaaacgccatcgcgccgggattcgtacgcacggacatgaccgccgacctcgacgaagcggaactcaaaaagcagatacccgccggacgcttctgcgaggcggcggaggtcgccgatctggcgatgttcctcatctcggacaaagcctcctacatcacgggtgaggtgatatcgatcaacggaggattatatacctgacaccatggaaaacagagtagtcatcaccggactgggcatctggtcctcgatcggcaccagcctcggcgaagtgaccgaatcgctgcgcgaagggcgttcgggcatcggactggacccggagcgcagggagctgggatacatatcggcgctgaccggcatcgtcaagcgccccgaactgaagggggcgctcgaccgccgcaagcggctctgcctgccccaacagggcgagtacgcctacatggccacggccgaggcgatgcgcaacgcgggaatggacgaagcgtttctggcggccaacgaggtcggcatcatctacggcaatgacagcagcgcggccccggtgatcgagggcatcgacatcatccgcgccaagcggaatacggcgatggtcggttcgggaaacatcttccagtcgatgaactcgaccgtcacgatgaacctctcggtgatcttcaacctgcggggcgtcaacctcaccctctcggcggcctgcgccagcggttcgcacgcgatcggcatggggtacctgatgatccggcagggactgcaggagcgcgtcgtatgcggcggagcgcaggaggtgaacctctattcggtcggcagtttcgacgggctgggagccttctcgaagcgcgaatcggaccccgcggcggcatcgcgccccttcgataaggaccgcgacgggctggtgccgagcggaggcgcggcgaccgtgatactcgaaagctacgactcggcggtgcgccggggcgcggcgatactgggcgaagtggccggatacggattctcgtcgaacggcgaacacatctccgtgccgaacgtggacggaccgcgccgctcgctgctgcgctgtctggcggacgcgggcatgcagcccgaagagattccctacgtcaacgcccacgccacctcgacgccgctgggcgactacaacgaagcgctggccatcgacgaggtgttcggcgcgaacaggccctacgtcgcctcgaccaagtcgatgaccggccacgaaatgtggatggcgggagccagcgaaatcgtctactcgatgctgatgatggagcacggattcatcgccccgaacatcaatttcgcgcagggagacgaagccacctcgaagctcaacatccccgcccgcaaggtggacctcgccttcgaccgctttctgtcaaactcgttcggattcggcggaaccaactcgaccctcattatcaagaaatgcaaataaatcccacgcagacaatgacacaacaggaactcatcgaaaaaatcaataccgttttggccgacgaattcgaagtggagcaggaggtcatcacccccgatgcgccgctgctcgaaacactcgacctcgacagcctcgatctggtggacgtcgtggtgctcgtcgacaagaatttcggcgtgacgctcacgggtcccgacttcaaggagctgaagacttttcaggacttctacgacctgatcatcagccggacgaatggcaactaacgacaaacggtggagcggacgctcgcgcggcggatctttcggatacggtttcttcatcttcctgatgaacgtgttcggaatacgcgccgcgtacgctttcctctcgctggtagtcgtctacttcatccctttcgcaccccgcgccacgcgggccgtctggttctataaccgccgcatactccgttacggcgtcttccgctcggcggtcaaactctatgcccactattacgcgctggggcagaccatcatcgaccgggtggccatcggcagcggcatggcggaccggtacaagttcgagttcgagaattacgacgctttcctgcgtctgctcgacggcgggcgcggcgcggtgatcatcggcgcgcacgtcggctgctggggcacgggggccgggttcttcggcgactacgcccgcaggatgcacctcgtgatgtacgacgccgaataccggcggatcaaaaacgtcatggacaagcactgcaggcaggagggctacaaggtgatccccgtgaacgagggcggcatcgagtcgatcctgcggatcaaggaggtgctcgaccgcagggagtacgtctgctttcagggcgaccgcttcgtcgaaggcggcgccacggcgccggtgaccttcatgggccgcaaggccctcttcccggcgggacccttcgtcgtcgccgagaagttccgggcgccggcggtattctactatgcgatgcgcgaacgcggcaggcgttaccgcttcatcttcgacattccggaggcgccggacggcaaaaccccgaacgccgtgctcgaaagctacgtccgctcgctcgaagccgtggtaaagcgctatccgcagcaatggttcaatttctatcggttctggtcgtgagcgcatgtagcatattactcatttcggcaaaccgccacacgtcgccctaccccgtttatccgctcggaatttcctacctgaaaacctaccttgagcgcacgataagcgggatacgtgtcgatacggccgactgcaacctgctcacggacgaagagctggccgaacgcatccgcacgctcgcgccccgctatatcggggtgtcgctgcgcaacgtggacggcgccaattcgctcgaccgacgggggtttctgccggagtacaaggcgctgatcgacgtcatacgcgcggccagcgacgcacccctgattatcggcggggcgggattctcgatctatccgcaggcgttcatgcgggagctgggggccgattacggcattcacggcgagggcgaagggccgctggcggagctgatcggagccttggagcggggcgaaaccggggcagacattccggcggtctacacctgcgacggacgcactggaaacagacctacggaaaaccgtctcacggaaaacacacccacgggaaacgaacgcaccaacagccccaccggaaacgaacgcaccgaaaacggacggcgcagctacctgccggcgatcgaagtggagttcgagccggagctgaccgggtattactggaagcggagcggcatgctcaacatccagaccaagcggggatgcccctacgagtgcatttactgttcgtatcctcatatcgacgggcggtgcgtgcgcacgatggaccccgaaatcatcgccgaaaacatcctccgcgccaagcgcgattacggcataaattacctgttcttcaccgactcggtgttcaacatccgccccgaatacaacgtccggctggccgaaacgctcatccggcgcggaacgaacatcgcgtggggcgcctacttctcgccgcggggcatcgacgccgagcagatgcggctgttcagggcttcgggcctgacccacatcgaattcggcaccgagtcgttctgcgaccggacgctggaagcctacggcaaacgcttcaccttcggcgacgtcgtgcgggccagccggctggcgctggacaacggggtctactacgcccacttcctgattctgggcgggtacggcgacacgcgggagcatgtgcgcgaaacgatcgaaaattcgcgccggctggaatacaccgtcatgttcccctatgcgggcatgcgcatctatccgcacacccggctggcggagctggccgcacgcgaaggcgtcgtcgccccggacgacgacctgctggcgccggcctattacatcgccccggacttcgacttggaagaggcccgcagcgcggccgccgcgacgggcaaggcgtgggttttccccgacgacccgcagagcgcgctggtcgatacgctgcggctgaaacgaaataaaaaaggacctttatgggagtacctgagaaagccctgattgcggcggacgaaatcgtggaatacattccgcagcggccgccgatcgtcatggcggatgccttctacggcatcggcgaagacggatgcgcccgcagcgggctgaccgtatgcgaagacaacatcttcgtcgaagagggcgcgctcagcgagtgcggcctgatcgagcatatcgcccagtcggccgccctgcgcgcaggatacatggaccgcagccgcggcgaaaaggtgcggctgggatatatcggggccgtgaacgacctgaaagtccacgcactgcccccggtcggcagccggctcgtcacgacgatcgccgtcgaacaggcggtaatgaacgtaaccctgctttcggcacggaccgaatgcggcggaaagcccgtcgccgagtgccggatgaaaatatacatggaagagtgatggtacgcagaaaaacagccgaggcgagtctggtcggcaagacgtcgctgcgcgtaaggttcagcgaggtggactcgatgcagatcgtgtggcacggcgaatacgtgcgctatttcgaggacggacgcgaggccttcgggcgcgaattcgcggggctgggctacatggacatccatgccagcggatacaccgcgccgatcgtcgaactgcagctgcaatacaaaaagccgctgcgcgtaaacgacaccgccgtggtcgagacccgctatatcgccaccgaagcggcgaaaatatgtttcgaatacacgatccgcagcgccaccgacggcgaaatcgtcgccgagggaagctcgacgcaggtgtttctcgacgcccgcggcgagctgcagctgctcgcgccggagttctaccgcaaatggaaggagagatgggacgtgaagtagcggtctggtggggacccgacagcatcctgtcagcgctcggattcggcacgcgggagaatatggaggccgtgcgcgccgggaggacgaatctctcggcatggcacgacggcacacccgtctgccggatcgacccggaacggtttgcgcagctggcagcggagcgggcagtggcggaatacacgcccgcggaacgactggcgctgctgacgctcggcgaggtgatcgcccgatcgggcgtgtcgcccgcggacgaacggacgctcatcctgctctccacgaccaaaggcaacatcggcctgctgaacggcgatccggcgaaatgcgacctgaacgacacggcggaggtcgtcggaaggcatttcggggcggcgaaccggccgctggtgatctcgaacgcctgcatttcgggcgtgtcggccatcgtcgtcgcgtcgcggctgatccgcagcggcgaatacgaccatgtcttcgtcgcgggattcgacctgctgtgcgatttcatcgtcagcggattcaacgccttcaaatcggtaagtcccgcgctctgccgcccctacgacgcggcgcgcgacgggctgacgctgggcgaagccggcggcgcggtgctgctcacgaccgaccgagagctttcggccacgggcgtcaccgtggcgggcggcggcatctccaacgatgcgaaccacatatcggctccgtcgcgcacgggcgacggactcgcgttcgcaatccgtgcggcgctccgcgaagcgtcgctcggcgccgcagcgatcggcatggtcaatccccacggcacggcgacgctctacaacgacgagatggagagccgggcactgcatctcgcaggactgtgtggcacgccctgcaactcgctcaaaccctatttcgggcatacgctcggcgcttcgggcgtcatcgagagcatcgtcacggtgcacggactggccgaaggaaccgtcttcggcgtcaaaggctatgcggagtgcggggtgccctatccgctgaacataagcgcggaacaccgcacgacccggacggacgccgcgctgaaaacggcgtcgggattcggcggctgcaacgccgcggcggtattccggcgcgggacgggccggaacgcatacggcacgggcgaaacgggcagcacggacgagaatgccgcggcggagcgaagcgacgttttcggcggacgatactgcgacggagaaaatcccgcccgtcaggacgggacaaacggcgccgaaaccgaccgggacgacgcacagaacaaacgcaggcaggaaacagccggcggacaacccggattcaccggagcggacgaaagcagcgccgcagcgaacgtcggacagaaagagtgcgccgcagcgaacggaaacaacgtcataacaaacgccgggcaggcaggctgcaacgagacaggacggatacgcgccgcccgcgacacggcgcacgtggtcataacgcggcatccggaggtgccgttcggcgtcttcatccgcgagagataccgcgcgctggcagacccgaacatgaagttttcgaagatggacgacctctgcaagctggcatacgtcgcatcgtgcgaactgctggccgggcgacggcccgactgcccggccgaacggatcggcgtggtgctggccaaccgcagcgcatcgctcgacagcgacatgcgccatcaggccgtcatcgacgccgacgacgggggcggggcctctccggcggtgttcgtctacacgctcccgaacatcatgctggggcagatcgcgatcaagcacgggctgaaaggcgaaagcactttttttgcgttccccgacaaaagctgtaactttatccggaaatacgccgaaggactgatcgcccaaggacgcatggacgccgtcgtgtggggctggtgcgaactctgcggcggggagtacgactgtgaactgacattaaccgaaaaactcgaatagatacgatggaaaatctggaactgcaactcaaacagcagattatcgaagcgctgaatctggaggagatcaccgccgaagagatcgccaccgacgcgccgctgttcggcgaaggactcggactggattcgatcgacgccctcgaaatcacgctcctgctcgaaaaacactacggcatccggctggccaacccggccgaagccaaaccgatattccactcggtcgccacgctggccgactatatccgtaaaaaccgcaaatgaacatagccgtccggggcatagggatcatctcggcactcggcaacggggccggggagacgctggcggccctgcgggccggacgcagcgggatcgggaagctgacgcttttccgttcggccgtcgacgtgcccgtcggcgaggtccggcacgacaaccgggcgctcggcgaactgctcggcatcccggcgcgcgagaccccttcgcgcacggccctgctggggatgatcgccgcggcgcaggccgtggccgatgcggcgattcccgccgcggcgcgcgtggcactcgtttcggggacctccgtcggcggcatggacctcacggagaatttctaccgcgctttcaggtcggacaacggcagaggacgcctgcgctcagtggcggggcacgactgcgccgacagcacccgccggatcgcggagtactgcggcatcacgggttacacggcgaccgtcagcacggcctgctcgtcggccgcgaacgccgtcatcaccggcgcgctgctgctcgaaaacgacatggccgactacgtggtggccggaggcaccgacgcgctgtgccgcttcacgctcaccggattcaactcgctctcaattctcgaccgggagcggtgccgcccgttcgacgccacgcgcgcagggctgaatctgggcgaaggggcgggatatatcgtccttgcgcgcgaagcgccgggcatgcgctcctactgccgccttgcggggtatgccaacgccaacgacgcccaccaccagaccgcttcgtccgagacgggcgagggagcgtaccgcgccatggccgaagcgctggcccggagcgggctggagcgcgtggactacatcaacgcccacggcacggcgacgccgaacaacgacctgaccgaaggcaccgccctgcggcggctgttcggcgagcaggtgccgccgttcagttcgacgaaaggcttcaccgggcacgcgctggccgcggccggcggcatcgaagccgtgctgtcagcgctggccatcgggcacggactgcgctacggcaatcccggattcgcggagccgattccggagctggggctgcggcccgtcgcggagacggaatccgcagccgtaaattcggtgctgtccaattcgttcggattcggcggaaactgttccactctgatattcgcaaaatgaaggcatacgtcaattgcataacatcgggcgcggagctgcgcagcgacatcaaggtcctgattcccgaaatgaatctgcggcggcggatgagccgcgtcgtgaagtcgggcgtggccgccggcatcgaatcgctgctggaattcggcgcacgggcgccgatcgacgcgataatcaccgcgacgggactgggatgcatcgctgacagcgagaaattcctcgacgggctgatcgcaggcgatgagacgatgctcaaccccacgccgttcatccagtcgaccttcaacacggtcggcgcgcagatcgccctgctgcgcggactgcactgttacaacaccacctacgcccaccgctggacgagtttcgaaaacgcgcttacggacgccgcactgcgcatcggcgcgggctggtcgcgggccgtgctggtcggcgcattcgacgagacgacgccctcggtcgagaaggttctgcagcggctccgcgtcgcacaggaggggagatggggcgaatcgtcggtattcttcgtgctgacggccgagcggttcgactgttcggtcgccgaaatcacgggaatccgcattccggccgggactccggcggcggacggcggatatccggcgggcggagaaacagacggagaagagaagccccgcgccgaagaaaccggcggaaaggcacacgaaagagaacccggcggaaaagcatacgccagagcgacctgcgaaaagagatacgaaagagagagcggcggggaaaaggaccataccgaaaacccctccggaaagacatacggaaacgaaaacgcctgcgtcggggaatccggcgcggaagcgtccgaaggccgggcgatacgggcttcgcaaaccggcgtcaagccgcactttacagcgatcgccgaggtattccggcaggcggtcgcggagaacgccgggcataagatcacgctttacaacgacttttcgggccgcaccgaatcggccatggaactgacatgtatgtagccgccgtcataatcgccgcgggattcgtcctgttctactgctcctaccagatacggctgggggcgtacgtccgcacgctgtgccgcaaccgggccgcgggacgggtcgtcgcgctgacgttcgacgacggaccggacccggagataacgccccgtgtgctggacctgctccgggagaggggcgtaagagcgacgttcttcctcgtcggcgccaaggccgagcggcatccggaactggtgcgccgcatcgccgccgaagggcacgatacaggcatacacacttgggagcacgcagccggattcccgatgcggagcagccgggcgatgacggccgacatcctgcggtgcagggagtcgctccggcggatcgccggcgtggagacgcaccttttccggccgccgttcggagtcaccaacccgatggtggcgcgggccgtgaagcggacgcagagccgctgcatcgggtggagcgtccgctcgttcgacacgcttctgcaccgcagccgcgaagccgtggcggagcgcatagcccgccggctgggcgacggcaaggtgatcctgctgcacgacgaccgtcccggcgcggatcggctgctaaggctggtcctcgacgacctgaagcggcgcggctacggcacggcgaccgtatgcgaactgtttaaaatcgaaaaaccatgaaaataacctccttgctaattcccctcgcgctgctgtcggcgctgacggcccaaggacagctgcccgactcgttccgggagcggctcgcccaagccagccgcgagaacaagaccattcagtgcgacttcacgcagcaccggcaggtgcgccggatgaagggcgaaatcgagctaaaaggccgtttctactacgacaacgccaaagccatggcgctcgaatacaccgtgcctgcgggcgacaaggtcatcatccgcgacgaccgcatcatcctcaggaccgccgggcaggtgaccgaaacggccacctcggccaatcccatgctgcagcaggtcgcgctgatgatccgcgccagcatgacgggcgacctctcgcagttcggcgaggggtggcagatcggctacgacgaaacggagggcgcggggaccgtacggatggtacccctgtcgcgccgcgcccgcaaatacatcgactcgatcacgctccgcttcgacttggagaacatgacgctcgaccggatggagctgaacgaaaccgaaggcggacattcggtctacgagttccgcgacaaacgattcaacctcgcggtcgatcccgcgaaattcaacccctgacctccgatcccgactcagatgcagaaactcttcagcgacatagacaactacctctcggcagaggaccggctcgcgttccgggtccggctcgatgcggcgcatccggtctacgcagggcacttccccggcaaccccgtgctgccgggcgtctgcacgctgcagatcgtccgggagtgtctggagcgcggcacgggacgcaggcaccgcttcacggcgatccgcgaatgcaagttcctcggcatgatcgttccgcaggcggacactctgctcgacatagacatccgcctcgcagacgacggcacggcggcgaaaaaagtgacctgcgtcgtcacgaacaacgaaaaaacggtcctcaaactcaaggcgaccgccacccctgaaccatgacgaacgaccggaacgacatactggcggtgatcccgacctacaacaacgaaaaaaccgtcgcccgcgtgatcgccgacgtgcgccgctactgcgcgcacgtgctggtcgtaaacgacggctcgaccgattcgacggcgcagatactggccgccgagggcgtcgagaccatctcttacgccccgaaccgcggcaagggatacgccatacgccgagcgctgcgccatgcgggcgaacacggctaccgctacatgataacgatcgactcggacggacagcacttcgcgtcggacatcccgaagttcgtcgaagagatcgaaaagacgcccgacgcgctgctggtaggcgcccggaacctccgctcggacaacatgccgggcaagaacaccttcgccaacaaattctcgaacttctggttccgcgtcgagaccggcatgcggctcgacgacacccagtcgggattccggctctatcccgtacggcggatgaagggcatgcggttcctgacgcgccgctacgaattcgaagtcgaggtgctggtgcgggccgcatggcggggaatcgccgtgcgcaacatccccgtcaacgtcttctaccccgaaaagagcgaacgcgtgacgcacttccggccgggcaaggacttcacgcgcatcagcatcctcaacacgttcctcgtgctgggcgccctgctgttctactatccgtggcggttcctgcggtcgctcaccaaagagaatatccgccgtttcgtgacggacaacatcacccgttcgcgggattcgaatccgcagctggccgcctcgatcgggctgggaatcttcttcggcatcgccccgctgtggggctaccagatgatcgcggcgggagttacggcccacttcacacggctcaacaaggccgtggcgatcctcagttcgaacatcagcatcccgccgatgatccccttcatcctctacggcagctactggactggcgcgcaggtactgcggcgcggaatgccgctgtcgctgtcggacatcacgctcgaaagggcggccgccgacatgttccagtacgtcgtgggcagtttcgtcatggccgccgtatgcgcggtcgcggccgcggcggtcagctacgccctgctcgtcttctgtaaacgcacgccccgccatgaataagttcttcatcgccctgtacgacctcttcgaatcccgccgcgcactgctctatgcgctgctgggagtgctggtcgtggcgatggcctcagccgcactgcggctgcggttcagcgagaacatcaccggatttttccccgacggggagcggaaggcggccgcggcgttctcgaacctgaagatcaaggacaagatcgccgtgatgataaatgccggcgagaatgcggccgacaaggccgacgagatgatggcctgcgccgattcgctggcggcgcggctcaacgccgacacgcttttcaggcgttatgccgaagtcgaagcgaccttcggcagcgaactggcggacggcatgcggtcgttcctgcagggcaacctgccgctgctgctttcggaagcggattacgcccgcatggacacgctcgtcaccccgcggggcatcgcgcaggcgatggagggcaactaccgccgcctgctgtcgcccgtcgggggattcatcgacgaatacatctacgacgatccgctggggctgtcgttcggcgcgctgggcaagctgcaggagctgaacatcggaggcagctacacgctctgcgacgactacctcttctcgaaggacatgaccacgctgctggtcttcatatcaccgcactaccagagcggcgacacgggcgtcggcgaccggctgatcgagcggatcgagtcggcgctggaggggctgaacgccgaatacgccgccgcaggaatcacggcggactattacggcggacccgccgtggcggcctacaacgcccgccagatcaagcgtgacatgatgctgacgctcaacatcgccatcctgattatcgtggcgttcatcaccctctcgttccgcaacaagttcgcggtcctgctggccctgattcccgtggcgctcggcgcgctgttcgcgctggcgatcatgtcgctgacgtgtcatacgatttcgtcgatcgccgtaggtgcggggaccgtcgtaatgggcatcgcgctgagctattcgatccacatactctgccatgcgaaccactgccacgatccgcggcagatcatccgcgatctggcctatccgctgaccatcggcagcataacgaccatcggcgccttcgcgggactgctcttcaccgattcgcagctgctgcgcgacttcgggctgttcgcatcgctgacgctggtcggaacgacgcttttcagtctggtgctgcttccccacctgatccgtaaggagaaacgcgggggggggtccgccgtgctggaacgggtggagcggctcacgggaatgcgtcccgaccggaaccgcccgctggtggcggcgatcctgctgctcacgttcatatgtctcttcttcttcaaccgcatcggcttcgacagcgacatgatgcacctgaactacgacccgccccggctggccgccgcgcagcagcggctgagcaggctgaccgacgaagacggcgaacggtcgaaggtgctcttcatcaccacggccgacacgccgggcgaagccgtcgcgagctacctgcgcatgggccggcggctcgactcgctcaaacaggccgggaaaatcgactcccacgccggcatcgcatcgttcgtggtggacagcgccgaacagcagcggcggctggagcggtggcgccggttctggactccgcagcggcgggaagcggtgcgcgcggggattcgggaggcggaaaaacgctacggtttcgccgacggcgcgttcgacggcgcgctgaagctggccgaaaaggagtacggcccgctcgactacgcgtccgcggcggcgcgcgaggtattccgcgagtggatcgacgggcaggagaggtcccccatcttcctgagccacgtgacgctggctgacagctgcaagcacgaggtatacgcggcgttctcggcgacggacgacatcgtagccgccgaccgggcgttctacgccgggaaaatggcgcggagcgtgaaccgcaacttctacctgatactctcgatctcgtcgatactggtcaccgcggcgctgttcctctgctacggccggatcgaactgacgctcatgtcgctgctgccgatggccgtcgggtgggtcatcatcctcggactgatggccatgctgggcatcgagttcaacatcgtgacgatcatcctctcgaccttcatattcggcatcggcgacgacttcagcatcttcatcatggacggcctgctgagcgaatacaaaaccgggcgcaggatgctcgacacgcacaagacggccatcttcttctcggccttcacggtcgtcgtgggactcggagcgctgatcttcgcgcggcatccggcgctccattcgttggcgctgatctcgctcttcggcatcgtcgccgtggtgctggtatcctacaccgtacagcccgtgctgttccggatgctcgtctcgtcgcagaccgaaaaaggcggcgcgccctacacgctgggcagcctcatcaacaccctctacgcattcggactgttcgtgacgggatgccagctgctgcaggcgctgatcttcacgctctggccgctgccgatggcgcgacgacgcaagcagcgcatcgtgcagtggtcgatccaccacatgacgcggggattcctgcgggcgatggtcaccaccaaaaccatccgcctgaacgacacgggcgagacgttcgccgaaccggcggtggtgatcgccaaccaccagtcgttcatcgacatcctcgtactgctgagcatctgccccaaggcggtgatggtgaccaacggctgggtgtggcgttcgccggtcttcggacgcatcgtccgctatctgggcttctaccacgccgcggacggatacgagcacctcgccccggcgctcgcgcagaaggtcgcagagggttacagcgtcatcgtcttccccgaaggcacgcgctcggccgacggcaggatcaagcgtttccacaagggcgccttctacctcgcggcggaattaggactggacatcctgccgatatgcctctacggcaacggcatgatctcgtccaaacgccagcccatctacatcaagcacggactggtcgtgagccgcatcctgccgcgcacggcctgcggcgaccccgcggactactccgcgcaggccaagtccgcatgccgccagatgcgccgggagtaccgcaaactctacgagacctacaaccggccccgcaacccctatttccgcgacatgctcatcaagagctacacctacaaaggccccgtgctggagtggtacatgcgggtcaagatacggctggagaagtgctacacgctcttcgaccgcatcgtgccgcgcgaagggaccgtcgtggacctcggctgcggatacggaccactgagctacatgctcgccatgctctcggaccgccgccgcatcgtgggcgtggattacgacgcggagaagatcgaaacggcgcggcacagtttcctgcggcggcccgaaacggagttcgtccacgccgacctgcgcacggcggagctgcccgaagccgatgcgttcctgctgctcgacgtactgcactacatgcagcccgaagagcagcgcggactgatcgcacgctgtgcggcgcggctcaaggcgggcgggcggatcatcatccgcgacggcgacgcggggaaggccgaacggcacaagaccacggccatgaccgaagtgtggtccacgaagatcgtcggattcaacaagacagacggcgaactgcacttcacctcgacgccggaactgcagcagacggcccgcaggctggggctggagatccacgcggcgcacacggacgcgcacacgtcgaatacggtttacatactgacccgaccggaataagatgcaggaggagttcgacataatcgtcatcggcagcgggctgggcggactggaatgcggcgtcatgctgagccgcgaaggggtgggcgtctgcgtagtcgaacaggcggcggtccccggcggctgcctgcagtcgttccgccgccgcggccatttcatcgacacggggatgcactacgtgggcagcatgcagcagggcggcatcatgcgccgctatttcgactatttcggcatcggggattcgctcgaaatacggccgctcgacgaagcgttcgacatcgtatcgccgggcggagccggagagttcgcctacatgcacggctacgacgaattccggcggcacctgacctccctcttcccgcgcgaggcggcgggaatcgcccgctactgcgacaaaatcagggagataggagacagcataggcatcgaagtgcaccgttcgggacggctgtcgtccggcggggtgaaatacctcggcgcatcggcggcggagttcatcggcgaatgcgtcgccgacccgctgctgcgcagcgttctggccgggaccaaccccctctacggcggcgtgcgggagcgttcgccgctctaccaccacgccatgataaaccattcgaacatcgaaggcgcctgccgcttcgccggcgggacgcagcatatcgccgacgcgctggcggccaaaatccgcgagcacggcggcacgatcctcaccggatgccgggcaagcgcgctccataccgaaggcagacgcatcacgggcgtggaactcgccgacggcaggatactgcgggcgaagagcgtcatttcgtccatccatcccgcggcgacgttcggcctgatcgggccgacgccggtgctccgccgcgcgttccgcgaccggatggccggcatgccgggcacgtacggccttttctcggtgtatctgctgctccggccgcaaagttttccctatatcaaccgcaacctctattattacgccgagggcggagacgtctgggacacgctcttcgacacggaggccatgcgtctgaaaatggtattgttcagcgcgcagccgccgtgcgccgatccggcgtggagcgaggtggtgacgctgatggccccgatcgccaccgacatctggtcggcatggagcggatcggcgccgggccgccgtcccgaagcgtatacggccctgaaaacggccgtcgcacagcatctgacggacttcgtctgcgagcggctgcccggcctgcgggcggcggtcgaacaaacgtacgcggccacgcccctcacctaccgccattacaccggaatcccccacggggctgcctacggcctgcagaaagactgccgcaacgtcatggcgacctgcatccccgtacggacgaaattcgagaacctgctgctcacgggacagaacctaacggttcacggcgcgatcggggtgacgctctcggcggcggcgacctgcgccgagctgctgggcacggaatatctggctaaaaaaataggcaacgcatgaaacgatttctcaaatacacgctcatcacgctccttgcgcttccgctgctggcggcggcgttcctctggggactctacctcacggccgacatggagccgcccgcgatgaccgtagacacggcggcttaccgcgtcgcggaccacggcggctacacctcgtgccgcggaagtttcctgcgccataacagatacggtctctgggagctttacacggccgggtcgcccgaagagtcgggagcggcggcgggagcgctcacggccgggctgatgcgctatcaagagcaggttttcgtggaccagatccgccaattcatcccttcggacggctacctgaagttcctgcggggcctgatcgtgatcttcaaccgcaatctgggacggcacgtccccgaagagtaccggcgcgagatatacgcccggtcgctctactgctcgcacgacttcgacgccataggcaccccttacgagcgtcagctcaactaccatgcggcgcacgacatcgggcacgccatgagccagtacatgctcgtcgggtgcagttcgttcgcggcatggggcggcatgagcgccgacggggagctggtggtaggccgcaatttcgacttctacatgggcgacgacttcgcccgccacaaaatcgtcaccttctgccgtccacaggccggacaccccttcgtcagcatcggctgggccgggatgatcggcgtactgtcgggcatgaacgacaaggggctgaccgtgacgatcaacgccgccaaaggtcccgtcccgctctcggcggcgacaccgatttcgatcctcgcgcgcgaaatcctgcagcacgcggccacgatcggcgaagcgctcgaaatcgcccgccgccgcgacaccttcgtcagcgaatcgctgctcgtcgcctcggcgcgcgacggaagggccgcgatcatcgagaaaacgccccgcaaaaccgccctgtacgaaagcggcggcgaatacctcgtctgcacgaaccattaccagtcggccgaactggccggcgacgaacacaacctcgaaaacctcgcccgaacggacagcccctgccgcttcgcacggctggaggagctgacggcggcaaacgcgccgctcacacctcaggcggccgtggccatgctgcgcgaccagcggggcgaaggcggcacggacatcggcgtcggaaacgactgctcggtcaaccagtcgatcgcccaccactcggtggtattccggccctcggcgttgaaaatgtgggtttcgacctcgccgtggcagggcggcgcctatatctgctacgatctgggagccgtcatgcgcgatcccgatccggccggagagctttgcgacgcggcacaggagatagccgccgacacggcctacctcgcacacgactatccgcgcgtggtggcatacaggcggctgggcggagaaatccgcaaagccatgcgggaagagaccgccgccgacgccgcgacgctcgaccgtttcgaacggaccaatccgcagaatttccacacatggaaactgctgggagaatactaccgctcgcagggcgacgacggccgggcggcgcaatgcttcgacaaggcgctgcagagcggaatcccgcgcgccgacgagcaggaagcggttgaaagactaaaatcggaatgcaagccatgataagaaatccggaaatacaattcgcatcggcggatgcgatcgccgcgttccagcaggaacgcctgcgcgaagagatcgcctatctgtacgaaaattcaccctactaccggcgcatgttcgaccactgcggcgcgcgtccgggcgacatccgcacgcaagaggacctgcggcggctgccggtaaccaccaagaccgacctgcagctccacccgcaggatttcatctgcgtaccccgcagccgcatcatcgactacgtgaccacttcgggaacgctcggcgacccggtgacgttcgccctcacggaggaggacctcgaccggctggcctacaacgaagccgaatccttcaccacggcgggatgcacgccggaggacgtgctgcagctgatgaccaccatcgaccgccgcttcatggcggggctggcctattttctgggcgcgcggaagctccggtgcggcgtgatccgcgtcgggaacggcattcccgaactgcagtgggacaccatacggcgcatcggtcccacgggctgcatcgtcgtgccgtcgttcctgacaaaactggtcgcctatgccgaggagcacggcatcgactaccgccgctcgtcgctgcgccgtgcgatctgcatcggcgaagcgctgcgcgacaccgccttcggcaacaacacgctgggggccaagattaccgagctgtggcccgaactggagctgttctcgacctacgcttcgaccgagatgcagacctcgatcaccgagtgcgggcaccactgcggcggccacgtgccggccgacctgattctggtggagctgctcgacgagcagaacaaccccgtcgccgaaggcgaggagggagaggtcgtcattacgacgctcggcgtgcggggcatgccgctgctgcgcttccgcacgggcgacatctgcatcggatacacggagcggtgcgcctgcggacgcggcacgatgcggctttcgtcggtcatcggccgaaaggggcagatgatcaagttcaagggcacgacgctctatccgcccgcgctgtacgacatactggagaacattccgggcgtgagcaactacatcatcgaggtcttcacaggcagtttgggcaccgaccagatcgtgctgcgcatcggcagcgcgcgccgcgacgaagctttcgaaaaggagataaaggacacattccgctcgaaagtgcgcgtcgccccggaggtggttttcgaacccgtggagtacattgcgaaaaaacagatgccccaaatgagccggaaacaaattaaattcgtagatttacgcgaacaaaccaaataaaaaatccgacaatgaaaaagttactggccatggcattgtgcctcgtcgcagtcagcggctacgcccagaagggaaaagagaagatcgcagccgatttctacggcgtggattacagctgcgtcgacgtcaagggcgccgacgaggagccgggcgctttcatcaaggcgttcgaggccatcaacaggctcttcctgagcgaaccgaagaaatacgacgtggccgggttcaccggcatcgacatcctctcgaccggcgtagagcaggccaacgaatcgctcggcgcactggccgcggagcagttcacgccccgcagcgcagcaactgactggcagacgcagctgccgcagatcgtcgcccgctacgacaacggttcgggcaacaaggggctggtgctggtcgccacgacgctcgacaagggcaacggtctgggctactacaccgcagtgctgttcgatcccgcgacgcacgagataatcacccagatggacatggtcggcaagcccggcggcttcggcctgcgcaactactgggcaggttcggtttacaacgccctcaaaaaacagggaaaatacctgaccaagtaggacaggtcccgtcctgaaacgatccctgcacgtctccgtgcagggatttttcattgcccggcggaaccggaaccgcgcacgccgtgcacggcggaccattggaattcgatacgaaacagcgaaagagttccggtcgggccggaagtttcacaacgaaagattatgcggcggttttttgaccgcaacgcaattttttcgtaactttatccccacacaacgaaaatgcgctgtacgcgtgtgcacgcattatcctaaacgtaaccgactcaaacctatgaaaaaactgctgaaaccgctcttcacggccctgttcgcgggcatggtctgcaccggcgccaaggccgccgaaccgcaggtcatcaacatccggaccaacgacctttcgatggtcatgagcgtcgctccgaacggcgaagtgctgttccaccacttcggaggacgcatcgacgacgcatcgcccgccgcaggcatcaaaagctaccgccgcacggaccacggcaccgacaacctcgcctactcgacgatgggcggccgcaacttccgcgaacccgcgctgcgcgtaacccacgccgacggggacatgaacaccgaactgcgttacgtgtcgcacgccacgcgcacgctggccgacaagaacgtcagcgaaacggtcgtcaaactcaccgacaccgatcaggcgctggacgtcgaactggtctatacggcctatgccaaagagaacgtcatcacgacccacaccgtgatccgcaaccgcgaaaagggcgacgccgtgctgcacgccttctattcgtcgtcgctgcccgtaaaggcgcgcagctacctgctgacccacctctacggctcatgggcgcgcgagagccagaccgaccacacgctgctcacccacggttcgaagagcatcgagtcgcgcaagctggtgcgcacgacgcacaccgagaacccgaccttcatgatcacgctcgacagcgaagccttcgacgagaactacggcgaggtgatcgccggcgcactggcatggagcggcaacttccggctcaacttcgaggtcgatgaattcaacgtgctcaacatcctcgcgggagtcaacccctacgcttcggattacacgctcgccaagggcgaatcgttcaccacgcccgaaatggtctacacctacagcttcgagggcgcaggcggcgcgagccgcaacctgcacgactgggcgcgcaactacggcgtatggcacggccatacgtacgccccgacgctgctcaacagctgggagggcgcctacttcacgttcgacgccaagaccctgacggacatgatcgacgacgcggcggacatgggactggaaatgttcgtgctggacgacggatggttcggcaacaaatatccgcgcaacgatgcgaacgccggactcggcgactggcaggtcaatgtcaggaagctccccgaaggcatcgactacatcgcttcgcacgcacaccgcaaagggctgaaattcggcatctggatcgagccggagatggtcaaccccaagagcgaactggccgagaaacatcctgactggatcgtcaggtcgggcgaccgcgaaatgccccggatgcgcaaccagtggctgctggacctgaccaaccccaaggtgcaggacttcgtattctcggtattcgacaacacgatgaagctctcgcccaacatcgactacatcaaatgggacgccaaccgccatgcggagaacgccggatcggaattcctgcccaaagacaggcagtcgcacttctggatcgactatgtgcagggattctacaaggtcatggagcgcatccgcgccaaatatcccgacgtgctgatccaagcctgcgcttcgggcggcggccgcgtggagtacggcgccatgaagtatttcaacgaggtgtggaccagcgacaacaccgaagcgctttcgcgcgcccgcatccagtacggcaccagcctgttctatccggcgacggtcatgggttcgcacgtctcggccacgcccaaccaccagaccagcaacatcacgccgatcaaattccgcttcgacatggcctgtgcgggccgtctgggcatggagttgcagcccaagcagatgaacgccgaggagaaggccttcgcgcgcaaagccatcgagagctacaagggataccgcgacatcgtcatggaaggcgacctctaccgcatcggcacgccttacgacgatacgggctactacggggtgatgtacgtgtcgaaagacaagaaaaaggccgtgctgttcacctactgcaccctctaccagagccgcacgctggttccgaagttccggctttacggactcgacgcgcagacccgctacaggatcagagagcagaacgtcgacaagaaacggttctggttcgacggcggcaccttcaccggcgaatacctcaaccatgcgggcatcaatcccaatctgaacaaaatttacgacagcgccgtattcgtgctcgaagctgaatagcacttctccgaaagggagaagcgcctgctccggaaagcctgcggccctgttatggccgcaggctttttcgtcgcccggcaaaaggccggagaagcggacggcacaagcgggaaaagacggcggggacgggaccggacggcagaagcggaagcggatggcagaagcgaaagcggatggcagaagcgaaagcggatggtggggacaaaaacagacacggaaacgggaacaaacagcagaagcagaaacagaaacaaacagcagaagcaggaacagacggcaagaacagcaacaaacgcacaagccgaaccggaaagggacggcagaaacgaacggcaggagagggaacgggcggcagaaacgggcggagaaaataccccttctgcgaccgccggcgtacgattccgtaaaaatggtatgacgaaccgtaatcggggtagccggcaataacgcgaaatcggatatctttgcaatgtggaattacgggcggaccgcaaaaagcggtgcggacccgaaaaaacggcatacgctatgacgaaggaacagaaggagcagacgatcggactgctgttcgccgagaagtgttcgtgcgtcgtccgcaacggggacgaggtgcggattttccgcgaacggggcgtgaaggacctctacaggctgctgcgcgaggagccgcagctgctcgacggggctttcgtggccgacaaggtggtcggcaaaggcgcggcggcgctgatgattctgggcggcgtagaggagcttttcgtcgacgtggtaagccgtgcggccctcgacctgctcgccgccgcgggaaaagcggtcgcctacacggtcgccgtgccccatatcatcaaccgtgcgggcgacgggatatgtcccgtggagcggctctgcgccgaggcgcagacggccgaggagtgtctgccgctgatcgaaggattcatccgcaaaatgcaggagcgaaacgaatagatagggttcgctactgcccggcacggggattttccgctggtgcagcgacgggatcgacgccggaacccgatgccccggatgacgctcttcgggagtgtgaacctcgatttttaaaaaccgcacgaaaagcactgtttttgaatatgaacaaacaaaagacaaaatggaaacaacggctgtaaaactctattcgctcgattaccgcgatgcgaaaacctacctcgcagcggcgctcttcgtcgcgggcaacatcgtcctgccccaaatctgccactcggtgccgcagggcggcctgcggtggctgccgatctacttcttcacgctcgtcggagcctacaaatacggctggcgcgtgggcctgctgaccgccgtgctgtcgccgctggtcaactccgcgctgttcggaatgcccgccgcagcggcattgccggcgattctgctcaagtccgtactgctggccgcagccgccggattcgccgcacggcggttcgggcgcgctacgctgccgctgctggcgggcgtggtgctcttctaccagacggcgggggcgctgggcgaatgggcctttacgggttcggcggcggccgccgtgcaggatttccgcatcgggattcccggcatgctcgcgcaggcggcgggcggttacctgattatcaactatctcttacgcaaataaattcaaacgacatgatcaatagaatgtatgtgatcacactgctgtcggtcctgcctttcacggcatgcggatcggctcagggcggcgaaaaggccgaagcccccgaagtatacttcatccgcgagattacgccgcagaacatggtgcgcatctacgaagcgctggaacgtcctgcgacgggaaaggtcgccgtcaagctctcgacgggcgaaccgggcgggcacaattacctcaagccggagctgataaaggatatcgtgaccaaagtcggcggcacgatcgtcgagtgcaacaccgcctacggcggcggacgcgcacgcacgcaggatcacctgaaggccgctgccgaccacggtttcacggccatcgccccggtggacatcatggatgccgacggagaggtgagcctgccggtgaaaggaggaaaacacctgaaagagaacttcgtcggctcgcactacccccgctacgacttcacggtggtgctgtcgcacttcaaggggcatgcgatgggcggcttcggcggtgcggtcaagaacatctcgatcggcatcgcgtcgtcggccgggaaagcgtggatacactcggcgggcaaaaccaaaaacgccgccgaaatgtggagcaacctcccggcgcaggacgattttctggagtcgatggccgagtcggccaagtcggtcgccgaccactgcggcgacaagattctctacatcagcgtgatgaacaacctctcggtggactgcgactgcgacgcgcatcccgaagagccgaagatgggcgacatcggcatcctcgcctcgctcgatcccgtagcgctggacaaggcgtgcgtcgacatggtgtacgcatcgcccgatccggggaaatcgcacctgatcgagcgcatggagtcgcgccacggcattcacacgctcgaacacgccgaagccatagggctgggttcgcagcagtaccgactcgtggaactgaaatagcatggagtacaggacactgggccgcacgggactgcgcgtcagcgccgtggcgctggggtgcgagggatttatgaaccggccggaggaagaggtgcgggcagacttcgacttcgcaatcgaaaacgggatcaacttcctcgacctctacgcttcgaaccccgaactgcgcagcagcatcggcgcggcactggccgagcggcgcgaagggttcgtcatacaggggcacctctgctcggtatgggaagaggggcagtatctccgcacgcgcgatccggagaaggcgcaggccgcattcgacgacctgctcgtgcggctggggacggattacgtcgatataggcatgatccactacgtcgatgccgaggccgatctgcggaaggtattggacgggccgatcctgcaactggcactgcggctccggtcggaggggcgcctgcgccatatcggcatcagcagccacaaccccgccgtggcgcggcaggccgcggaaaccgggctgatcgacgtgctgatgttctcgctcaatccctgttacgacctgctgccgccgagcgacgacgtggacacgctctgggccgacgaaagctatgcgcaggagctgcacaacatcgaccccgaacgccagcggctctacgaattctgcgaacgcgaaggcgtggcgatcgacgtgatgaaggcgtacggcggcggggacctgctgagcgggaccaactcgccgttcgggaagccgatgacaccggtgcagtgcatcgaatacgccctgacgcgccccggcgtggcggccgtgatggccggatgccgcagccgggccgaaatcgaggcggcgctcgcatggtgtacggcaacagccgccgaacgcgactacacgcaggcgctgaccggactcggccggttctcgtgggaaggacactgcatgtactgcggccactgcgccccctgcacgacggggatcgacatcgcaagcgtgaacaaatactacaacctgacgctgacgcaagacgaagtgcccgaaaccgtgcgcgaacattacagcctgctggcgcaccacgcttcggagtgcatcgcctgcggccgctgccagagcaactgcccgttcggagtcgatatcatcggacatatgcggctggcggccgcgaagttcggatactgatccgcattccgggataggagcgggcaaaaaagcgaatccggcggcggttccggcttccgaaatcacgacaatttcctatctttgccgatcgacacacaccgacaatgaccgaacaaatcatagcacaaagactcggaatcgccctccggcaggtgcagggcacggtacgcctgctgcgcgacggcgcgacgatcccctttatcagccgctaccgcaaggaagcgaccggttcgctcgacgaactgcaggtcggggccgtcaaggagcagctggacaaactcaccgaactcgaagcacgcaaacaaaccgtcctctcgacgatcggggagcagggcaaactgaccgacgaacttcgcaaacgcatcgaagcgtgctgggaagccgtagagctggaggatatttacctgccttacaagcccaagcggcggacacgggcgaccgtagcgcgcgaacgcgggctggagccgctggcaaacagcatcatggcgcagcattcgcacgacatcgcacggcaggcgcagcgtttcgtcacggccgacgtgccgaccccggaggaggctatagccggggcgtgcgacatcatcgccgagcgggtgtcggaggacgagcgcgcccgcaacagcgtgcgccgcacggcggcccgcgaaggcacagttcactcccggctcgtgaaaggcaaggagcaggagggcgtcaaatattcggactacttcgatgcggcgtcgccgctgcgcaccgtttcgtcgcaccgttttctggccatgcggcgcggcatggacgaaggggtcctgaagatctcggtggagatggacgccgaccgcattacggaagggctttgccgccagttcgtgcgccacggctcggcgacgcgcgaatggatggaagctgccgtcgcggactcgttcaaacggctgatacggccctcgatcgagaccgaactgctggcggcggccaaggagaaggccgacgacgaagcgatccgggtattcgccgaaaacctgcggcagctgctgctctcggcgccgctcggacaaaagcgcatcatcgccgtcgaccccggattccgcacgggctgcaaagtcgtggcgcttgattcgcagggcaacctgctgcacaacaccaccgtctatccccatccgccgcagaaccgttacgccgaagccgccgaaacgctgcggtcgctggcagcccggtacaaggccgaagccttcgccataggcgacggcacggcagggcgcgagaccgaacagctggtccgcggactggggctggagggcgtcggggtgttcatggtgagcgaggacggcgcatcggtctactcggcgtcggccgcggcccgcgaagagtttcccgatcacgacgtaaccgttcgcggcgcggtcagcatcggccgcaggctgatggacccgctgtcggagctggtgaagatcgacccgaagtcgatcggcgtgggacaataccagcacagcgtcgatcagtccaagctcagggccagactggtcacggtggtcgagagctgcgtgaacaaggtcggcgtgaacatcaacaccgcatcgaagcatattctgacctacatatccggtctggggcctgcgctggccgaaaacatcgtcgcatatcgcgccgcgaacggcgatttcaaagaccggaaaagcctgctgaaagtgccgcgtctgggcgccaaagcctacgagcaggcggcgggattcctgcgcgtggtaggcggcaggaatccgctcgacaacagcgccgtgcacccggagtcgtatcatatcgtggagcggatggccgccgacgcgggcgtgacggtcgagcaactgctggcgggcgaggagctgcgcaaaggcataaaacccgaaagatacgtggacgccgaggtggggctgccgaccgtgacggacattctcgaagcactcgacaagcggggtctcgacccgcgcgaacagctgcaggcattctcgttcgaccccgacgtgcactcggtcgccgacctgcgcaaaggcatgacgctgcccggcatcgtcaccaacatcacggccttcggcgcgttcgtcgatatcggcatcaagcaggacgggctggtgcatatctcgcagctggccgaccgctacgtcgcatcgccggccgacgtcgtccatttgggacagcacgtcgaggtccgcgtgacgggcatcgacacggtccgcaaccgcattgcactgtcgatgcgcaagaacggctgacaaaatcggcgtccgggtaattccgaacgccgattttcacatagcatcccgctcactcctcaggcggcacgaaagaccaatgcgtgtgcatgatttcccaacgcccggatgaattccgccgataaacctcggtgcagtgcattctgaacagccgcccgtctcgatgcgccccgtaatcgcaggtcaggacggcggcatccgacgccggctgcacgacgggatcgaccatgcggtacgagtcgatcccgatcttcccgcggatcatgtcataatacgctgcaagggccttcttacctccgagtttgctttcgagcgccggatcgaaacagacgacgtcatcggacgaaaattcgataaacccgtcgggatttccgccgttccacagctccaaagcccgtttttcgaaggcggtaatcaaagccttaatgtccccgtcgttcgcgggcgccactgccgatccggtcatatgataatcctgagaaaaaattatcagctctccttatgacagcgagggttctgtcacatactgaaccttttaacggattaccgcccggccgaattcggtttccgctttggtcggtacgttaggcagtattccggggcgtgccgatttgcggttcgcttccggaaatttgattccgttgtgcagcggttgtacgccggccgtacaggctgtcgtacgggccgattgcggagccgccggaagttcggtcggaatatccacctgaatatagtccggttcgccggattcaccgagatgattgtatccgataaagtagagatccatgctttggcccaatgtcgccgggttgtagatcagtatgtgcacgtcgttgtcggtgctggaccgaccgtaccaaccgccgggccggtaagatgcgctgttgcggatcgaagcgaagtagtccggcaacgactccttgttgtgttcgaattccccgatggtaaatccgccctgaaagcggtagtccttgcagtagatgttgggggcgaattcgtaaatcacggccggaaatgtaggatacttttcataaccgggaagcgtacccgcatcgacaacggaataggtaacgctaagcgccgctttgccgatcggattggtgtcggagccggtgttggtcgaacgtgcgacgacggtgggaacggctcctgccgcagccggcgtttgcagagcgatccaattcagctgtccgggaatccggtcgagattggtgcccaatacggcgaaggtcactacttcgccgggctcggcggggtaagagatatccgtcagattgggctggatgccgttgctcgtagtaccttcggccagtagtttgctgatctcggcctcggtataggtaccctcgccgataggattgccgggaaggatgcaggagaagttgtgcagcgcccggatcgaggcctgcaacgaaacgctcagcgtagagcgttcgtaccggggattgacgaaattgacccaaggaccgatcccgtcttcgacgactgccgtattacccgcataaccgatgatgccgttggtcttgacccaagtcagcgctcccggcacgccctctttcgaaatgcccacggccatcagcaccgcctcctgattcaatgccgaacggtaatattcccgattggcgtctgttcccgtgtaatagccgttctcttcgcttcctgcaagcagctctttccgccatgcctcttcgctctgcgaatcgaactggccggcatcgttcagaagcatgtatttgtaggagtgtgcatgttcgttgggatagaagaaaaattgcggcagggtctcgccggggatgccgaaatccattccgtcagccaccagaaatcggatgccgacaagcggacccccgttcaatccgtcgccgatcccgtgcggatcgtacactttgtccatcctgcctttgaatgtaaacgaatagttgcccagttcgctgtccagcagatcgccggaaattgtgtagatgcggtcgttgcggtctgtatttacattacctgcgatgatcggagaaacgatcgcggtctcctctccgttcgggagcatgacatagctcggctgccgcggctcttccggatttccggcgcagacggtccaattgacgaattcgttctcctctaccgtgtagagatgcgacggaatcagcgtcgattgctgaacgggagcgataagctccagacagatcgccgttcctttgcccgaaagttcttcctcctgctcctcgatgccttcgctgaagagtgtgacgcggtagatgtcgtgctttccgtcttcgcttggcccgacataattctccacggcgtgcgtaaagcggatttgtttggccggagtggtaaggtgccggcgtacgatctccgacgtcgcccgctccgaagtcggggaccacatgaatacggccagtacatactccgtcgaaggcgccaactccgtgcaggcgtactttttccgtcccgtattccacagatcggtcagttccgcatcgtatttctcctgcagcagggcgacgatctcttcgtcgctggaattgtccgcctgccgagccggaagcatggcgtagcagtagatctccgtcgtgttcgtcggcacgatttcaatggaggcccggtcggaagagagactcagaacattgacgcgtagtgtttcgacattgcattcggcgtattccgaatccggatatccgttgtcgcccaaggccttgacgaaaaaacggtagacttcgcccgcattcagtccgcttagccgcgccgattgctccgtcgttccggtctccggaataacctctgcacccgtttcatccgtcaaataatagcggtaggaggcggcattcggcacggcattccactccagcagggcttctgcgcccgaccgttcggcgagccggacggtcggtgcgggaagctgtttcgtgttttctgtttcatcggaaccgcatgcagcccacgagagacatattcctgtaaagcatatcagataaaggaaccttttcatgtcggtcgtttttagtagttgtagtcatcgcgtacgcatcgtacgttgagggcgtaatcccctctctgcgtatcctgcggattgcagccgcaattgacctcgttctcgaaatagatacgcaaggctccggcgtttccggatccgcgtgccggggagctggcgagccagctgtagctgtaattggattgtttcgcgcggtagaaataggtgccttcgggatcccataccgtatttttataggtgatccagtagccggttcccggaaagaaaacaccctccgtatcctccgagcaacccttgagcagccaaccgccgttccacgcctgatcgaggagattgatgttgccgatcatcatgttcgcatgtttgccgtcgatggtgaaacccgtgaaactccatacattggggacgcggtatccggcgggacagggatcgtatgccgtcttggcgccgctgaacgaactcatctcaagggcatacttctcgctccacccgtcgggatcgccccaaagcgtctggtcgcgggtctggagccagcctgcggcgccgctgccggttatgtaggcgtcgggatgctgtatggcgtaggcgatgacgtcgttgttcttggcgcctgcttcattgcgtgtgagataggagtaccatgcccggtaggtatccttatgttcaccgccgacgtagagggcattggcgttggagaagggatccttacggccgtattggtaaagagtggcctccgttccggtcacggaataggcgcccaagttgcggtccattacccgcagactctttcctgagaagttgatcagggtcttgtcggcaggagtctctccgcccgtacaccagatatgccagctccagagaatcgagccgtcggcatcggtgacagcaacaagcgtgtttccggcttcggctcctgccgtgaagatgagtttcccgttttcgaccgacagatccgagatcagatcggctttctcgctccataccgtgcgtgcggacgaaaccgcgccgacgctctcttgggtgcagcccttcaccgtacagtcgaagtaataggtgccgggggccgtcacgacatagcagttggcggtaccttccttgtcgagcggatcggctctgcgctcaagctggtcgaggtatttgatctgggcggggaattcggtgatccggccccgttcgataaccgtcgtctcttcgtagagctgcgtatattcgtcgccggtcgcatcgccgagggtgatgctgaatccgtcgtagatgcctgccggcagtacgaggtaaaaagtctgcggctcttccgagagttgcgtttcggtcgtcaaccgcttccgcgtgttgccgtcggccattttcagcacgggatagggggccgtaacgtcgaccgtagcgtttccggagaggatttcgccgccagctccctcaaagataatgtggcggagggcctgactgcccgacacacggaatttcaacagaccgcagaggttgctgaactgcatgtcggcgacatcgccataggccagcgaaggatttgttgcgtcgtgcagtttgccgggcgccgcgggcatctcctcaggcaggacgaaagcgagcttcgcaccgtcgaatgttgtttgccaactgccgggatagaatgcgacgtacttgccctcctgcaggagtatgtcgccgccgaaacgggcagtcacacccgcaggcgagagcattcggaaaagtgcggagaattgtgcgtctggcgtccaaaccgtgatttggtcgctattcgaccatgagatgatattgttgccgagctgcgtgcggctctggggagcgaacggttcgtgcgttgcatttatctcgatgggaacaggctgcgatgctgctggttcatcgtcgctgcaggcgacactccccatcacgaggagaactgtcgcgagaattcggaacggttttttcatacgctttgagattttgagttttgaatccacagtggcgatctttgttgccacttgtccgattgcaaatttatatgaaaagagtgtatcccccgattattcgggggggggcaaatgggggacaactctcgaaaatagaggggacagctatgtgttaaatagttgtgagataatcgtatagatccaaacttgaatcaagccccattttggctctgagccgtgtgcgttttttcttgcatgactcctgcgtgatattcagtatggacgcgatttccttggtcgaaaggttgatgtagacgtatgacagatatttgatgtcattggctgaaagatcgggatgtttggccttcagcgctttgacgaattccggattgacttcttcgaaatgggtcaggaaatgctcctcttcatgaggcttgttgagctgctgttttaaccggtagaggtacttgcgtacgtcatcatagcgggtgcttcccgtctttttgagaattgagtccaccaaatcctgcagcatttgattgcgcgtcgaattctgaagcgcggtagccgtaagttcacggttcttgtcttcgatcgtgtgttgtagattccggcgtgcgtttttttcctcggccagttcaagctcggcaattcggctgttgcgttcgtagataatccttttttgccggatctgccggcgactgatgatcagaatgacggtcagcagggcgaggagcagagtcacaaatccgaaaacatatcggtcggtctgctgtttccttcggctttcggtcagtctgttttggtaacttagcaattcgagcttgatcttgccgagcatgaaattcttctcttcgcgttgttcgtagagattcttcgtggcgagcagcaccgaatcgttgtatcggaacgctttgtcgaaatcctgacggcgatagtagaggcggaagagcgtcgaatagatccgaattcgttcttcgaaattcggatcgttggagagcgcttcggtagcgaatcggagcgtctcttcgtcgttgtgctcttccagcccgatatctgccagatgtcggtagatattgaccagaaaacgcggatcgccatgctttttgagcggtggaatcgtcgcatgtgcgacccgtttggcagaggtgtagttttttgtgttatagagcagttccaccttgttgatatcggcgatcagcaggcctaacgggtcccggtctttgagcgctccataagcgatgtcgaggtagcgtcccgcttcgtcatagcgctcgctgacgatcagaaaatccacaaaattgacggcaacccatccgatgagcatcggatcttggttcttgatggcgagatcgtacgatttctggagaaactcttcggcccgatcgtaatatttctgatccttgtaaaggaaggatattttggtcagaatccgaatttcggcaggtatgttggaggtttgaatggcgatctggtaagcttccatgaattgtgcgagcgcttccccgtaatcgaacatgtcgtagtaattatgcccggcctttacgtggatatccgccagcaaatagtccaagccttcgttttttgccagcgcctcagccttggtcagcaatgcgaacgattctgcatactccttgtccacagtcatcaattcggcactgtctatgagtctttgacagattgtctgcggcgcttcggcagatgccgcaggtatacctcccgccgagatcaaaagcagggtggagagcaataggtacgcatttcgtctcaaaccagcaatcatgcccgcaagatacgaaaaaagtcgatacgttacggtcggatttcatccagatttcctaaggggcggcttggtaaggcttgatgatagcatttgaaagttgtttcccaatttctcggaacgccattccccccaaaaaacagcatgtgccgattgaaatcattccttccgaatttcctatctctgcggattcccggaaatattcaaatgcctcggcatattttcctatccatactatttcttgcctgattcaatgattgcccctcccaaaacactccagaaaagaagtgctaaaacgagacaaaaaacgtttcatatgaattctcacgacttattttgctctttgagataataggtcataccatatataagttatttgaaacacggtatttgagcgcagtaggctaaaaacaaaccgttgtgctcgcgatcaggaaaatcggatcgatcgcccccggattctgcaaaccctgaaactaaaaaacgcccctatttgcacccagccattcatattgtgcaagacaaattatttgccaacgtaagcccccttatccatatagaggaggggtatggttagtatataaagatacggttgcttgaatatttcacagatattttcccctctgattgatttttttgactaatcaaactatttatagtaaacacattatagacatgagaacaacacgcaatcaatcagagtttacaaagaaatacatcaacaatgccatgaagctcaaacatcaataacgctcagaaacagagaaaaaacagaccgccgagaaacaatccaactccatgaagggttattagaaaaatattcctaaagttgatcccgacgttcaaaaatgtaacggaaaatagatttttatcacaaaaattcacttataaattaatttctcctcaaaatgtagaaccaaatccttaaaaaggtattatctttgcaccaccaaatagacttaaaggtgaaacgatctatcacgattaaacatataacaatttcagatgctgtcggagtttattcgcttcaattctcagacaaaacgacaactgaatttcttgatttcatatccaaatataaggatatttccaaccccatacttaaagaagacttcaatcgtatagtggcaatactaaagaaaattattgctaacggagcattagagcgactttttcgaacgagggagggtaaaatcaaagacggagttgtcgctgttcctttggacatagtggggcgaagaaaaggatgtggaaccctacgattatattgcctgcgcatatctgacgaggtcttaatacttggaaatggaggtataaaatatggcaatagttacaatgacaatgcagagttaaactcctacgtgactaatttggcagaattagatcgagtcataagaaaattcacacggcaggggaaaataaagattacaggtaagaccgttatactacaagaaaatcttactatcgaaatttaatactaaaaacacataactatgaaggcagataaattgtttaatgaatgtttggcaaatgttccaaacgatattacaatagagatagacctgtctttcgatattgctactaaaatagatacgatattatccaacaggaaaatatcgcaaaaagattttgcagcaatgataggcaaaaaagaatctgaagtgtcaaaatggctgaaaggaactcacaatttcaccttgagaacaattgccaaaatcacagatgtcttaaatgagcctattattgaggttgcaggcaagcgcatccctaataatgaatatatcttcattaatgtaatcgattcatttattgtctcgaagaaatcaaaaccaattgccatacaagataaatcagattatatccctattacatggagtaaccattcttgggatatggcaaacaatatgataaactaagaatatgaagcaagaaaatcaaatacaagttcgtttaatatcagtctctgaggtcaagtttatgttaaacttggatgaggcgttattggcaaaatcacaacctgatggtccgaatatcgggtttgcacatgttgtttctgcaaacaaagaaaatagcaccattactcttatctttggagtacaatatgccgtagacaacacacctctattagaaagccgttatgctttcacattcaatgtcagccatatagacgatgttgtaaagattgaaaacaataaaatagaaataaagggactaatgcctcattttgttagtgttgcaatcggaaccatgcgaggcattatcgttgctaaaacagcagggactcctttagcgaaatatcccctaccgatgcttgacgcacaatctgtgttagagaacatggttgcaaatatgcaaacagaacaaaaataattctgtttctgtactaattctccaactgtgctaaattaatatctgccaccgtattcgatggcagatattttttgtactaacttataataaaatgttaaaatagaaaagagtgccatttgttagcactctttttacttttgtacaatcagagaatttctgtttcatccttcatgctttcatcattaatgactacatcgaccccattatcgactttctcattggtagcatcaaattcgataatcttcattacatttcgcttgataccaatttctgtactgattatgtcggaaggtctttcatctgacccaatcgtcattcttgttttttccgtaaaatcgaaattgagataacgctgaacattagagccatttgttaagattttaggaataattaactctgaacctctttgctgagatcaataatcatgtaaaaatctcttgtctaccgttatcctgcattaagctttatcaccaacttgccataaagttttgccttcaatctttcttgcctgtaatgtcaattcccaaatcatatctttcaaatcaatcgaaataatattatccgctttagaaatcacatttagtatcatctgcccatacattaggtttgaagttaacatcatatctgttattgttacccatactattaataccgctttgaccaagttgatacaaataatcttttgtataaaggacgctgtttaatggtgtcgatgtccaatagaacatattaacaggagcttcataacttcccgacgaatgccgataagcaatatttttcccattaggcacataaaccatttcaatgttataggtctgttttgtcgataactcaatttttatatcttctaaattatcaaatacaccacaacatacaggtgtggccctgttgcctgtgtcggagcatttaggatcaccgaatgcttcagtccccttttcatttgcccacacttgaaatccatacaggtcattgcttccccctgcacgagtccaatcattcaacggttcctctcgcacagtaaatttggatccaagagaaattacaactgtttcttcatctgccacagacggattttctttttcagttgcaggtgtttctttttcagtattgcaacccataaacagcaatactaccacgaataaatagaaatattttttcatagtcttcgatcttagttttacttaatccactttaccctctgcacacgattttttattcggggaagcacactcccaaagaagcatcttgtcagcagaaacattttgaaattctacatccatcaaaccactgatggacaagtgcgaatcttgaatcaagatattaaatggacccatcagctcaaaatttgattccttgtatccaataaaatagccatcgctataagtcgggatatttttatcgctgccgctaaacatctgataggtgagcttgctccccgaaatttcatatatttcgataatatcggtcgagatctcttgcccatttctaatgttggcaatatatgcccacattcccgaaaattgggatgtcccctcatcttcctcgtctgagcacccaacaaatagcagtaccccgacaaacagtaatgcaaataaatttttcatactgttagaagttataccctaacgaaaaggtaaatgcgcgattcttaaatttgtccctcttgtgagcacctgttgagcactctctttagcaatattggtcaagccccaatcagtcaggctgtattgcttccatgcaaatcccgcagcggcgcaaacacccaaatcagaccgtttcagaagaccttcaaagccatagcagtttatgcgaagtcactaccatacttgcctttgaatttacctccgataccaaatccatagtagacaccaacggaaagaataaccttgaaatttttacccattctcagctgatagttaatcattacgggaatcttaagctgtgattcattaactctgattgctccattgcttttggaaacttcaaaaccacgctgtgtgaaaaataatcccgtctcaaggtacagcggttgattggcaagaagcaggcgttgatacgttcctccgacgtggaaacttgttgttccttgtgtcaatgcatgaaagtcgcctgtcaaaaagttcaggttgacacccgcacgaacaccataaatgttttttgcataatcctgtgccattacattacctgcgatgaatgccacgcccataagggcaaagaaaagtttttcataaacttttttgtagtttaaggtcttcccaccccagcagaaggattataataaagtaaaatgtggagctgatttcgtttatcaagtaggaggttgtggcataaccttgactgaaataaacgacgcataccccgcaccgagatagatatgagatatcggccatgatatgccgaccacgaatctatataaagaatgagtgctgttcgtttatccttcagtcttggaattaccacatttcctacttaggataagtgcgaaaacactttcatctaatatgtttgctgattactcagcaagacaaagatagaaaatgtctttctttaaacaaggtatttggcacaagacaagatgccttcaattcaaaaatctcaaaagaaataagtatctttgccataacaagaatgattaagacaagatgaagacagtttcgttattttcaggagcaggcggattagatataggagcaattaaagcaggtgctaagatttatatgggcaaatgacatcatgaaagatgcatgcgctacatataaacaaaatattggcgatcatatagtgcatggagacttaaatgaacatttagaagagttatctgaaatccaaggtgttgatttagttataggaggtcctccatgtcagggtttttcagttgcaggcaaaatgaaccccgaagatccaagaagccaaatgatctgggcttatcagaaagttatttctatcgtaaatcctcgcgcttttattatggaaaatgtaaaagctttaggagcactatctaagtgggaaggtattaggaatcagttattagatggttttcggaaattagggtattctacttcttatattgtccttaatgcaacggattttgatgtccctcaaacacgagaacgggtttttattgttggctttaaaggcgacattaatacaacgccaaatttgcatgaaatgatgcagccgtatatgaaaaaagcaaaaacagttcgggatgccttatcttttcttgacaaggccggttttggaaataatatcagtacttgcaacgctaaaattacacttgcagcaacacccgttttaaggaaatcaccattacgcaggaatgcttttcaatggattggggcgaccgataaaaatagatggatatagtgcaactctccctgcatctatgggtgggaataaaacaccgatagttgatgagcgagagctatatgataaagaacaaccttggatcgtaaaataccatgaatcgatcatgactgatttaacaaaagcgaagtttgaattagccccacaatttctacgacgactaactgttgaagaagctgccgccatacaaacattccccaaaggttatcaatttcaaggttcacaatgttcaaaatacacacaaattggcaatgcagttccttgcaatttaggctacgctgtttgtcagatggtggcagatgtgctaaataacacaattcaaatttctccaacaacagcagcccaaactatctaaaaatatataatatggcacaatcagttaatagaggcgcagctctaaaggtcttaaatgaagcatatgctaaacgaaaagaagttgatgatgccattagcgcaaaaattaaaaggataattttgggaagtcatctaacatatcgttatattcttgttaatgctttattagcaaaagcgaccaacccatcagtgaatccactttatttacaagcagatacagaaaataattatgacaaagcatttgatgcacgaagcctttgtcacaaagtacttgtcccattcgaacgagagtatctgtccaatgccttagggggttctaatgaaccgtttctaaacaaacctgctcgatttgtatcattaagtccaactaatgcagtaagacgaggaaaagataaagatacccttgataccctcattgaaatcttatcagacttaaatactgacaccaccgcagacagagcaaagatgtatttagcatctgcaatggcaaatgttgaagaaagaggggggcgtcaggaaaaattatatcaagtcaaaccaattgaaaatgtaacgacgcaatgcgttcttgatttatttatatatgatctaactacaaaatctcaagagggagagatatgccccttaattgtagcgtcattagaaaatgcttattttgagagaatggggataaattgtatggttactcctcacaaagtcaatgaaagtggagcatcgtcaaatgaaattggagatatagacattttcaacgaaggcaaaatcatatcatccattgaggttaaagacaaaaatttcacgcaagaggatgttgaacatgcaataaaaaaattcaatgccgcaggacttagcttctccatgtttatctatgggcgatctgctaattttgaccaaaccacttcataccaaacagcagctcgtttcggacgaacattagggacttattgctcgattataggaatattggactatgcgaaagttatgctgagccgtattcctaatattaatcttcaggaactcgctgatcgaatgatgtttttgcaagaaagatttcttgtaaagatgatacgatcagatggatacaggaatgtttagcaaagtattagaaaaataatttaaagcattatataactatataattttcggatcgtcattattgacgtacctgtgattgcttgaatttgacgtaaagatagccctttccgcaggagggataatttctttgggatattgtattttcatcttatcatcaggttttttataggttgcagaccgtcccattttaaccccctcagcacgacatttggcaatatactgcttccgtccacttgccatgcgttctgctattgtatggcgttccatctgtgcaatttcaagcagaattgtacagattaacgatgcaacaggatttattttcccgtcaataatcgtttcaagattgtaattcctcacatataagcatatcccattttcatccaataattgaatgaccttcagtgcctcaagcgtgtttctgccaagccttgagatttcaagcgcacacacggtcgatctcgtgcgtctgcacatagtcaatcatctccataatttcagaacgctcctcatttttcttggctccactgatcttattggcaaagattttctcgacaaaccaattcatttgttggcaataggtagtcggctctttgacctgtctgtcgtaatcttgagtgttcgttgaaacacggcaaagcaaaacaactttcatcacttctgaatattatattgttccttaacccgttcatcataatccgccgttttctctaccgcccaatcgatcacattaacgagttagtcaaagtagacattgcaaattatttaacaaactgcatatccgtcttgtgcaattcaatgtcaaacagatctgctccgtcattatatttgacaaacactcatccccgatgtttgtagccattaaccaataacgccaagcccttatcatcggggagttctgtgaggttgtgcagaccctacgagaacaccaccatcaactgcgttcttaaaagagataaaatatactttgccatactaaaatacttttacgattgccccccccaccgcaaactgcgccacgcacccttttcaatatcaaaataagccgtcgtactaaacatatcccgactgcatccacaaccattgatatgcttctcagccaaagctctactcaggtccccatgcttcacgaatttcaccatttttcttgatgtaaatgaaatgagcaacacctttgcgaagtttttccttgagcatatcaatcagcattgctttagcccctgcaactaaaagattttgcgtgcgggaagcaataacattcatgcgaacagctgttgtgtctgtaataatcaaagcattcatagtgatatttttttagttgttgtaattatttcgtaggggttccccaatcattcatccgccacacgaaagcacgagcatcttcacggaaaataaaatccttgacaaagcgagctgacgaacctgcttcattaacgacctcatattgccacacgccataaatgttgtgatgtcttccataatagaaattgccaacctgagccttcatattcttaatggtttatcattattttacactaaaaaaatataggtatataatattaaataacaaaatatttttaatgctttattattaataattgtgtttattttcatagtaaagtattttttcctatatttgtgagtaaaattgcgagaaatggcacttcgaatcaaagaaatttgcaagcagaaaaagattacgatgggtgaaattgcagagaagatcggcatttcgcctgtaaacttatcgtcttctctcaacggaaatccaacacttaatcgactgcaagaagtcgccgatattttgaacctagaggtcgccgacttattcatccgtgaaaaacagtctcgcatatttggttatttagaggtagatggcaaacctcgtagaattgacagcatagatgctcttcgaaacttactctcagaattagaataatctcgacagcaaaacgcccgacaagacaaagattcattacaattcgcagattctgatcgagaatattacgtcgtaaatggcaaatcggcaatcaagtggattatggagcgttacgccgtaacaatccacagagatagtcaaatcaagaatgatccgatcgaaacgatgaaaattgtaaatgcgcttccgaagttgaagtttgaagaataggcgaagccattattttgatttaatgatgccttcaactttgaagttatcgaattgccacgttaaaaataaaggacatataagaatatctaagaaaatataagacaagaaaacctcagagcattatgccctgaggtttttttatttcgatcatatttgcaacgccttcttgaagcatctcaaggctccatttatatcctacatttaagaacaaaatgcaaggatacttgatttatgaatatttttatggataaatattaatgaaaaatggcttgtagacatctacaagccacttctttgaggtctgaagcggattcgaaccgctgtacaaggttttgcagacctttgcctagccactcggccatcagaccatttttcgtttccgatccgtcctgcgcaaaccgctgttcgggccgcggccgctgatttcattcagcccccggctccaccgtctcaggtgttttccgggttacgctcaggcgtatcggagtgcaaatatacaaacatttctaaaatctgcaaaacttcggctcaactttgcgttatttcccaaaaatatttacttttacgacacgttaaacgacttttgcggctatgacaatcgaggatatcgcccttcagatgactccgggtatcggggtgaagggcgccgtgcatctgctcggagtgttcggcagcgcacggaacattttcgccgcggctccggacgaactggcgggcgaagcgggcctgcgcgaagagaccgcccgcgaaatcgtccgccgcagaggattcgccgccgcggaaaaggagctggagcattgccgccgcaacggaatcgcggccatcgcctcgaccgatccggaatacccgccgctcctgcgggaaatccccgactatccccatgtcctatacataaaaggtgatacggaagccctttcggcacgctgtctgtcgatggtcggcacgcgcaatgcgacgccctacggacagaccatgtgcaaccggctcgtggagggactcgcagcgcaggtgccgggactctgcatcgtcagcggactggctttcgggatcgacgtcgcggcgcaccgcgcggcattggcggcggaagtgccgaccgtcgccgtgctggccaacccgctgccggaagtgacgccggcgcagcatacggccgtagcccgcgacatcctcgatcacggcggagcgctggtcacggagcttcattcgcagacccggcagaacggcacggcttatatcgcccgcaaccgcatcatcgccgggcttagcgccggatgtatcgtcgtcgaatcgcctgacagcggcggatcgctcgtcacggcgcactgtgccgacgattacgaccgttcggtgatggccgtaccgggccgcgccacggaccgcatgtcggcagggaccaaccacctgatccgcaatcgtaaagcgcagctggtgctgacggccgacgacatcgtccgcgaattgatgtgggatctcggcgcggaaccggcgacgctccggccgaaacccgccacaccgcagctcacgcccgacgaaacgggactgctgggttgtttccgcacggacgatccgctgtcgcacgaaacgctttcggaactgagcggactcgatcccggcgagctggcgacgctgctcgtggggctggaactggcaggcgccgtacgccagctgcccggcaacagatacatgaaactgatatgagacttaccgatacacattcgcatctgtacgcccccgaattcgacgcggaccgcgaggaggccctcgcacgtgcggccgacgccggggtggagagagtgctgctcccggcgatcgactccgaaagccatgaacggttgttcgggttgtgccgcagccacccggagcggtgcgtcccgatgatgggactgcaccccacgtcggtgaacgacaatccacactggcgcgaggagctggcgctcgtagagcgttatctcgaaacgccgcccgcagggatccgcttctgcgccgtgggagaaatcgggctggacctctactggagccgtgatttcagggccgaacagctcgaagccttccgccgccagatcgatctgtcgctggagtacggccttccgatcgcagtccacacgcgcgacgcatggcccgaaaccgtggagctgatgcgcgaatacaagggcaaaggcgtccggggcgttttccacgccttttcggacacggccgacacctaccgggaactgaaggagtacggcgacttcgtcttcggaatcggcggggtggtgacgttcaaaaagagcaagctggccgaggcggtgcgggagatgcagctgcgcgacatcgtcctcgaaacggactgtccctacctgacgcccgcaccccaccgcggcgaacgcaacgaatctgcctacgtgcggtacgtctgcgaaaaagtcgcggagctgaaggggctgacgcccggcgagacggccgaagcgacgacggccaacgccgaacgcattttcggaaaataaagaatacgaccatacacgatgaaatcctctatcctgattatctacacgggcggcacgatcggcatgaagaacgacgccgaaaccggagccttggtgccgttcgacttcagcgccatatacgacgaattcccgtcgctcaagcggctcaacgtggacatcgacgtactgacgatggaccccgtgatcgactcgtcgaacgtcacgcccgccaactgggccgcacttgccgaactgatccgcgacaactacgcgcgctacgacggattcgtcgtgctgcacggcaccgacaccatgtcgtataccgcgtcggccatgagtttcatgctcgaaaacctcgcaaagccggtcgtcttcaccggaagccagattccgatcggcgtactgcggaccgacggccgcgagaacctcatcacggccatcgaaatcgcgggcgcgcacatcggcggacgccccgaagtgcccgaagtgtcgctctatttccagaaccggctgttccgcgccaaccgcaccaccaagcgcagcgccgaagcgctgagcgccttccgctcctacaattatccgccgctggcggaggtcggggtcaacatcgcctacaacctcccggccatcctgcatccgacggagatctcgccccagctgcgcatcgccacgcggctggccgacggaatcgaggtggtcaaactctttccgggactgggcgaaaacatcctccgggccatgctctcggcccccggactgagagccgtggtgctcgaaaccttcggcgcgggcaacgccccgaccaacgagtggttcatccgggtactgaaggaggcgatcggccgcgggatcatcattctcaacatcacgcagtgcggcggcggcaaagtctcgatggaactttacgaaacggggcttcgcctgcaggaaatcggcgtcctgtgcggccacgacatgaccaccgaagccgccgtgaccaaactgatgtacgtgctgggactcgacctgccggacgaccggacgcgcgcgctgctgcgccgccccctgcgcggagaatttacggcctaagccattgcacggaacgatttttttttctatatttcgcactgctaatgtatccttagaaggcccccggtgacggcggacggaaagatgcgaacatcgcaacaagttgatcggcaggaaattgcatgagttcagaataaaaaattcgggattcggctgcctgcgtgaaaccggtatggaaagtatgcggacagcgaccaaaaagcaccgtatgaattccggaagcgtgaaaaaaaagatttttttaggatttttttagggaaaaataagaaattgaagaagtcgggaaaccgagatatggaataaaccaaaaaagacacaaacaaataaacaactaatcaaatttaattttatccaacacaactatgaaaaaactttttttgattctgtcagtggccctgttcgcactgggtactgttaacgctttcgcgcaggaagccgctgccgctgccgaagagactgcagtcgctgccgaaaccgcactcgcaggtgacagcatgcaccacatcatgatgcagaaattcctcgaaggcggttgggaatggatgctcccggttcttctctgcttggtgatcggtctggctgtcgctatcgagcgtatcctctacctgtcgctggcaacgatcaactcgaagaagctcatcgctgccgttgaggacgcactgaagaacggcggcatcgaagctgccaaagaagtttgccgcaacacccgcggtcctatcgcttcgatctactatcagggtctcgaccgctacgatcagggtctggattcggtcgagaaggctgtcgtttcctacggttcggttcagaccggccagatggagtcgggtctttcgtggatcggtctgttcatcgctctgtcgccgatgttgggcttcatgggtaccgttgtcggcatgatcgcggcgttcgacgccattcaggctgccggcgatatcagcccgaccctcgttgcaggcggtatcaaggtcgcccttctgacgaccctcatgggtcttatcgctgcggttattcttcagctgttctacaactatatcgtttcgaagatcgattcgctcgtgaacgatatggaggattcgtccatcacgctgatggatatcctgacggcatacagcaagaaataatcccaacgatttaaagagttaaaaagcaattatgaaaaagatattgaacatattgctgggcattctgatggcgatcaccgtggtacttctggtatacgcgatcgctacgggcggctcggatgctgcgatcagcctgaacctcgtatggggatacttcctcttcgtgttcgctatcgccgcagccctgttctgcgccatcttcggaatgattcagaacccggcaggcatcaagggaaccatactctctctggcgctgataatcatcgtcgtcggcgtatcgtacttctacgctgccggccacacggtgaacatcgtcgatctccagaccaatggtttcttcggccacggtgaaaccgtaattaccgaaacgagcattctcgtgacgtacgttgctttcgtcgccgctttcctgacggccgtagtaaccgaaatctggggcgctttcaaataatggagtgaacaacaatggcaacagataaaaggaaaatacaggaaatcaatgccggctcgatggccgatatcgccttcctgctgctgattttcttcctggtggccacaaccatgaatgtcgataccggtctggtgcgtatgctcccgccgatgccccccgatgagaaacaacaggaggacatcaaggtcaaggaacgcaacctcttcctcgtgctcatatcgggcagcggcaacatcatggctggtccctccggcaagcaggagattatcgacctgcaccagctcaagaacaggacgaaagaattcattctcaatccgatggacgacgaaaaccttcctgagaaggtggagaaggagatcgaattgagcgacggcagcaagtggatgtatcccgaaagccaaggcgtcgtttcgctccagactacacgtgataccggctaccagtcgtatatcatggtgcagaacgagctgacccgcgcattcaacgaggtccgcgatgaagtcgccatgcggaaattcggcgcaaaattcgccgatcttcctgaggaggaccgtaacgcaatatccaaggcagttccgctgaagatctcggaggcagaaccccgtaatataaagaagtaagctatggcagtaatgaaaaagaagggcaacaaaggtttgccccctatctcgaccgcatcgcttcctgacgtgatcttcatgatcctcttcttctttatggtatcgacgaccatgcgcgatcaggaactgctcgtgagatacaaactccctgaggctaccgaggtacagaagctggagaagaaatcgctcgtcagctacatccacatcggacagccttcgctggcgatgcaggccaaattcggtactgcaccccgtatccagctgaacgactcgtacaaaacgaccaaggatattctggacttcgtcgctgcagagcgcgataagctcagcgaggccgaccgtgcttcgatgaccatctgcctcaaggccgaccagaccacgaaaatgggtatcgtaaccgacgtgaagcaggagcttcgccgtgccaacgcactgaaagtctcctacgccgcttccaagtcgctgggatactaatccgaggagagtatttgaaaaagagctgaagtctttacttcagctctttttgttttgtcttataacagggtatttcggcgtttcaagtacgaacgttacgcgaccggctcaaaacggcagctccagctggtcgatctcgtggttgaaggtcagccggtgatggggagtgagaccgtattcgcggatcgcaaggcggtgttcgcgcgtcggataacctttgttcttccgccagccgtactggggaaactcctcggccagacgcagcatatactcgtcgcggtgcgttttggccagcaccgaagcggcggcgatgtcggcatacttgccgtcgcctttgacgatgcagcggtaaggcagttcgagccgggtccggaagcggttgccgtcgatggccagaaagccgggagcgggatcgagccgcgccgcggccagcgacattccctcgaacgacgcattcaggatgttgatctcgtcgatccgctcggcggagaccgcttcgacggcccatgccacggcttcgcgttcgataatcacccgaagcttctcgcggttgcgctcggtcatctgctttgaatcgttgagcaggggatcgtggaaatcgggcggcagcatcacggccgcggcaaaaaccggcccggcgagacacccccgcccggcctcgtcgcatcccgcttcgggaagatcgtattgaaagcaattttcaagcataaccaaaaacattaaatcatcggcacccgacgcaaatcaaggaaaaccggcaacaaactattacacgcccgccgccgggagttgctgcggcaaaaattgcgcagacgaatcctgcggccggatcggaaccacacttcgcattccacaatcaaacaaaatagcacctgcatccggaaagcagacccggaagcaagtccggaaagctggcccggaaagctggtccggaaagcgagtcggaacccgattccggacagaaccgccggaatgcaaccggcatctccggagacgtcgatccgtcccgcggccgtcccaccgattccgccgagcggccgagcaactgaacagctgagcagccgaacaactgaacaaccgaacaactgaacaactaaacagccgaacaaccgaaacatgccgtgttgctcctgcaaacgggccgcaaccatacgcaagactcgaaaagaaacaccctccgcaggattccggctacaacaaagttagcaattatttagtcccgtaccgcttttttccgtatttttgccgaaagcagaaatcgccgcatgaagatagatatcgcccgacaaccgctggtcccggccttcgtcaccctcttcgcactcgcagtcacggccatgtggggcggggcgggaaacggcgtgtccgccggcgcgccggagacaatgcccctgctgggcggagcgctggcccggtttcaggccgcatatccggtgtgggcgcgtctggccgcgggattcatgatcctcttcacgggaatgtgcacggggcggatcgccatccgctacaacctctatggagtcagcacatgtctgccgattccgctctacgccgtcgtcgcctgcggcatcgtttcgggcggaaactacctgacggcattcgccgcctcgatgctgctggcgctcgccgccaagaactactgccgctcctactgcaacggctacggtttcgatgccattttccgcgcctccctctatctgggattgctgccgctggtctatgcccctgcaacgccgctggtgctgatccttccgctggcgatactgcttttcagacgtacgttccgcgaagtcgtcgtcgccgccgccggtctgatactgcccgtgctgaccgcctgctacgtcagctggggcgcgggagaagaattcacggctccggtcacggcactggccgacgcggtcgtatcgggcgttccgctatggattttcacggcccttccgctcccgtcgctcgtcatgctttgcatcattgcggcactcgccctgacggcgctctttttctttctttcggacatttatgccgccggaaccaagccgcgttttatccttatctttaatataggtatactggcgatgactctcgccctgctctgcaccccgtcggtcactcccgaagcattcaccctgacggcggttcccgccgccctgcttttcccggtgcttttcgtgcggatagaccgcagaatcgcactgcccgtctacctcattctgttggccgcttcggtctacattgcagctttgcaataatctatttagtcacaaatatagtccaaacagctctatttgccttaatgtgtctttttagcgtattaattcttttactaaataaatattaaattgtatacttggagttgaacaaaagtgacgcaacttattgttcgcagaaacttaaaatacgatttagtatgaagaattcattgaattcgtcggctcagcagccgatgatcgtgaagtatgtcgaagcacttcacaacggaatccagtctcaggcgctctcgcgctatgcaatcggttacatccttcgcggtacgaagtacatctacgaaggcgataagcgccagacgctcacacgcggagacgtattctacctcggcatagggcatcactacatcgagaacttcccggaaaacggccagcccttcgaacaagtgctcttttactatacgccggcggacctccagcgtatcctgatgcacctgaacatcacctacggcctgaacatttcgaacgaacattcgtgtgaaaactgccgcaaccgcacgcacgtcgccatgcccgcatggaattcgatccgcaactttttcgtcaataccaacaactacctgcgcgacgaagacttccaccgcgacgagacggccgagaacatcaagatgaccgaattgatctatctgatcgcctcgcacgaagactgctgcatcaaaagcaagctgctgagcaacgtggacgccgcgaaagagaatttcgaacagatcgtctacgaccatatcttcaaagacatctccatcgaggagctttcgaaactgacgaaccgttcgctcacttcgttcaagaaggagttccgccgtcatttccagatgccgccccacaagtggtacatccgccagcggctgatgcactcgcgtctgctgctgatctcgacttcgaaatccatttcggagatcggcaacgcctgcacgttccccaacacgtcgcattttattaaacttttcaaaaaggaataccagatgacgccggccgcttaccgcaaccgccacatcacttcgatcgccccggagaagcagcccgcaacggtgcagaacgcggaaatacgcgaagcgctttaatcaaaaacttataaatcggctattattttaaattttttaattataatttaacagatttttttaggttagtttgaaaaaatgttataaaagatttggtgaattgtgaatttcagtttatctttgtataacaaaacgtgggattctcccactctcattaacctaactaacctaaccagaggggttcgctactgccaggtaccgaacccctttctcgtgtccggaagcggcggagagaaggctccgataatgaattattgcagtttcggcaggtgcgtttttttattttttaatatgctttctccgggcggcggcgacggggcgggcgggaagcggcttccggccgaatatccgcctcccaagcccggaaacgggcgaatcccggcacagaagcgtccggcgcggggctgtcaaagaaaatggaccattcttagggaatatcaattattttttcgtatttttgcatcaattggaaaataatgatcttaaatgccgaagttttatgacaaggtagatgtactgaaaaaacccggatggctgaagatccggctccaccgaaccccggaatacgccgaggttcagcagatagtccgaaaacatgcgctgcacacgatttgcagcagcggcatgtgtcccaacaaggccgaatgctggagccgcagaaccgcgaccttcatgattctgggcgatatctgcacacggggctgccgcttctgtgccaccagaacaggacacccccttgctccggacgccgaggaaccccggcgggtagccgaaagcgtctcgctgatgaaactgaggtatgtcgtcgtaacttctgtaacgcgtgacgacctgccggacggcggcgccgcacattgggccgcaaccgtccgcgccatccgcgaacagaatcccgacgccgcaattgagctccttattcccgatctcgacgcacggcccgacctcttggacacggtcatcgcgtcgaagcccgatataatcgggcacaacatcgaaaccgtcgagcggctgacccccgtggtccgttccagagcgaaatatcgcacgagtctggagaccctgcgccacatgagccggcagggcgtcgcaaccaaaagcggactgatggtcggacttggcgagagcgatgacgaagtattacaaaccctgcacgacctgcgcgaagcgggcgtcgggatcgtaacgctcggtcagtaccttcgtccaactttggagcattaccccgtggcggcgtatatcactcctgaaaaattcgaatggtacagactcaaagcgctggaaatgggcttcgcctactgcgcgagcgcgccgctggtccgctcgtcgtacttggcggaagaggccctgcaaagcgttaaaagtttgcagcgatgaacgtttactgccgggacctcggacagatggactacaaagcctgctgggatttgcagcagagcctgttcgacgtcctgacagccggaaaaacgaaccggacggcagcgccggagagcgcaacgccgtcctcggaagaggcgggcacgattctgctggtggagcatccgccggtatacacgctcggcaaaagcggccatgccgagaacctgctcgtaggccgcgaagcgctcgaagcgatgggagcgcagttctttcacatagaccgagggggcgacatcaccttccacggacccggacagctggtctgctatccgattctggacctcgaaaggttaggcatcgggctgagggcatacatcgacgcgctggaagagtccgtcatccgcaccgtggccgagtacggcatccgggcgggacgcatcgcaggcgcttcgggcgtctgggtgggagcgggaatcgcgcaggaaggcgatgtccggacggcggacggcggcggaaaatgcacgccggcgggcgctccgcgcaagatatgcgcaataggagtccgttcgtcgcgttatattaccatgcatgggttcgcgctgaacgtaacgaccgatctggagtggttttcgcgcattaacccctgcggattcaccgaccggggcgcgacctcgatcgaaagggaaacgggcgccaaagtcccgatggacgatgtcaaaagactcgtcgtgaaatttttaagtgagatattaaatgttagaatatataaatagtaaatcgtatgcctatagaaaaacgatgggtagtgaaaccgcagggcgattccgaggcggtggcgaagctcgcctccgtgctcaggatatcccccgtgctggcgaatctgctcgtacagagaggcatagacactgtagaaaaggcggacaagttctttaaaccgagcctcgccgacctccacgacccgttcctgatgaaggatatggacaaggcggtcgagcgggtcgaacaggccgttcgtaacaatgagaagatcatggtttacggcgactacgacgtggacggctgcacggccgttgcgctggtgtacaagttcctgcgccagatcgggcataaaaacctgatgttctacattcccgaccgctataccgaaggttacggcatttcggtcaaaggtatcgacctcgcggcccgcaagggcgtggggcttatcatcgctctggactgcggtatcaaagccacggaaaagattgtctatgcaaagagcaagggcgtggatttcatcatctgcgaccatcacctcccggccgaggaaattccccgcgccgtagccgttctggaccccaagcgggtcgattgttcctacccgttcgacgaattgtcgggctgcggcgtgggattcaaactcgtgcaggcctacgcccagaaaaaccggattcccttcgagcagatcagcccgctgctggacctgctggtggtgagcatcgcctcggacatcgtgccgctggtggacgaaaaccgcattctggcacatttcggcctgaaagacctcaaccgcgagccgtcgaagggcctgctgtcgatcatcaagatctgcggtctggacaaacacaacatcaccatcgacgacatcgtcttcaagatcggtccgcgcatcaacgccgccgggcgcatgcgcatggacgagaacgacgagaatgcgtcgccgtcgggcggccacgccgccgtcgagctgctgatcgagggtaacgaaagcatcgccgcggagttcggcaacgtcatcgacgcctacaatcaggaccgcaagtcgatcgaccgctccgtcacgcaggaagcgcacgacttcatcgagcgcaaccccgaaatgaagcggctgaagagcaccgtgatctataatcccaagtggatgaagggcatcgtgggcatcgtcgcgtcgcgtctgatcgaaacctactaccggcccacggtggtgctgacgatgagcaacggattcgtgaccggatcggcccgttcggtgccgggcttcgacctctatcaggccgtcgaatcgtgctcggacctgctggagaacttcggcggacacatgtacgccgcaggactgacgatgcggcccgaaaacgtggacgagttcacccggcgcttcaacgcctatgtcgaggagaacatcgacccgcagatgctgatgccccaagtggacatagacagcgaactgcttttctcggacatcacgcccgcgttccgcaaggacctcaaccgcttccagcccttcgggccgggcaatacggcgccggtcttcgccacctacggagtcagcaaccacggcgacgccaaactggtcggcgtggagtgcgaacatctgcgcatggacctcatccagcggcagaagcccaacaccaagatccagtcgatcgccttccagcagcccacgcactacgaatgggtccgctcaggacgtccgatcgatgtatgttaccagatcgtcgagaaccactaccgcggtacggtaaccacccaattgcgtatcaaggacatcaaacccgttctaaacaaatagatgatccggagaaccgggaagatccgccctgcggcggttctttccggtttatcctttcttctcgtttgcgtgtccttttgtttaaaatttgcgtcatttcacccctaatccctgcacacggtccccgcactgcgccgacgggttccgtcccacaccatgaacctactgaaaaaaccgtacggactgacgcttcaggcgttgctctgggtcatgattttcggatgcctgctggctcatccgttcaccaacgccaccagcagccctccgggagacaaacgcgaatatgtcctgataatcaacagctacaacgaatcttcctcgtggagttgggagataatcaccgacatcaccgcccggatagagcagatcgaaaacctcgaagtatacgtcgagcatatgaacatgctcctgatggaccagcagtcggatctggacaacttccgggcgaatctcgcccgtgaatacggcaagaatccgccccgaatgctgatatacatcggcgcgccggccttcaccatgcgggacttcgccgaaaaggagtggggaaaaggcatcccgtcgatcatctgcgccgaggaggatttcatcggccccgacaaatactacgtcagcaagcaggccatcccgcactccgagcgcattccgctccggaagctgaacggggaatacaacctgacactgctctacgccccgatctacctcgaacagaccatcgagctgatgcgccgcatgattccggagatgaaccggctggtattcgtccgcgacggccgctatatcaaccagcagtacgaagaagagctgagcaaactgctccaaaccgattatccgggaatgcggttcacctcctacaaggcctcgaacatgagcgtggaccaactgctcgactcgctgaacgtcaccgacacccgccataccggcgtgctcttttcctcgtggcactacacaagaaatatcgccggcaataccgagatcacggccaatcccttcaagatcatcgccagttcgacggctcccctgttcgcactatggcccccttcggtgaaaaacagcggcgtggtcggcggattcacatacgatacgggcgagtacaaccggcaggtcatcgcaacgttcgacaccattctggagggacgccagccgcgcgacattccgttctatgtcccatccggcgcccgcccgacgttcaactacccggcgatgctgcgcaacaggatttcacccgaaatatgcccctcggattcggtattcatcgacaagccggagacattcacggagcggaacagaacggcgatcatcctatgcggcggccttttcctgcttttcatcctcttccagcaatggcgcatccgcgtcatgcacaaagtcgaagcggcccgccggcgggaatcggaaagccagataaaatacgcgaacctgttcaaccggatgccgatcatctacattcaggagcgcgtgatcttcgaccgtgaccactatcccgccgacaccgaattcagcgacataaacgcctacttcgaacggacgttcctgccccggaatgaggtcgtcggcaaacggggaagcgagcttttcgcggattcgttttcggagttcctgcgtctggtgaacgtcgtgctgacggaaaaccggaccgtcacctttcccttctactacaaaccgcgggacatctttttcgaggtggttctcagccgctcgtacctgaccgaccacatcgacatcttctgtctggacggcaccgcgctgcacaaggcgcagcagaaactggactcgataaaccacaaactctcgctggcgctcgacgtcgccaacatcgttccgtggaaatgcgacctgaacaacggcaccatcctctgcgacatcaacaaaccggtcaaaaccgcctccggcgagatgatcgtgcagagcgacacttcgctttcggtgggcgtcgaatgctatttctcgaagatacacaaggaggaccgcgaccgcatacggcaggcttacgacgacctgacggcaggccgcaccgacaaggtttgcgaagagtaccgggtggtatccaacgagagcggtcactggcacatggaatgggtcgaggcgctggcggccgtggagtcgttcgacgcgcaggggcggccccagacactcgtcggaacatcgcaggtcatcaccgaacgcaaacgcatggagcaggaactcctctcggcccgcgaccgcgccgaggagtcgaaccgcctgaaaacggcgtttctggccaacatgagccacgagatacgcacgccgctcaacgccatcgtcggattttcgggcattctggcctcgaccgacgaggagcaggagaagcaggaatacgtctcgatcatcgaaaacaacaacgccctgctgctgcagctcatcggcgacatcctcgacctctcgaaaatcgaggcggggacgctcgacttcatccacacggacttcgacctgaacgaactgatgcgggagaaggagaacgtcatccgcatgaaggtccgggagggcgtcgaactgctcttcgagcagaaatacgaacaatgctccgtctgcaccgaccgtaaccggctctcgcaggtgatcatcaacctgctgaccaacgcggcgaaattcacgcagacgggcagcatccgcttcggatacgaaatgcgcggcaaagagctttatttctgggtctcggacaccggcagcggaatccccgccgacaaaacggagcaggttttcgaccgcttcgtcaaactcaacgccttcaagcagggcacgggactcggactgtcgatctgcaagatgatcgtcgaacatctgggcggacgtatcggcgtggaatccgaagagggcaaaggatcgaaattctggtttatcctgccctatgttccgggaaaggccgcggcgcaaaggacggaggagcaatatcccgccgtctcggtcgaaaagaacaaactgatgattctgatcgccgaggacaatgacagcaactaccggctgttcgaatcgatcctgcgcaaagaatacacgctcctgcacgcatggaacgggcaggaggcggtcgaaatataccggcaacaccgtccgcacctcgtattgatggatatcaacatgcccgtgatgaacggttacgaggccacggccgaaatacgcaaactgtcagagagcgtcccgatcatcgccgtgacggcgttcgcattcgcttccgacgaacagaaggtgctccagagcggattcgacggctacatggccaagccgatcaacgccctgcagctgcggacgcagatcgtcgacatgctgcgcaaacacgtggttctgctgtagccggaaaaggtgctgttcaaaggcggatgatccgcgccgcgtcgtccgcgtcgggcaggggagcgggcgtgaagtcggagtagccggccgcaatggcgcagaggggttcgcagtccgccgggacgggcaggaaactgcgcaggtaatcggccgcgctctgcccgtcgggttcatccttgcggcgcggccggccgttgatatgcacccagcaggagccgagtccctcgtccacgcaggcgagctgcagcagcgtggccgaaatcgcggcgttttcgcgccagagatcgcttttcgaagtatcgcccagcacgacgaaagccagcggcgcacccttcatgaacgccgacccgtaatcgcgcatttcggccatgcgggccaccaaggccggatcgtccaccaccatgagacgcgtggtccgggtgttgcgcgccgaaggcgccgtaagggtctcgcgcaggatgcggtccaccgtctcgcgcggcaccgcccggtccgagaattttcggatgctgcggcgtttttcgatcaactctttgaattccatttgttttgtcttttcggtctcgcttttgcaaaagtagtgaaaaataggtatatttgaaattcaaaacaccccgaagaatggattaccgattcaacatcgccctgatttacgatttcgacggcacgctcgcccccggcaacatgcaggaatacgacttcatccccgccgtgggcaaaagcaacaaggagttctggaccgaagccaacacgctggccgaggagcaggacgccgacatggtcctgacctacatggcgcgcatgcttcaggaggccaaatcgaaaggactgtcactgcggcgcgaagcctttcaggagtcgggccgccgcgtgacgctttacaaaggcgtcagggagtggttcgagcggataaacgcctacggggccgcacgcggcatccggattctgcactacatcaattcgtcgggcatgaaggagatcatcgaaggcacggagatcgcccacgaattccggaaaatatacgcctgctcgtttctctacgacgtggacggcatcgcctactggcccgccgtggcggtcaactacaccaacaagacgcagttcatcttcaagatcaacaaaggcgtcgagtcggttttcgacagcaagctggtgaaccgctacatccccgaaaacgagcgtcccataccgttcaaacacatgatttacgtaggcgacggaacgaccgacattccctgcatgcggctggtgaagaactccggcggccactccatcgccgtctacaaccccgaccagaagggggcgcggcgcgagatggcctcgctaattcacgacaaccgcgtgagccacgtctgcccggccgactactccgaaggatcggacatggacgtgctggtcaaaaccatcatcgacaagatcgacctcgacgacaaactcgaaaagctggaggtcgtaaaatgaccgggaagcgaacgcagatacaaccatccgacacaacaaatatgtcacaatccgaaacagacgcagtgaatatcctcttcgctacgaataacgtgcataaactcatggaggtgcaggccgtgctgggtcccggcttccggctggtgacgccccgcgaatgcggcgtcacggaggagattcccgaagagcagcagaccctcgaaggcaacgcttcgcagaaggcgcattacctcaacgaccgcacggggctggactgcttcgccgacgatactggactcgaagtgaaggcgctgggaggcgctccgggcgtgcattcggcccgttacgccaccgacggacacgatttcgcggccaacaaccgcctgctgctgaaaaacctcgaaggagcgaccgaccgccgggcgcagttccgaacggtcatttcgctgatcctcaacggcgaagaacaccttttcgaaggtgtggtcgaagggcgcatcatcgaccgcgaagaggggcacgaaggcttcgggtacgatccgctgttcatacccgacggatacgacaagaccttcgcccagatgtccaccgaagagaaaaacgaggtttcgcaccgcgcccgcgccgtacgcaaactcgcggcctatttgcattccgccgggaaatagggtctctttacggcacacgggcgcgacccggaaaaatgcacgcttgcttttgcacgctactttatctatctttgccctccaatggaagagagaacttacaacaaagaggaacgtttcgacgcccggaccatcgaggcgctgaaacttcattacgccgaaatcctgcgcctgctgggggaggacccggcgcgcgaaggactcctgaaaacccccgaacgcgtcgccaaggcgatgtcgttcctgacgaagggatacgaagagaatccgctcgaaatcatccgctccgcgacattccgcgaagagtacaaacaaatggtgctcgtaaaggacatcgagctgtactcgctctgcgaacaccatatgctgccgttttacggcaaggcgcacgtcgcctacattcccaacggacacatcacgggactttccaaaatcgcccgcgtcgtggagtgctacgcccgccgcctgcaggtgcaggagcggctgacggtgcagatccgcgactgcatacaggaggcgctcaacccgatgggcgtggccgtggtgatcgaagccagccacatgtgcatgcagatgcgcggcatcgaaaaacagcagtcggcgacgaccacgtcggcgttcacgggcattttcctctcggaccaccgcacgcgcgaggagttcatgaccctcatatcgcacaaataccggtaggattcaacaccggatggaataaaaatcctcgcggcttgtgacgttgcggggattttagccgaaaggcgcacctgcggatgaagacggcatccgcggactattcccggctttcgagattcaccagacaggtgttcagcattttatgcagttcggcctgcgtgaacggtttgggcaggaacccggtacatccggcggcgacggcgctttcggcttcgcggtcggaaggataggccgacatgacgacgaccggcagatcgggagcgctctcccggatgcggcgcgtaacctcgaatccgttcatgaccggcagccgcgtatcgaccagcacggcgtcgggacgctccgaacggaacaattccgcagcctcggctccggagcgcgcacgcaccagccggaaacgcgcgctcagcatcgcctcgatcagtttgaagctgatgtccgagtcctcgccgaccagcagagtccacgaaacgccgcccttcagggcgcccatatcggccggagccggttcgcactgtacgtcgcactgcacgacgggaatcgagaaatggaaccgcgtaccctttcccaattcggactccacgccgatcgtgccgttgagcttctcgacgatcgttttcgaaatagccagtccgagccccgtgccggagacgaagtcgtcgagcttgacgaaacggtcgaaaatgtcgcggaccttttcggcagggattcccatgccggtatcttccacgaaaaactccacgcgcccttcgcgcaggtcgaatccgaagcggatttcgccctcggtcgtaaacttggaggcgttgtttatcaggttcgagatgacctgcgccaaccggttctggtcgcagacgatctccacgttctcgatccgctcgtcgaaaacgagtttcacgcccggattcgtccggcccttgtgcatctcgtattccgatcggcacaaatcgttgagattcattggcctgaagtggaattcgagcgttccggcctcgattttcgagatgtcgagaatgtcgccgataagctgcagaagcaggctggaattggtgtcgatgatgtcgatgaactgctgtttctcctcctcggtctccgcttcgcccatcagcttggcaaagccgacgatggcgttgagcggcgtacgtatctcatggctcatattggccagaaacgccgtcttgagccggtcggactcctcggcgcggatacgggcctcgatgaccttaagctcggcgtttttctgctcggtgatgtcccacgacacgccgataatcagcggcagacggttctcgaccggaaccagcgatttcgaggtgttgacgatgcgcgtctcccccttcgccgagacatactcttcgatgaactccatgcgctcgcccgtgcgcagcagttcgaggtcgtcgcgccggaaatgctccgcatccttcggactgggaaacacctcgtaatcggtatatccgagcgccttcgacgcggggatatgcgaaaactcctcgaaagcccggttccagtagagataacggaactcgttgccggggtccttgacgaagagatagaccggaatgttgttgaggatgctgtcaaggatggagttcatctccttgaccttgttttcgtgttcgatgcgccgcgtgatgtcgcggccgaagaaccagacgatttcgcgctccttgaagtggtcgtagatgatataggccacgatgtcccacgccacgatacgcccctgagcgttcttcagacggacggtgtatttgtatgcgccgttgtcccggcggatcttcgccagccgctcctcccacaactgccgcgtcgcgtcgatcgaccagaactcgtacaccttgcgccgcgacagatcgcccttcaggtcgtgccgcctccggaaacgttcgttggcgtactccatcgtcccgtctacggcgcatgcgtaaatctcctcatcgacgttgttcagcgcatacttgaccatctccagctcgtgcttggcgacttcggcctcggtgatgtcgcggcagatgcagagggcgtgttcgccgtcgagcggcatgatgcggttttcgtaattgcgggtccggccgtcgagcgtgatgtcgtgatgcgaagaggaacccttccccgacgcgaaaacgttttcgaggttgtccttcacgttgcggcatgcttcgggcgaaagcatcgaccggatattccggcccaccagccggggaccttcgatcccgacatgattggtctgctcggaggagaccagttcgaccagcgtcccgtcgcgtctcagcacggtcagcatgtcgggaatcgaatccagaatcttacaggcgtaccggtcgcggaagcggcccgcggtgtcggccgccgaagcgagccgcgcctcaagctcttcgatcctgccgataagctcctcgcgggagcagttatcataatggctcatatgtcacgaaattgtggtgggtcttacaaaggtaacataattcccggaagtcggcgtctttttccggataaaacggattatcgccggaaccagtccgacaaatgctcctccgcacgtgaacgacatcccgaattccacgccggcgcagtgcggaaccgccaccggcagcacagtgcggaaccgccccggcggcgtgcaaaccgcagatgcgttccgggcggaacacaccccgacgagcatcagcggcggcaggcgcctgtccgctgagagccaatccgttcaggaaggaaaaccggacggtccgctctgcgccgcccgatttttcataccgcaaatccgcttctttatagcccgatcggacaacacggcgcaaaacggaggttgcggaacgaattttgaacacggtatctgacagcaaactaaaaattcaaaatcatgaccgtgaaaaaattacgctaccttgcattcgcactcacagcagttgcgttttgcgcgtgccagaaagagccttcgacatcgagtctccacaaagattatctggtctacaccgctcacgacaccgacgccgatttcgccgccttcgacacctactacattcccgacagcatcctgctgatcggctccgccgacaagacggaatactggaaagacgccaatgcgctggagatcgtcaataccgtcgtaggacgcatgaacgccgcgggctacacccgtaccgacgacaaagatgcggccaatctcggcctgcagctcagctacgtgcagaaagtgacctatttcgtgggttacgactatccctactggtggtggtactatccctattactggacgcccggttactggggcgactgggccggctggcactatccctacagcgtttattacggatatacggccggttcgctgctcgtggagatgatgaatctcgaagccgatcaagagagcggcaagaagctgcccgtgatctgggacagctttatcggcgggctgctgacctcgtcggaggagctgaaccagcagcgcacggtggacgccgtgcaacaggctttcgatcagtcgccttatctgaaaaaataatttaaccgcaaaacacgtccgattatgaaaacatcgaaatatcaggttctcaaaaccatcgcactctgtgtcgtgctgctcgcagccgcgcgtacgggcaaggcgcagattttccctaactcctacatcaacgtcgactggcaggtaggcgtgccgctgggcagcgcctatgccgacaaggcgtcgggatggggcatgaacttcgaaggcggctacttcatcacgccgtcggtctccgtaggtcccttcatctcctaccagaccaacctttcgagcattccgcgccagacgctcgatctgggcgacggctcggccctgaccgtcaatcagaaacacggctcgttccagctgccgttcggcgtcacgggacgctacacatggcttccagacagcgtattccagccctatgcgggtctgaagctgggcgccaactatgcagaattctcgtcctactactacgtaatcaagcagtacaccgacacgtggggattctacctctcgcccgaaatcggcgttagcatcttcccgcgtccggactaccgcttcggtttccacgtggcgctttactacagctacgccaccaacagcggcgatatcctgacctattcggtaaacaacctcaacaacttcggcatacgcgtcggtatatcgttctgacgcctccggaacacgacgcgagcaggccggacccgacgggtccggcctgtcgttttgggggagagacgcataaagagatacgacataaaaatccccctttggaaagggggattttcgatataagcgcgcaaaacgtattgtcagatattccgatcaatgcgcttcgagccagttgccgcccacgccgtaatccaccaccagacggactttgagcgcggcggcggactccatggcttcagtgacgatggccacgacgcgctcctgctcggaacggagcatatcgacgaccagttcgtcatgcacctgcaggatcaccttcgagcggatgccttcggcggcgaaacggcggtgtacgttgatcatggcgatcttcatgatgtcggccgcagaaccctgaatcggagcgttcacggcgtttcgctcggcaaggccgcgggcgatggcgttgtgcgaagcaatgtcgttgagatagcggcgccggccgaaaatcgtcgagacgaagccctcttccttggccttggcaaccacgttgtccatatattcctgcaccttggggtaggatgcgaaatagccgtcgataatctctttggcctccttgcggggaatctccagccgctggctcaggccgaaggccgaaatgccgtagatgatgccgaaattggcggtcttggcgcggcggcgctcctcggaagtcacttcgccgagggttttgttgaacagtttggcggccgtcgcggcgtggatgtcctcgccgtgggcaaaagccgcgatcaacgattcgtcgcccgaaaggtgcgccatcagccgcagttcgacctgactgtagtcggccgagagcagcagatgctcctcgtcggaggggatgaacgccctgcggatgcggcggcccatctcttcgcgcacggggatattctgcaggttgggattcgtggacgaaaggcgtcccgtagcggtaacagcctgattgaaagaggtgtgtatgcgtcccgtgcggcggttgaccagctggggcagcgcctcgacataggtcgagaggagtttcttgacaccccggtattcgaggatcagatcgacgatgcggtgtttgtgcgcaaaagactgcaggtaatcctcgtcggtgcagaactgcttggttttggtcatcttgggcttctcggcgatgcgcattttgccgaacagcacctcgcccagctgacgcgccgagttgatgttgagctgcgattcgccggcctcctcgcggatcgcggcctccagctcggccagccggcggctcagctccacggaatagacggccagcgcctcggagtcgatccgcacgcccgccatctcgatatcggccagcacggcgatcatcggctcctcgatttcgaaatagaggtgctgcaggccaagctcttcgatctgcggatagagcgcatgcttgagccgcagcgtgacgtcggcatcctcggcggcgtactccttgactcgctcgacgttcaccagatccatcgtcagctgcttggagcctttgccgatcagggtttcgatctcgatcggcttgtagttgaggtatttctccgcaagggcgttcatgttgtggcgcgattcgggatcgagcaggtagtgcaggatcatcgtatcgtacttgcggccccggatttcgagtcccagctgccgcaggaccatcaggtcgaacttgatattctggccgatcttggcgatccggtcgttttcgaaaagcggccgcacgatttcggcgtattccgccgtattctcctccttgaaaggaatgtaccacgcttcgaaaggcttcacagccagcgacatgccgacgatgcggtcgttgaagatgtcgaatcccgtcgtctcggtgtcgaagcagaactcttcgtatttcccgacttcgtccaccacgccgcgcagctgcgcggcgtcctccacgagtctgtagtcgtgaggcgtggtctgcgccgtcttgaactgcatcgcttcggcttcggcctgcaattcggcagcgggaacgtccgacgccgcaggcatctccacgaccgggtcgccgaagaggttgccctgaccgaccagcgcggcccgtttcgcggccgccgacttggcgcgggccatctcggccagctgcgtctgcgcctcctgccggggaccttcgggcagggtttcgggaggggcgaggttcgtcaggtcgttcataaacgccttgaaatccaattctgcgaaaacggccttgagttcgtcgatatggggatcgcagaccgtaaggtcctcaggccggaagggaatcggcacgtcgagacagatcgtggtcaggtgcttggcgagacgcagtttatcgccccacgcggcgattttctcgccctgcttgcccttgatcttcgacacgttgtcgaggatgttctccaccgttccccactcctgcaccagtttgcaggcgctcttctcgccgatgcccggcacgccgggaatgttgtccgaagcgtcgccccacaacgcgaggatgtcgcgcacaaggacgggatcgtcgatgccgtacttctcgcggatcgaatcgcggtccacgatctcgatgcttccgtccgcgcctttctgcttgtaaatcttacagttgtcgcgcaccagctggccgtagtccttgtcgggcgtcaccatgaagacctcgtagccggcttcgacgcccttttgcgacagggtgccgatcacgtcgtcggcctcgtagccttcgacctccagaatcggaatgcacatcgcctccagcacccgtttcacatagggaaccgaaagcaggatgtcttcgggagtctcggcgcggttggccttgtactccggaaaaacctcgcggcggaaactgccgcccttggggtcgaacgccacgcccagcaggtcgggccgttcgcgcttctgaatgtcgcgcaggaacttgacgaagccgaacaccaccgaggtgttcatgcccgcgcggttgcgcatcggacggcccagaaaagcatagtaatacttgaagatcaacgcataggcgtcgacgagaaaaagttttttcatatataagaagtcgcgtcaataataatttcgcatggatgacgccgcatcctccgcccctccggaacggggcgaagcgcatacggcatgtgttccgaatgacgcaccttaccggttatcttcggcaaaccactcggcgaacgaagtcgcggtttcatgcaggcggagcgaatgcagctccacgccctccggcagtcggcgcgaaatgcggcgggcgaaatcgccgagcatattctcgcaggtcggctggtagtccaccgtgacgatgttgccgaaacgttcggcgagcatggcccgcagcgacgcgttgcacggcgtctgacgcaggacgagggagtggtcgaagtgcgacacgatctcttcgttgacgatgcgcttcaacaccccgaaatccatcaccatcccgcatttagggtctccttcgccggccgccggacatcccttgacggtcacgaaaagccggtaggagtggccgtgaatctcacggcatggcccgtcgtatccgtccagagcgtgcgccgcctcgaaggagaactcttttgtcaatctgatcactgtcatatgcgcaaagatattcattaaatgcgaaaggcggaaaggatttctgatttttcagcgtcccgcgtccgcttctccggcccggacgggcgaaattgcagcggcagaagggtatttccggcgtccgccggacccgccgcataggggtgcgccggtccggtccgattcaggccgaaacatgcggtaacaaatttgcactttcagatattattattacattgcagcaataaaatactaataacgagaaagatacattacagcctatacaaacgattacacactatttatccggtaaaagtacaatatttttaccaaatccggattttgaataacaaatcgtaagtatatcgtccttcgggcactacggcaccgcaaacaccatcaacaatattttattcctatttttttaactaaaaccccttctgctatgaaattttggaaatccgcgctcctctacgcagcgacggtatgcacgctgacagccgtctcttgctccgatgagacgaaagagccgaatctgtacacgacagccgtaaccgacgacggcaacggtacggccaaagccgcacccgcgtcggctgccgcgggtgaaacgataaccctgacggcgacgcccaaggaaaacttctcgttcgcgaaatggacggtcgtcagcggcgacgccgaactgaaaagcgcgacggccaacccgacgacattcaccatgccggccgcaaacgtcgaaatcaaagccgaattcgccgccgtcccgaaccagattaccgtaaccgacgacggcaacggcacggccgaagccgatcccgcatcggcgattccgggcgaaacggtaaccctgacggcaacgcccgccgagaacttcttcttcctgaaatggacggtcctcagcggcggtatagagctggaaaatccgacggaaaacccgacgacattcaccatgccggagggggggggaaatgtcgaaataagagccgaattcaccgacctgctttcgcttgcagcctccgaaatcatcgcgtatgacgcagagaaagcggccacggtgaccagactgtccgtcggcggcgacctgacggacgaggtaaccgccgcgatcttcgacaaattccagaatcttctcttcctcgaactcaccgacgccaaagccattcccgacaatttcatgtacgatgccggctcacgcgcaccgaaacagaccaaactcgaagagctgaatgcgccggaggcaacgtcggtcggcgtgaatgcgtttcgcaacagcgtcctcaccgccgtcaacaattcatcgctccgcaccgtccatcttcccaaggtgcagaccatcggcgaacgggcgttcagcgacctgtggacgctcgaagaggcaatcttccccgaactgaccgaagtgggcgaatcggccttctcgcagaacaaagcgctggccaaggcggagatgcccaaactcacctatgctcccaactcgttattctacagctgcaccgccctcacggagatctcgatgccgaatctcgaagaggccggcagcgccttcttctactgcggcggtctgacgagcatctcgctgcccaaactcaagacggccggagagtcgtgcttcgcctattcgaccaaactgacgcaaatcgacatccccaacgtggaaaagctggagaagatggccatgtacgcctgcaacggcctgctgagcttcagcggcgaaaaagtcgagtccgtaggcgcccagtgcttcgaaagatgctatgccctcaaggaggtttcgttccccgcggccacggctttcggaagcggctgcttcatcgactgcgaatcgctgacaaaagtcaatatccccctatgcaccgccatcagcgacaaaatgttcttcatcgcgcaggcctccgtctgcacctcgacgctcaagacgatcgacctgtccaatatcacgaccatcggtacgagcgcattcgaagggtgcaaggcgctcgaagacgtggtggacttttccaaagtcacgactgtcggcgcacgtgccttctacgaatgcatcacgctcaggaacgtggatctctccaacgtcacggccacgggcgattacgctttcttcaggtgctggggtttcacgggcgagctgaacatgccgaagctgaccgcccccggcaaatacctcttccgcgaatgcaagaatatcaccaaggtgagcgctccgctgctggaaagcacctccctgtatatgtttgccgagtgcaccgctcttacggagatagacatgccgatactcaagaccgttgaaaacttctgcttcaaccggtgcgagggtctgacggaagtcgatatgcctacggtcgaaaccatcgtttccggagcgttcagcaattgcctgaacatcaaaacggtcaatctccccaacgtcaaaagcatcggcggaaccgtcttcaacaactgctcgctcatcacctccatttcccttccggcgcttcagaccttcaccggcggggcgttcagcggaatgaccggcctgacgagttatgacgttccccttttggccacgctcgaaacgatcccctcgtcgctgttccagaactgcaagagcctgacggcaatcgacctgcccgccgcaaaagatctgggtatgaacgccattcgcgggtgcgacgctctggagagcatctcgctgcccaatgtcgagaaggtaggcaacttctgtttcgccgaaaacccgaagctcaaggaggtcgatctttccaaagccacttcgctcggaaccaaggctttcgacaaatgcaccgccctgacgaccctgaagctgggtgcgacgacggccatcacgctggctgccgacacattcacctcggccgacgttcccgccgcctgcaacctgttcctcaacgcggcgggcgtggaatacccgaccgccgccgggcagcaatggaaaaacctcacttggaaatccatcgcctcctacgttccctgagcaggggcggcgtcagcacgccggaccgctgttcccatgtcttagaaaacagccgccgcgcgtaccgacgaacgatttccagatgatccgcaacgaacccgtctccgaacatggagacgggttcgtcgtattttattttcgccttccggaagattaaatcacacggggtttgcgttttatatccgattaattcgtatatttgttaaaagtcccgacatatgaaatatgttttaaaagaccttgcgccacggcctgaaaaagacttgttcatcacgcagtactggtccgacaaacagtcggatccgcccttgcatttccacgaggactacatgctgagcctgaccctgaacgtcaggggtacgcgcatcacgggccgtacggccgacgacttcaccgaaaaggacctgatcatcatttttccgggcgttccgcactgctacacacgcgacgaagcctatgccgacatcgactgcgaagccgtggcggtacagttcagccgcgacatgcccaactggcagcttttggaaaccgagtacctgcagcccattcagaagatgctgagcctgcccgtcgcaggtctccatttctccgaaaaggtggtggaccgcgtccgcgaccggctgctgcagctgcccggactgcggggattcgagtcggtggtgctctttctggacatcctcaacgacctcgccacggcgggaccggacgaaatgcacattatcggaacgacggattacaagacgcaggccgacggcaacgaacgcatcaagaaaatcctgcagttcgtggaaaacaactaccacaacaaaatcacgctcgaagacatcggcgccgaagtgggcatgtccccctcgtcggtatgccgctatttcaagaagaacacctgccagaatctctggacctatatcaacgggttccgcatcgtgcgcgccgcgcagatgatcgtggagaccgacgctccgatttcggaaatcagcacccggtgcggattccacaacatctcgaatttcaaccacgccttccgcgagcgcatcggctcagcgccgggcgaataccggcgcaaattcggctcgacggtgatttcgcccgaccggcagcaggtcgaggagatcggccgcaaactcgacgatttacgcaacggagccagtttgtccgaggggggggg

SEQ ID NO: 12085 - DNA, 105276 bp, Unknown
  gut microbiota DNA sequence
aaaaatagaaataggccccgaatccggggcctattttcgtatcggtttgcggaacagcgtccgcgcaggttcagttcaccggtttgcggtgcggtctcaacgcagttccagcttataggggtagtacatgacgactccctgctgtttggtcgcctcctgcacctgcttgtactccttcatcagcagtcccagttccgaacgggtcatggcctcgcggacgctgacgttgagcgacgcgatgaaggcggcgaatcccgtcggttcctcgatcacctcggtcacccggtagctgtcgcccagaccggccttgtccacggcgatggcgatggccgttttcagacctccgtaggtgtcgatcaggccgatgccgagggcatcttcgcccgaccagacgcggcccccggcgatgtcgagcaccttttcgaccggcaggttgcgcccttcggccacatgggtcgtgaaggtcgtgtagaccttgtccacgccgcgcatgatcgaagcccgctcggcggcggtcagcggcgaggtcgcccccattccggccgaggtgttgctcttcacggcgtcgaacgtgattcccagcttgtttttaaaggcgtcgatggtgttgaggtacatgccgaagacgccgatcgaacccgtaagggtcagtttgtcggccacgatgacgtcggcgggacacgaaatgtaataacctccgctggcggcataggaacccatcgaaacgaccaccggtttctcggctttcagcagttccatttcgcgccagatgacgtccgaagccagtgcgctgccgccgggggagttcacgcgcagcaccacggccttgaccttctcgtcgtcacgcacgccggccagcgtcgcagccagcgtattgccgtaaatctcctttccgaagccttcgccgtcgacgatcgcgccgtcggcatagacgacggccacctgatcggccgagatgtttttgaggtcggcgcctacctgcgaagcgtattcgcccagcgtgatgaaattatactctccgtcggaatcggacgctacgcccagttcggcgaatatgtccttcatctggtcctcgtagatcaggctgtccacgaagccgtgttcgagggcatcctcaggcagcgaaacctccagtttgtcggtgatgcggttcagctccttcaggtcgatgccgcgggcctcggcgaccgagccggcgatggtgttccacatcgaattcacgagcgcctgcatctgctcgcggttggcgtccgacattttgggaaggatatacggctcgacggcgctcttgtatttgcaggccgtagggcggaacacttcggccttgatgtcgagtttgtcgagcaggcccttgtagaacatcaggttgaacgcgagacccgaccagtccatggcgccttcgggctgcatgtagattttgtcggccgccgaagcgaggtaatatttcccctgcgaataggtctcgtcgtaagcgacgacgaatttgccgctctgcttgaaatcgacgaccgcttcgcgcagctcttccagcagggccgcgcccatcacgccgccgttgccgttcatccgcaggtaaatgcccttgatgcggctgtcgtccttggcggcttcgagcgcgcgcagagccttcatcagcggaagctggcgcgtggagcgcagcgtggcgaagtcgatcccggcgaagggatcgctcgacggagcgtcggtcagcacatccgaaaagtcgatcttgaggatcgattccgcatgcacggccaccgtcttctccatcgagccggctatgcccagcagaataaatatccagagaaaaaacaccagaaacgaccccacgacgaaggcgaggatcgcagccagaaaagtcttgataaaattcataacgtatcgtttattgtttgtcctgtttcgttccgagtccggatttcctttgcaaatataaggaaattttacgaaaaacaaataaaatttatcgtttttcgataaaataataggccctgctatatttattctgcaaaatatacgttatctttgcgattgtagtcacaacacgaatcatggaagaaaaaatcagacatctgctgacgtccgtcgtccatcccgaaacgggacaggacatcgtcggcagcggctttatcgagcatatcgcctccggagccggcaagatcaccgtcgtactccgtttcgccaaggcccgcgacccgttcgcggtgaaaatcaaaaaccaagccgaggagattctccggcgtgaattcccgcagcaaaacgtcatggtcgtcatcaaggagggcggcgccgcgccgcggcccgaacccaagctcaagacgaccaccggcggcatcgccaaagtgatcgccgtggcatcgggcaaaggcggggtaggaaagtccaccgtgacggccaacctcgccgtcgcactgcgcaacatgggttaccgcgtcggaattctcgacgccgatatttacggtccctcgcagcccaagatgttcggcgtggaggggtacctgcccgatgcggtgcaggaggagggaacggaccgcatcgttccggccgagtcgatggacatacgcctcatgtcgatcggattcttcatcaaaccgaccgacgcccttttgtggcgcggcgccatggcggtcagcgccctcaagcagatgatccaccagaccaagtggggaacgctcgatttcctgctcgcggacctgccccccggaacgggcgacgtacacctctctattataggcgaactgaaaatcgacgccgcggtgatcgtctcgacgccccagcaggtggcggtcgccgacgtggtgcgcggtgtggagatgttccgcaacgaaaacgtaaacatcccggtagcgggcgtgatagaaaacatggcgtggttcacgcctgaagaactgcccgaaaaccggtactatatcttcgggaaaggcggcgcgcgccgttacgccgaagagaacggcgtggattttctgggcgaaatacccatcgtacagtccatcatggagggttccgacgagggacgccctgcggcgggcatcgatccgagggtcgaaaaatggtaccgcgaaatcgccgaaaagactgtcgaaaaggtgatgaaatcgtgttagaaaccctgttgataaccgacgataaataatgaaaacttccggccccgaagagttgcaaatcccgaaacagggagggtatatacaagttttcgccgaaaccaaaaaaagttttgccgaattatagtcagcggccgactcccaaaagagcaacagaatgttcacaaaaaagggatgtcgaaatgttgaaaacagttgtgaacaattgtcgattattatttttatagattgactatcaaataattggaataaaaacagaagaaaaagaagaggagaaaatgttgagagaaaaatcgcggggaaacttgtgaacagtatcaacagctattatttctattcttatatctttatttaaaattaataaatagtaaaaataaaaaatgaaggtcaataactccgcggagatccgccgccggatcgacgaactcaagcgccgcaagcgcgccgtcatactggcccattactacaccacgcccgaagtgcaggaggcggccgactttctgggcgactcgctggccctctcggtcaaggcgcagtcggtagacgccgacatcatcctgttcgccggcgtgcacttcatggccgagaccgccaaggtgctctgccccgacaagaaggtgctgattccctgccccgaagcgggatgttcgctggccgagtcgtgcgatgagaaggattttgcggccttcaaggcgaaatatcccggccatacggtcgtttcgtacgtcaataccacggtcggcgtcaaggccctgaccgatatctgctgcacctcgtccaatgcgctgaaggtcgtgcagtcgattccgaccgaccgaccgatcatcttcgcccccgaccgcaatctgggaggttatatcaaaaagctgacgggacgcgagaatatcgtgttgtgggacggcgcatgtcatgtgcacgaggaattttcgctggagaagctgctgcagctcaaaaaggagcatccggccgccaaggtcgtcgtgcatcccgaatgccgggcctatatcgtcgaagtggccgacttcgtagggtccacggcggcgatcctcgactactgcggccgcagcggcaccgacgagttcatcgtggtgaccgaatcgggcatcctcgccgagatgaagaagcgttaccccggcaagacgtttattccggcaccccccgacgacgagacctgcggatgcaacaactgcaagtacatgaagatggtgacgctcgaaaacatctgcgcgtgtctcgaaaacgaatcgcccgaaatcgtgctcgacgaagaggtgcggcgcagggccgagcgttcgatcctgaacatgataaatatcaaataacaatcctgtatgaagaaactctttttactgatcgccgcggcgtgcgcctctttgaccgctgcggccgacgagggaatgtggctgctgccctaccttcagaaaatgaatatcaaggagatgaaggcccgcgggtgcaaactttcggccgaggagatttacagcgtcaacaaatcctcgctcaaggacgccatcgtgatcttcggtcccggatgtacgggtgagatcgtttcggccgacggcctgctgtttaccaaccaccactgcggctacggttcgattcaggcgctgtcgtccgtcgaacacgactacctgaaaaacggtttctgggccatgtcacgcgaagaggagatcccggctccgggactcaaggtgcgttttatccgcaagatttcggacgtcacttccgacattctgggatatgtgcccgacgtggcttcgggcgaagagcgggcgcgcatcgtggccgaacatgctgcggccgtgcgcagccgcattgctcaggacaatcccggcatggaggtgctggtgaaggatttcttcggcggaaaccagtttttcgccttcgtgatcgaggttttcagcgacgtgcgtctggtgggaactcctcccacttcgatcggcaagttcggcggagacaccgacaactggatgtggccgcgtcatacgggcgatttctcggtctttcgcgtctatgccggacccgacaacaagccggccgattacgcgcccgaaaaccgcccttacaaggccgacaagtttctgaaggtttcggtggacggatacaaggagggagacttcgcgatgatcatgggtttccccggttctacgtcgcgttacatgacttcgttcgagatagaccgcatgctggatatcgagaatccgcagcgcatcttcatccgcggcgaacgtcaggccattctcaaggaggatatggccgcaagcgacaaggtgcggattcagtacgcttcgaaatacgcccagtcgtcgaactactggaagaattcgatcggcatgtcgcgcggcatccgcaaactgaacgtcaaggcgcagaaagaggcgcaggaggcggctttccggaaatgggccgaagccaatacgctgccgaccgaaggctatatggatgcgctggaccgcatccgcgaagcggtggaaggcaacgcttccgcttttgcggccgagcaggtgctcagggaggcgctttaccgggccgtggagatcctgacgccggcgcgttcgttcctcgccgtggagaagatcaccgatccggcgcgttcgaaggaggccatgagggctttctacaaggattacaacccggcgacggaccgacgtgtagccaagcgcatgatgcagatcgtcaaggagaaatgcggagaccttccgacggtgtttgccgaagtgatcgacaagcggttcgacggcgatacggatgcttatgtcgattatctgtacgataactcggttttcgccaccgaggaaggcacgctggccttcgtggatgatttttcggtgggaaaacgcgatgccgatccggcggtcgtattcgtgcgttcgctcgatgcgaaactgctcgaactggcggatgcccagcgggagaataaccgcaggttcaaggacgggcaccgtctctacatcgccggtctgatgcgcatgcagcccgacaaggcgtgggcttcggatgcgaactttacgatccgcctgacttacggccgcgttctgccctacgatccggcggacggtattcgctacaactattatacgacgctaaagggcgtgatggagaaggaagatcccaagaatcctacggagtttacggttcccgacaagctcaaggagctgtacgccgcgaaggacttcgggcggtatgccaacgccgagggcgaacttccggtggcctttttggccgactgcgatattacgggcggcaattcgggttcgccggtgatgaacgccaaaggcgagctgatcggtctggcgttcgacggcaactgggaagcgatgtcgggcgacgtggctttcgagccgcagctgcagcgcacgatcgccgtggatgtccgctacgtgctcttcgtcatcgacaagttcgccggcgcgaaatggctgatcgacgagttggagatcgactgaccgaagcggaatcgatcgttgaaccggggcctgatttcaggttccggtttttgtttattaccatctgtaaacaaataatggcgctttgcttttttttagcctaaaaattactaattttgacagaaattagtaatactgtatctgtttttatggcaaaagaattcaagcgttatctcgttacctcggctcttccctatgccaacggtccggtgcatatcggccatctggcgggagtttacataccttcggacatttatacccgttacctgcggctcaggggccgcgacgtgatttcggtctgcggaagcgacgaacacggcgtgcccatcaccatcaaggcccgcaaggagggggtgacgccgcagcagatcgtggaccgttaccacaatatgatcaaaaagtcgttcgaggggctgggaatgtcgttcgacatctattcgcggacttcgtcggcgacgcatgccaagaccgcttcggaatttttccgcaaattgtacgacgaggggaaattcatcgagcagacttcgatgcagtattacgacgaggagacgcagacgttcctcgcagaccgttatatcgtcggcacctgtcccaaatgcggcaacgaccgcgcttacggcgaccagtgcgagaagtgcggctctaccctctcgcccgacgagttgatcgatccgcacagcgccgtgtcgggttcagtgcccgtgaagcgtgagacgaagcactggtatctgccgctggatcagtacgaaggattcctgcgcgagtggattctcgaagggcacaaagagtggaaaagcaatgtttacggacagtgcaagagctggctggacggaggtttgcagccccgtgccgtgagccgcgacctcgattggggcattcccgtaccggtggagggcgccgaagggaaggtgctttatgtctggttcgacgctccgatcggttatatatctgctacaaaggatcttacacccgattgggagacctattggaagtcggaggacaccaagatggttcattttatcggcaaagacaatatcgttttccactgcatcgtcttcccgtcgatgctcaaggcgcacggcggctatatcctgcccgaaaacgtgccggcgaatgagttcctgaatctcgaaggcgacaagatttcgacctcgcgcaactgggccgtgtggctgcacgaatacctcgaagagtttccgggcaaggaggatgtgcttcgttacgtactctgcgccaatgcgcctgaaaccaaggacaacgactttacgtggaaggattttcaggcccgcaacaacaacgagctggttgccgttctgggcaatttcgtgaatcgcgcgctggtgctgacccggaaatattacgacggggaagttccggcctgcggcgaactgaatgactatgaccgccagactgtcggcgaggtggctgcggtgaaggcgtcgctggagtccaatatcgaacattaccatttccgcgaagcgttgaaagacgccatgaatatcgcccgcatcggtaacaagtaccttgcggataccgagccgtggaaagtcgtcaagaccgatccccaacgtgtcgggacgattctcaacatcgcgttgcagatcacggccaatacggccattgcgatcgaacctttcatgcccttctccgccgcgaagatactgaagatgctctctgtcgagaaattcggatgggaacagttggggacgatggatctgattgccgccgggcataagatcggggaaccggttttgctgttcgagaaaatcgaagacgacgtgattcagcgccagctggacaaacttgcggcgaccaaagaggccaacgcagcggctgaggcagcgcaacaggttgaacctcagaaagatgcgataagtttcgacgattttcagaaaatggatatccgggtttcgacgattcttgcggccgaaaaggtggcgaaaacgaagaaactgttgaaattgacggtcgatacgggtatagatcagcgcgaaatagtatcgggaatcgccgaatacttcacgcctgaggagttggtcggacgtcaggtgctcgtgctggtcaatctgcaaccccgcgaattgaaggggattttgtcgcgcggtatgattctgatggccgaggatgcctccggaaaactgcgtctgctgagcccgaatgaggcgacgaacagcggcgccgtcgtgggataatgttgtaaaacctttaaaacttattataatggaaaatatggattggggtgccttgggattcgattatcgcaagaccgacgcaaacgttcgctattattatacggacggcaaatggagtgagatggaggtcacgggcgacgagtatatcaagatacacatgtcggcgtcgtgtctgcattacggtatcgagctgttcgaagggctgaaagcctttcggggtgtcgatgggaaagtccgtcttttccgtgtagaggagaacgccaagcggttgcagtcttctgcggaacgtctttgccttcccgtcccgacgatcgaaatgatcgtcaaggcctgcgtcgaagtggtaaaacgcaacgaaaaatatattcctccctatggtaccggcgcatcgctctatctgcgtcccgtcatgttcggtacgactgccggattgggggtcaagcctgccaaggatgctttgctgattgtttattgctctcccgtgggtgcttatttcaaagacggcatcaagcctatctccgttgccatagaccgtgaacaggaccgcgctgctccacgtggaacaggcgacgtgaaggtcggcggcaactatgcttccagcctgctgtcgggtgaaaacggccataaattgggctattcgaatatcatgtatctcgatgccgcagagcataagtacatagaagagtgcggagcctgcaatttcttcggtatcaaggagggtaaatatattacgccgaaatcctcttctgtattgccttccatcaccaacaagagtctgcggcagttggcgcgagatatggggcttgaggtcgaagaccgtctgattcctgtagaggagcttcctaccttcgaggagtgcggcggctgcggaacggcggctgttatctcccctatcgggaagattttcgatatacagacaaatgatatttatgaatatgggacagaagtgggtaaggtttgtatggaactttacacacgtcttcaggatattcaatacggccgtgccgaagataagtataattggtgtacgattgtagagtaatattctcgttatttgaattaaaaagaccgcttatttaagcggtctttttaatttgttccacgtggaactatgtgttgtggtttgtgatcatataggggtttgtgttcactggattgttccacgtggaacggcttgttgaacacgcctgaattttatcttccgaattttaccagcaatacattgacgtcggccggggaaactcccggaatccgggacgcctgccctattgttgccgggcgtattcgggtcagtttctgacgggcttctatcgtcagcgagttcatcgagtggaaatcgaaatcttcaggaatgcgaatgttttcgagtctgtggagtttttctgcgatgaatttttcacgttctatatagcctttgtatttgatttgaatttcggcttcttcgattgcttcggctgaaatgttgttgtccgagatgaattttcggagttttggaagggcttccgagagcgattcgaacgtaacattattgcgcatcagaatgtcgtaaagcttccttccctgagtcaaaggttccgaatttaccgattttaaatagtcgttaatttcggctgctttgatgctctgccggcgggcgaaggaaataagcgattctacggatgcttttttttcggtgaaatgggcgtatcttttttgtgaaatcaaccctattttatatccgatcggagtaagtctgagatccgcattgtcctgccggagcaaaatacggtattcggcacgcgaggtaaacatgcggtagggttcgtccacgcctttggtaacgagatcgtcgatcagtactccgatgtaggcttcgtcgcgctgcaataccacggcttcttcccctttcagcgcccggtgtgcgttgattccggctatgagtccctgcgccgcggcctcttcgtatccggtcgttccgttgacctgacctgcgaaatacaagccggaaacgagtttcgtttcgagcgaatggtgcagttgcgtaggcggaaaatagtcgtattcgatggcgtaaccggggcggaatatatgcaaatcttcgaatccccggattttgtgcagcgcttcccactgtatgtcccaaggcagcgacgatgaaaatccgttgagataatattcgttggtcgactcgccttcgggctccagaaagagctggtgctgatccttgtcggcaaaggtccggagcttgtcttcgatgctgggacagtagcggggacctattcctttgatcgttccgttgaacagaggcgaacggtcgaaaccggtgcgcagcaggtcgtgcacctcggccgaagtgtagactagaaaacaaggcagttgatgcttaacaggttgtgtatcaggtgaaaaagagaacttggccggattttcgtcgccgtattgcggttcgagcgcttcgaagtcgatcgtgcgtgcgtcgagacgtgccggagtgcctgttttcatgcgtcccgtttcgaatcctacggagcgcagggattccgtgattccgtgcgaagcggcatcccccgccctgcctccttcggcgtgcgaagtgccgcagtgcatcattccttcgagaaaggttcccgaagtcagcacgacagcgcggcaggcgaactcgatgcccatttgggtccttacgccctttatgcggggtttggccccggcggtgtcgaagagaagctccgtcgccgcatcctgccagatgtagaggttcacggtgttttcgagcgtgtgccgccattgcgccgagaagcgcgatttgtcgcattgggcgcgcggactccacatggcggcgcccttcgaacggttgagcatccggaactggatggtcgtgaggtccgtgatgcggcccatttgtccgcctaaagcatctatctctctgacaatctgacctttggctactccgccgactgccgggttgcaggacatcgaggccattttggtcatatccatcgtaagcagcagcgtgcgcgagccgagacgcgcggcggccgaggccgcttcgcatccggcgtgtccgccgccgatgacgataatatcgtattctaaaatcattgctctgttctcaattcttggttgattctccggcagggggcgtttttttcggcccggtcctgccggaatcgcacgcaaaagaaggctgttattgctcctcccagaacttcagatatttgtcctctttgcggtgcatctgcgcgttggtgcggggggttttgtcgccctgtccgcagaggtgcagtacgccgtggaccactaccctgcgcatctcctgaagcgttggggactcgtactgccgggcgttgtcggcgacggtttcgacgtcgatgaagatgtcgcccgaaatcacgcgggcgcctttgcggtcgctgtagtcgaacgtgatgacgtcggtgaaatagtcgtggcccaagtactgacggttcatctccagcaaccgctgcgccgaacagaagatataactcacttcgcccagctcatacccttccgcttcggcgacccggcggagccattccgcggtcagccgtttccggggcagccggtagctgcaatcgtccgtataatatttgacagccatttttttcgtatttttcagattttacgtccttcctccttcgtccggggtgtttcgctgctgaggacgcggatttccggtgctggacggagatccggccgctgccggaatcgggtgtctgcctgcggatgccggcagcgggtttcgggaaaccgcaccgtcgcatgtcgtcctcatgttatttcttgaaacagttctcggcacggagcttctggcccggattcggcggatagatgccgaagacgagtttgtactccgtttccatggtcatgatgttcaccgccgaaccgatggtgcccaactgtgcgtttctggccactttctggcccttctcgacgcagatcgaccccatgttggcataggaggttatatattcgccgtgagccacgtaaacgtcgtatttgttggttatgcggttgcgcttgacgtccacgaccttgccgtcatagatcgaaatgacgtgcgcccccttgggacccgtgatttcggccatgttctccttgtagcgcttcacgcggcccgccgtgacgggaagccgcaggcccgtggtcttggtcgagaacgaatcgccctccttgttgcccttggtcagtttgcgcagttcgccgatggccacgtcgagctgctgctcctgcgatattttgcgctggagggccgttttctccttctgggagagctgccggatgctggtgcgggcgttgcgggcgtcgcgttcgagcttctgtttctgggctttcagtttgagcgttaccgagtcgagcgaccgtttgcggcggtcgagcagctccttctcctcggcgacctgcttcgagagcgccgcgatgtcctgcagtttgcgttcgcgcatcgacgccacttcccgcaggttggtgatcttgcgggccatgtcggcgaagtcgcgcgacgagaaaatataggtcagataattgttgtgccggtagttgcgataggcttcgcgcaccatttcggcgtattgggtacggttgcggtccagcgatctgccgaggtctccggcgacgctgtccgtgcggtcgatctccccgcgcagcaggcgggcctgcttctcggtctcttcgagcagctggttccgcgaatctatctgacgggccagacgccgtacgcgctcctcggtggcggcgcggccctccttgagcttcgaaatctcccgctcctcggcggcgattttctgctccagcgccgcgataacccgcttctgctgttcgatcttgcggtcggcctgagcggaggccgcaagggcggcgaacagcaggaaaagggtcagtatgcagcttttcgtcggcttcatcgcatttgcagggttactcttttttcgctttgctttccgttatccggcgttcgatgcgcccggcgtcgtagcccttttcgagggctttgcgccagtatatctcggccatgaaattctcgcccagcgccttcagtatgtcgccgtagtggaccagcagcgcggcgctttcctgcgcgtcgagggcgacggcctgctgcatgattttccgggcttcgtccacacgtcccagtttgaagagcacccaagcgtgggtgtcgaggtaggtggggttgttgtccgtgagggccgtggcgcggctggccatggcgagcgccttttccagatcgcgctcctcaagcgagaggaaataggcgtagttgttcagtaccatggcgttgtcgggatcgtagcgcaggctcctgtcataggctttgtagcactgcttcatggccgaacggaacgaacctttgcggctgatgagcacgaaatcctcttcgtcgccggactcccctgccgcggctttctggtgccatgtgtcgccgatcagcccccagatcgcgccccgcagcgaatcggtgcgggcgtaacggagcgactgctgataggcttttatcgctttgtcgtactctttggtgtagttcagcacgtggcctttcgagagctggaagtcgatctctccggggaaaagctccagcgcccggttgatgtagagggccgccgagtcgggatgctggagatagctctcgatgtcgatcaccgaccggtagtagctttcgacgggcggctggtcgtcgaggtggagtttgtagagcgccagcgcctgctccagttcgcctgaggcgatcaggtgcttggcatagagttccaccacgcgccggtcctgcggatagcgtacggccagcgtcgaggccagcgcgttgagctggatgtaatattcgcggtagaaccgcatgtcggaggtgagctgctcgaagcgtttgatcttggcgtcgagcggcatctggtccgagtcgaagagccgctgggtgacgttgagtaccgaccggtaatcgcggcggccgttgtagtagtcggccagcgacatcagcgtggcgacgtcggtcgagtcgatctgcatggcgcggtcgtactccgccattgccagcgagtccttgttcagaatcgcatagaggtcggccagcaccacatggtgctgcgcttcgtagggggcggcttcgaccatggccttggcctcgtcgacggctttgtccagctgccgtgtggagatcagcagctggcgtttcatcgcgctcagcatcgggatgcgcccgaagcggagttccgccgagtcgagcgtggcgatggccgaatagggctgctggacctgctcgtagagcgccgccagaagccggtagttgtcggggttctgcggatctgcggtgcgcaggcgcttgtagacgccgagcgcttcggggtaacgctgggcgaagatcagggcctgtccgaggaactggtgataccatttgttcgtcgtgtcgagccggtaggcgcggcgggccagctccaccgcctcgtcgggcgtggagtacatgccgttggtcgccatttcgtaataggccggcgcgtaggtcgaatcggcgcggatcgcctcggtgagatattcccgcgcccggaccgtatcgtgaaaaatggtattctgtttgatgccctcggtatagagccagacgctgcgcagcgaatcggggtaaccgccgggtacggttgcggcgggacccttccccgcggcgaaagccgtgcagaagagtacgcagagtgccgttgtcgctgtcagacgtttcatggatcgcggttttagagtgccgtgtcgaactggtggaggaaccgcacgtcgttttcgaaatagagacgcaggtccttcacgccgtatttgagcattgcgatgcgctcaatacccatgccgaaggcgaatcccgaatatttttcggggtctatattgtttgctttcagaacgttgggatcgaccatgccgcagcccatgatttcgagccagcccgtgcccttgcagaccggacagcccttgccgccgcagaggttgcacgacacgtccacctcggccgaaggctcggtgaaggggaagtacgagggacgcatgcggatgacggtctgttcgccgaagacctccttggcgaagtagagcagcgactgcttcatgtcggcgaacgagactccttcgtcgatgtagagtccttcgatctggtggaagatgcagtgcgcgcggtaggagatggcttcgttgcggaagacgcggccggggcagatgacgcggatgggcggcttctggtgctccatggtgcgcacctgaatcgacgaggtgtgcgtgcgcagcaggatgtcgggattcttctcgatgaagaaggtgtcctgcatgtcgcgcgccgggtgttcgggcgggaagttgagcgccgagaagacgtgccagtcgtcctcgatttcgggaccgtcggcgacggtgtagcccagccgcgagaagacctcgacgatctggttcttgaccagcgaaatcggatggcgcgaaccgagttgttcggccgagccggggcgggtcatgtcttcggttgcggcgccgtcgtcggaggctgcgtcctgcagctgttcgcgcaggctgttgatgcggtcgagcgccgtggttttgagtttgttgagctgctggcctagctcgcgtttgagttccggagccaccgttttgaaatcttccatcagggcgttcagttcgcctttcttgccgaggattttgatgcggaattcctcgatctcggccgctgccttgggtttaaactcttcgacacgtcggaggagttcattgattttgtcggtcatattttgtttgtttacgctttttccctacttttaccactcgtataacgtgcaaagttataaaaaaattgagatatgttgcgtaaaaccctctcatttatctcggtgctgctgctggtcgcaggggctgccggggcgcagaatccggagactccggctgcgcggccccgtacggtgggcgtcgtgatgagcggcggcggcgcaaaggggctttaccatatcggcgttttggaagcgctcgaagagaacggcgtgccgatcgactacgtggccggaacctcgatgggttcgatcatcgccgcgatgtatgccgcgggctattcgcccgccgagatgcgcgagatcgtcgcgtcgggcgtggtcaaggactgggtttcggggcgcatcgacccccgctatactccctattaccggcagatcggtcacaatccggcgtttctgagcgtgcgtatgaacgtgggaggcgccggcaagcggttccgggtgacgaacctgctctcctcgacgccgatcgacatggcgctgacggagcttttcgcgccggcgacggctgccgccgagggcgatttcgaccgtctgatggtgcctttcctgtgcgtttcgagcgacatgaacgcccgcgaacccgtggtgatgcgcaacggcgacctgagcgaagcggtgcgttcgtcgatgtccattccgctggttttcaaaccgatgaagaaggattcgatgctgctttacgacggcggcatctacgataactttccgtggcggcccctcgacgtgggattccgccccgatctgatcgtgggcagtatctgcaccgcgggaaacgccccgccgagcgaaaacagcagcatcctcgatcaggcattcatgctggcgatgcacgacaccgactacgacctgcccaaagggcgcagcgtgacggtgcgccgcgccgtggatgtcaacatgctcgatttcgacagcgccgtggcgatcatggacgccggctatgccgatgcgaaggaggccatgccgcagatactggaacgcgtttccgaacgctggtcgcccgaacgttacgccgagcgccgcgaggagttccgtgccaaatggccgccgctgtggttcagcgactataagctggaggggctggccgaagcgccggagtcttacatccgcgacttcgtgaaggtggaccgccgcacgcccggacgccagcgcccgatgggattcgaagagctgcgcgacaacttgtatgcggtgctcgccggcggcgatttcacgatggatttcccgcatgtgcgctacgactcgctccggggaagctattcgttcgccgcgcagttccacaccaagcccaacttcaaactgaccatcggcggcaacatctcctccacggccttcaaccaagcctatatcggcgtcaactacgagacgatcggccgcgtgggccagcagctgggcgccgatctctatctggggccgatctatacgtggggcgcgatcggcggacgtacggatttctacatgtggaagccggtgttcctcgactactcctacaatttcgcggtgcgcaacttccggcacggcgctttcggcaacctcaccaagatcgacaacacccagcaggtcaagaacagcgagagcttcttctcggtggccgccggcatgcccctcgcccaccgcggggtcttcctgctccgcgccaacggcggacacatcaattacagatacgattcggacgtgcttttcgccgacgacaccgaccattcgcgctactcgttcttcggtctcaaggccgagctggcccgcaacaccctcgacaagttcctctatccgcgcaaaggctccgacctgcggctttcgggcatcttcgtgacggggcgcgacaagtacgagcctttcaatgccgaccggttcctgtcgcggaccacccgccagtgggtcggggcgcgtttcacgtgggacaagtatttcgacatgcccggcacggggtggttctcgctgggtgtcaacgtcgacggcgtgattaccaaccatcccgaattcaccacgggaggcgcgacgctgatgtcgatgcctgcctatacgccggtttcgcatgcgcagatgatctacatgcccgacttccggggcaagcgtttcgtcgcgggcggcgtgatgccgaccttcgacctgatgcccaacttcttcttccgcacgggtttctatacgatgttccgcgccaaacgcgactatgtgcccggatcgctgagcacgaccgcggacgaacgctggcactatatcgccgaggcgtcgctggtctatcacaccccgatcggtccggtgagtctcgcgctcaccaaatacgacctgcgcaactggaagaacatgtacctgacgttcaacttcggctatgcgatcttcgccccgaagggaaccttctattgacggcgcgcggggtggagcggctcctgccggcgaagcgccggcggagggatttccggccttccggacccggttccgcatcattttttctgttatcggaataacagatttctaaaatattttcataaatttgccccggaataaggagctgaaagatcaattcatcaaaataattcaaaatcaaagagctatgttcgcaatcgacaattacgatttcaaaggcaagcgcgcaatcatccgcgtggatttcaatgtgcccctcaacgaaaagggcgaggtgacggacgacacccgtatccgtgcggcgatccccacgatcaagaaagtgctcgaaaagggcggttcggtgatcctgatgtcgcatctgggacgtcccaagaagaatcccgatcccaagttctcgctggagcagatcgttcccgccatcgagaagcgtctgggcgtgaaggtgatgttcgccggcgactgcatgggcgagaaggccgccgagatggccaagaacctcaagcccggcgaggtgatgctgctggagaacctgcgtttctacgccgaggaggagggcaagccccgcggtctggccgaagacgccaccgacgaggagaagaaggccgccaagaaggcgctgaaggagggtccgcagaaggagttcgtcaagaagctcgcatcgtatgccgactgctacatcaacgacgcgttcggtacggcgcaccgcgcacacgcttcgacggccctgatcgccgactatttccccaacgacaagatgttcggctacgtgatggagaacgagctgaaggccatcgacggcatcatgctcaatccggagcgtccgttctgcgccattctgggcggttcgaaggtttcgaccaagatcaccatcatcgagaacctgctcgaaaaggtcgacgtgctggtgctgggcggcggcatgacctataccttcgcggctgcggagggcggcaaggtcggcaactcgatctgcgagccggatcagttccagacggcgctcgacattctggccaaggccaaggagaagggcgtgaaggtcgtgatgtcgcccgacgcgctgatcgccgacgcattctcggccgacgccaatacgaacgtcgctccggccaacaacattcccgacggctgggaaggcgtggacatcgccgatgagggcaagaaggtcttccgcgaggagattctcaagtgcaagacgatcctctggaacggtcccgtgggcgtgttcgagatcgacaaattcgcgaccggttcgcgcgccgtggccgaagcgatcgccgaagccacttcgaagggcgcctactcgctcatcggcggcggcgactcggtagcctgcatcaacaagttcgggctggccgacaaggtttcctatgtctcgacgggcggcggcgccttgctggagtacatggagggcaaagagcttccgggcgttgcggccatccgcaaataagccgggcttccgaacaagatacgaacagacaggggtgctccggcaagtacggacacccctgtcgtcactaaaaacccgaacctatgaaaaagattttcatttttgcagcaacagtagcttgtatggcaagttgtcagaatacatccaagacgccggctatcgacatggccaatttcgacctttcggtcgctcccgacgccgatttttaccagtacgccacgggcggctggcagaagaacaacccgctgaagcccgaatattcgcgttacggctcgttcgacgtgctgcgcgacaacaacgagaagcgcatcaacgagcttttctcggagatgaccaagatcagcgccgcgccgggaagcgtcgagcagaagatttcggacctctacaagatgggtctcgattcgacgcgtctgaacgccgagggcgccgcgccgctgaagagcgccgtcggggagattctctccgtcggggaccgcggacagctgaccggcatcgtggccaaactccacacgacggtagccaatccgttcttcggcgtgggcgtgcaggccgatctgatgaacagcgacatcaacgccctctatatctcgcagtcggggctgacgatgggcaaccgcgactactacctcgatcctgagaacgagcatatccgcaagggctacaaggagtatctgggcaggatattccgttttgcgggcattcccgaagccgatgtcgaaaaggcggtcgccggcgtgatgaacgtcgagacgaagctggccgagaagtcgtggtcgaacgtcgagctgcgcaacattcccgcgcagtacaaccccacggcgaaggccgatttcgagaagacttacgacgccatagactgggaggcctactataaggccatgggcatcggcgacttcgagacgatcatcgtcaccacgccgtcggccgtcgccaacgccaacgacctgctgaaaaacgccccgctggaggatatccgctactacctcgcggcgcagtatatcgacgctgcggcaccctacttgagcgacgacttccagcaggcgtcgttcgacttctacggcaaggtgatgtcgggccagcaggagatgaaaccccgctggaagcgcgcgatgtcggtgcccaacggcacgctgtcggaggctgtcggcgagatgtacgtcgccaaatacttccccgccaaggacaaggagcgcatgctgacgctggtgaagaacctgcagacggcgctcggccagcacatcgcggcgctcgactggatgtcggacgccaccaaggccaaggcgcaggagaagctggccgcctttacggtgaagatcggctatcccgacaagtggaaggactattcgacgctggagatcgacccctcgaagagctattgggagaacatcgtcaatgccaaccgctggtatacggccgacaatatctcggaactcggcaagcccgtggataaggagaagtggcacatgtcgccccagacggtgaacgcctactacaaccccacgaccaacgaaatctgcttccccgccgccattctccagccgccgttctacaaccccgacgccgacgacgcggtgaattacggtgccatcggcgtggtgatcggccacgagatgacccacggattcgacgatcagggccgcaacttcgacaaggacggcaacatgaacaactggtggaccgaggcggatgccgaggcgttcaaggccaagaccgatattctcgtgaaacagttcgacgcgatcgaggtgctgcccgccaaggagggccagcccgccgtcatggccaacggttcgctcagtctgggcgagaacatcgccgatcagggcggcctgcgcgtggcgtacacggcgttccacaactcgctgaacggcacggagcctgcgccgatcgacaacttcacggccgaccagcgtttctatctggcctatgcagccttgtgggcgcagaacatccgcgacgaggagatcgcccgtctcaccaagatcgacgtgcactcgctgggcaagtggcgcgtgaacgccacgctgcgcaacctgcagacgttttacgatgcgttcgacattaccgacggggccatgttcatgcccgaacaggagcgcgtgatcgtctggtagggtatcgtccggcaggatgaaacatcctgcgatcgaaggcggccgggactcccggccgcctttttttatagggatttcttttacagaggggacggccggtctctccggtccgccgccttgtggcggtcggatatgcggcggatgtgaattatcgaaaaacgataaatattttttgatattcaaaatttgttgttatatttgtcgccgaacaaaccccaaaaataactcgcagcgactatggatttacttacagtagaacatgtcaccaagcagtacgccgggcacaaggccctcgacgacgtatcgcttgccatccccaagggttcggtatacggcctgctcggtcccaacggcgccggaaagacgaccctgatccgcatcatcaaccgcattacggcgcccgactgcggtcgtgtgatgttcggcggccgcgaaatttcgcctgaggacgtttatcgcatcggctacctgcctgaggagcgcggactttacaagaagatgaaggtcggcgaacaggccgtctttttcgcccggctgaagggcctttcgcgccgcgaggccgtcgtacggctcaagcagtggttcgtgaagttcggcattcaggactggtgggacaaaaagatcgaggagttgtcgaagggcatggcccagaaggtgcagttcatcgtcacggtgcttcacgaacccgaactgctgatcttcgacgagcctttttcgggtttcgacccgatcaacgccaacctgctgaaggacgagatactggcgctgcgcgacaagggggcgacgatcatcttctcgacgcacaacatgtcgtccgtcgaggagatctgcgaccatatcacgctgataaacaagtctcgcaatatcctttcgggccgtgtggacgacattcgccgccgccacggaagcaatatcttcgaagtgttctaccgcggcgacgaacaggcgctgcgcaatgctgtcgacggccgttgcgagattctggaaggctcgcaggcgcaggcggtctacacctcgctcaaactgcacgtcgagcgcgacgaagaggtgcgcggagtgatcgccgcggtgaacgacgccgtcgaactgcgctcgtttcaggagatcattccctcgatgaacgatattttcatccgcgccgtaaacggaaacctttaaaacgatacgatcatgtcacaagtcagcattatcatagggcgcgaattcaacgagcgcgtccgcaaaaaatccttcatcatcaccacgctgctcatgcccctgctgatgatcggcctgatgttcgccccgatgctcatcatgaagtattcgcgcggcgacgagaagcagatcgccgtcatcgacgaaagcgggctggtcgctccgaagctgcagagcggcgaagagctggtcttccagactacggacctctcgaccgaagcggcccgcaaggagctgaccgacaagttcggcgtgctctatatcggctcggacatcctcaccaaccccaacaacgtgaagctttacgtcaattcgtcgtcgtcgctgacggtcgagagcaatatcacggggcagctcgaagagatcatcgaggccgaaaaactcaagtcgtacaatatcgagaacctctcgcagatcctgcaggaggtgaagaccacggtcggcatgcagaccttccgcaacgacgagtcgcaggaggaggagtcgcaggccaagtcgtcggtcatcgccaccggcgttgggttcgtgctgggcatgatcctctacatgttcctgctcatttacggttcgatggtcatgcagtcggtcatcgaggagaagaacagccgcgtgctggaggtgatggtgtcgtcggtgcggcccttcgacctgatgctgggcaagatactcggcgtggcttcggtggccgtggtgcaggtgctgatctggggcgtgctctgcgccgtcggcgcggccgtggcggtgcacatgatgccggccgacgtgctggccggggtgcaggccatgcagcacggggttcccgacgccgcggcgtcgatagacatgaatccggagatgctgcaggtgatggccgccgtgaccgacttcggctatatcctccgcatcttcgcctacctgctgctgttcgtcttcggcggatacctcttctactcggcgatgttcgccgccgtgggttcggccgtggacagcattcaagacgcccagcagctgcagacgccgatcaccattccgatcatcctcgccctgctggtgatgataaccgtcatcaacgaccccaattcgcagatggccttctggttctcgatgatccccttcacctcgcccgtggtgatgatggcgcgtattccgtacggcattcccctctgggaggtgatcctttcgctggcgatcctttatgcctcgtttaccgcgatggtgtggctggcggccaagatctaccgcgtgggaatcttcatgtacggcaaaaagccgacgttcaaggaactttacaagtggattcggtacaagtattagtccgcaccgcgatcgctgaaaataccgggccgtacgatgtcgtacggcccggtctgttttcggggcgggacggatttgcgcttcgggaacgaaagagattccggattcgcgggtttttcgtatctttgtccggaaaggtccggcgatcggggagtgtgcaaacgtagatttccgccgaatgtcgctccgcatcccttgtctttgaaggcatgaaagagtcgaaattcgtcaaaaccaagattttcgcgggatatgcgatcctgatcgcggtctgcgtcctttcggtaggctatgtctaccggacggtggtgcgtttttcgactcccgacggcagctattccctgcttcataccaaacgcagcgtcgcgggacagacgctctatcacctttatcaggccgagagttacggtcagctgatgatcgccggataccagtcctacgagtcccgttacaaacgcgagctgcgcaccgtgcgcggcctgatcgactcgctgcgggggctgaccgctgcggaggattcgctgcagacgatgcgtctggacagcatcgtgcgtcttctggccgacaaggagcggcggacgatgagcctgcggcggacgatccgttcggccgccacgtccagcctgctggacaagaatatccgcgagctgatcggtccggcggacagcgcggcgcgcggggacagcgtcgtcgtacgggcggcggacaccgtcgcttcgcgcgtggtcgtgcaggatacggtgaccgtcccgcggcgcaagcgcaagttcttccgtcgcttcgccgacctgttcagcccgccgaaagaggaggccgggatgatcatttcccgccacgaacgggtcgtggattcgctgcctgcgccggaggtgaaggatacgatcgcggtggtgctgcggacgctgcaggaccgggtgaccagcgaccgcatcggcatctacgatcgggcgtggaacgaagggatgcgcctgcggtacagcaacgagctggtgaacacgaagatataccgccttatcatggatttcgaagccgaggatacggctttcctgatgaaccgcttcgagcagacggaggccatccgccgccgttcgtcgctgacgctgggcgtgatcgccgtcgcggccgtggtgctcatgctgctgttcgtcggcatcctgtggcgcgacatcaaccgcagcaaccgctaccggcgggcgctggagcgggccaaccgcgacaacgaagcgctgttggcggcgcgcgagaagctgatgctggccatcacgcacgacatcaaggcgccgctgggttcggtgatgggctatatcgacctgctttcgcgcctgacaggcgacaagcgcgaggagctgtacctgcacaacatgaaggagtcgtcggaacatctgctggcgctggtgaacagcctgctggacttctaccgcctcgatatcaacaaggtggacgtcgataaggtcgcgttctgcccggcgcagctgttcgaaacgattcgcgccggatttgcggcgcaggccgcggcgaagggcatcgggctgacgctcgacgtcgaaccggcggccgggcgcgaggtggcgggcgatccgttccgtatccggcagatcgccgacaacctgatctccaacgccctgaaatttaccgacgaaggctcggtgacgatccgtgtcgatgtggtgcagggccggctcgtcttctcggtccgcgatacgggacgcggcatcggacgcgaagagaaggagcggatttttcaggaattcgtgcgtctgcgctcggcgcagggcgtcgatggattcggactggggctgtcgatcgtcgatcggctcgtgaagctgctggaggggaccatatcgctcgaaagccgcttgggagaagggagcaaattcatcgtttcgatcccggtgggaaccgtttcgggcggaggcggccgcaaactgcggcctgcagaagcggccctgccggcggcgtgtggcggcgtgaaggcgctgctgatcgacgacgatcctctgcagctcgaaatgaccgccgcgatgtgccgtcaggcgggtgtcggagccgagtgctgtcagtaccccgaatacgccgcgaaattggttgcggaaggcggcttcgacgtggtgctgaccgacatacagatgccgtcggccgacggtttcagcgtccttgcggcggtgcgcggcgtgaatcccgcgcttcccgtggtggcggtttcggcacgcggggagttggaagccggggatttctcggaccgcggctttgcggggtgcctgcgcaagccctttacggccaacgagctgattgccgtgctggacgccgtttgcggcgcgggaaaggcccgaagcgcaggggatgcggaaggtgcggagaaaagcggtgctgcgggaactgtcgtcggcgcgggagaacccgtcagtgcggggaggcatgtcggcaagagggaagcggacggggcggcggacaatgcggcggaggtttcggagggcggtgtgaatttcggccccctggcggcctatgcgggcgacgatgcggaggcggcgcgtgggattctggaatccttcgccgaacagagcgccgcgaattgccggctgctcgaacgggcgctcgaaagcggcgacgtcgcggtgctgagagccgtggcgcacaagatgctgccgatcttcacgatgctgggggcggccggagtcgccgcgacgctgcgcacggccgaaagctgggaaggtccgctgaccgacgccctgcgcggcgagatcggcgcggcggcggaaaatatccgcgcgattgtcgcggaagcgcaaaaaaaggtatctttgccctgagtatggaacggattttaatcatagatgacgatatcaccttcgccctgatgctcaagacgtggctctcgaaaaagggcttccggaccgagacggcggcgagcgtcgcggcggcccgtacggcgctcgcggagggcggattctcgctcgtgctgagcgatatgcgcctgcccgacgaggacggcatcgccctgctgcagtggatgtccgggcagcatatggagattccggtgatcgtgatgacgagctacgccgagatacagaacgccgtgcgctgcatgaagctcggcgcgcgggattacgtggccaagccggtcaatcccgacgagctgctgaaaaagatccgcgaagcgctcgacgtcccggctgccggcagtgagaagcctcccgttcccgccgcttcggcgaagaaaccgcgggaggagcgtcccaattacatcgaaggacgcagcgatgccgcgcagcggctttacgaatatgtccggctcgttgcgccgaccaacatgtcggtgctggtgaccggcgccagcggcacgggcaaggagcatgtggcccagctgattcaccgcgaaagcaggcgtgccggaaagcctttcgtggccgtggactgcggcgcgattgggcgcgaactggccgcctcggagtttttcggccacgtcaagggttcgtttacgggagccgtgggcgacaagacgggcgccttcgaagccgcgaacggcggcacgctctttctggacgaggtcggcaacctgacctatgaaacgcaggtgcagctgctccgcgccctgcaggaacgccggattcgccccgtgggcggcagtcgcgaaattccggtcgatatccggctgatcgctgcgacgaacgaggacctcgaagccgccatcgcgcgcggtgcgttccgcgccgatctctatcaccgcatcaacgaattcacgctccgcatgcccgaactgcggcagatgcgcggggacatcatgcttttcgccgacttctttctcgacgcggcgaaccgggaactggacaagcggatcgtgggcttcgacccgcaggccgccgcggccatgacccgctacgactggcccggaaacctgcggcagatgaagaacgcggtgatgtccgcgacgctgctctgcacgggggattatatcacctgccgcgaactgcccgccgagttgtccgaggcccccgaaactcctgcagtgccgctgcgcaatccggccggcgaggaggagcagatccgccgcgcgctggcgatggccgggggcaacaagtcgcaggcggccaaactgctcggcatcgaccgcaagaccctctacaacaagttgcatctttacggcatcgaatagccgccgggtgtggattatttccacatcttgtagcgcgattccacacctttccacactccggacgattccggcgtgccttgccgaccgctgtttatcagcggtttgccgttttttatccggatggcacgccgcttgaactccattttgtcagaacggttgatgagacatatccgaaccgaagaagtgaaaaggaaccttttaattttaaaagcgatgaaaaagacaattgtaacgatggcagctttgctgctgatggctggcggagcgatggcttgcgcccagcagcccgaaaagaaagaggcgaccgaagctgcggctccggctgccgacacgcaggagaaatcggcggctgacgatgcgggaaagacggattcgactgccggagaatccgcaaaggaggagagtaaggttgagagtgaagggtcaagtgagggtaactcctcctccgcatcggaagcaccggcttcgtccgcagaataggcttccgggataatcatcagttaaacaattgtttgccggggtgccccgcctgttttcaggcggggcgctttccttttgtgccggcaggttcggcgcttggccgggggcgggcagttttcggggtatattgcaggtgtcggctttttgtggttccggtgcccggcaggtccggaaaatcagggaccggcgggtttttccgggatatgataacgaatcgggttgcaccctttccttcgcaggcacgaaaaaacggagaccccatcgggtctccgtcgtgcggggagagcggatgattctccgccggatgctattcctcgataaaatcgatgttcacctgccgctggaacgcttcctgcagcgagatctgggtctcggtcgaggagacgccctgaatgcgcaggatgccgtcgaaaatcgtgcgcatgaggtgctcgttgtctacgcagtagagcttcacgaggatattgcccgaaccggtgatgaagtgcgcttccacgatttcgggaatctccttgagctgttccacggtttgcttgagcagctgcgggtccttgagcgtgatgctgatgtgggcgcagacgtcgaagcccatcattttgggatcgacgatcagccggctgcccagaatcacgcccgaatcgtcgagcttgcggatgcgctgatggatcgcggcacctgagatgccgcattcgcgggcgatctcaagaaagggcatgcgggcgttcttgatcaggtatttgaggattttgcggtcaatcgcgtctaaggatgttttcggcataggcttgagggttttatttgatgacattcaattctttgccgaccttgatgaaggcggcgatgcagcggtcgagctgttcggtcgtgtggcctgcggagacctgcacgcggatgcgggcctgacccttcggcacgaccggatagtagaagcccgtcacgaaaaccccttcgtcctgcagccgggcggcgaagtcctgcgacagcttggcgtcgtagagcatcacggcgcagatggccgactgcgtgggtttgatgtcgaaacctgcggccatcatgccttcgcggaagtgctccacgttggccaccagacggtcgtgcagttcgttgctttcgcccagcatgcggaacatctcgattccggcgccgacgacggcggggggcagcgagttggagaagaggtaggggcgcgaacgctggcggagcatctcgataatctccctgcggcccgtcgtgaagccgcctacggcgccgccgaaggctttgccgagcgtgccggtgaggatgtccacctgaccgcgcaggtcgtagagttcggtgatgccgcggccggttttgcccagcacgcccgccgagtggcactcgtccaccatcaccagcgcgtcgtatttctcggccagtgcgcagatcttgtccagcggtgcggcattgccgtccatcgagaagaccccgtcggtgcagatgatgcggaaacgctgcgcctgtgcttgcttgagacactcctccagttcggccatgtcggcgttggcgtagcggtagcgcacggccttgcacaaacgcacgccgtcgatgatcgacgcatggttcagcgagtcggagataatggcgtcctcctgaccgaaaattggttcgaagacgcctccgttggcgtcgaagcaggcggcgtagaggatcgtgtcctcggtgccgaagtagtcggctatggctttttcgagctgtttgtggatgtcctgacagccgcagatgaaacgcaccgacgacatgccgtagccgcggttgtccatggcccgtttcgcggcttcgatcagccgcgggttgtccgaaagtccgaggtagttgttggcgcagaaattaagtaccttacgacctgcaacttcgatctccgcacgctgcggcgattcgatgacccgttcgctcttgtatagccctgcagccttgatttcggcaagttcctgctgcagatgttctttgatttttccgtacatatccgtttatggtttgatgaatttccggtgcgggaggtgtcaatctgttagcaaatatacgattaatttctgaaaacagacattcttccgcgctctttttcacgattggggttacgaattgttagtccgcctcgtcttgcggcctccgccgggcctgcacagcccctcggttcgctccctccgtgcggcggggcggagattttttatgcggcgggtcacccgtttccccaatcggggtgtctatatgaacgaagggggaatcaaacgatgggacgatggtgaaaaaacagccgcccggcttgtccggataagagcaatgcagtatatttgtacataaccatactccattgtaagggtgaacgaagattttcatatttccgggaccgccgcggacgagtgcgaactcttcgagcggatccgaggcggcgacgagcaggctttcacgctggtttacgagcgttaccacggcatgctctattcgctggcgctgcggatgatcaagcagaccggggcggccgaagacgccgtgcagtacgtcttcgtcaggctttgggagctgcgcggcggattgtccgtgacggtcagcctgcgcaattacctctatacgatgaccaaaaactacctcctgaactatatccgccacaacggccgggtgctggagcagagctacgtcatcgcccagctccgccagcagcaggacgacacgctggcccagtatatcgaaagccgcgatatcgaccggcgtctgggcgaggccatcgaccgtctgccccgccagcagcgggccgtgataatgatgaagcgcgacggctgttcgaaccgggagatcgccgaaaaactgcatgtttcgataaacaccgtgaagacccattacgccgacggactccggtcgctccggctttcgatcggcccgataataaagatgataaccctgcttgtaatgattcgcagcctatgaaacgacctgacagagatacgatccgcagagtcctcgacgaacgggctacgccgcaggaggcgcgcgaggtggcccgctggttctcctcggccgaaggcgccgccgaattgtcgcggcttatcgacgaggaggcccgcatgctcgaaaccggagagcggatgcctgcttcggggattccctccgaggcgatttaccgccgtatccgtgcggcgctggtccggcgccgccgccggcgcattgcgctgcgtgtcgctgcggtgctgattccctgcctgctggtgctcggcgtcggcatccgtctcgaccggcaggtcggcggcattttttcggcgccggagtatgccgaaatctacgttccgaagggcgagcggatgcagatggtctttcaggacggcacgcgcgtctggctgaatgccgacacgcggctgcggtatcccgaaaaattcggtttttcgatgcggcgggtcgagctggacggcgaagcctatttcagcgtcagccacaatccggcgcggccctttgtcgtcggactcggcggcgcgcagatcgaagtgctcggaacggagttcaacgtgcaggcctacgacgacagcccgctgatcgccgtatcgctcgatgcgggcagcgtgtcgatgtccgacggccggaattcgttcctgctggcgccctccgaccgtctgctttacgaccggacgacccgtcagggccgtctggaccatgtcgatacgtcgggagcttcgctgtggcgcaagtcgatcatctcctttagggacacgccgctcgaagaggtgctgcgcacgctcggccgctggtacgacgtgacgttcagggtgaccgatccgcgggcgtacgactattattttacgctgacgacccacgattcgtcgcttcgggagattctttcagagctgcagcgcattgctcccatgcgctttacacgggagggcgatacgatcgttatcggcatgtagacgatttttttcacctccggactcattcttttcgcccgttcgcgtgtcaattattcagaggacacgggaacgggttttccgattcctcccgaaaaactattaacaacaaccttaaactaccattcatgaaacattttagactactgtttctgacagtcgttctgtcggcggtctgcgcgacggcttcggcccagcgcgtgacgctcgacatgcagaacgccaagttggagaaagtgctcggacagatcacgcagcagaccggtctggtgttcaattacacccggccgacgatcaatcccgacaagcgggtttcggtcagcgtgaaacaggccgaactggagagcgtgctccgtcagctgttcgatgcggacggcatcgtgtacgagatcaaggacggaaaggtctatctggccgaccggaagggcggcgtcaacccccccccggccttatcggcggccagacagcggtatgccggacgcatcgtcgatgctgcggggaatccggtggtcggcgcgagcgtcgtcatacggggatcgactacgggcgtcagttccgatatcgacggccgttttgccatcgaggcccgcgaaggagaggtgctgagcgtgtcgttcgtcggctatacgccccagaccatcacgctcggagccaagacgatgctgaccctgacgctccgcgaggacacatccgagctggaagaggtcgtggtcgtcggctacggcacccagcgccgttcgctggtgaccagcgccatcagcaaggtgcagatgaacgagtcgaacatgcggcaggtcgccagcccgacgcagctgctcagcggccgtgtggccggcgtgacgacttcgaccggttcgggtaacttgggcagcggcgagcggatggtgatccgcggatcgtcgtcgctgagcgcgggcaacgaacccctctatgtgatcgacggcattccgatcaccaacacgaacgccaatctggtcgatttcggcgaggacatgtcttcgctggcgacgctcaacatcagcgacatcgagtcgatcgaggtgctgaaagacgccgcttcggcggccatttacggttcgcgcgccaacaacggcgtgatcgtcatcaccaccaagtcgggcaaggagggcaaatcggaggtgcatctcaacttcaacaccggagtcacccgcttcgccaacgtggggaagatcaaaatggccgattcggggctttatgtccgcgatttcaacgaaggcgtcgacaactacaaccgccagtacggctacaaaccgggggattcgggtttcaagaagcatattcagaatccgttcggcacgctgcccgacacggactggatggatctgattctccagaccggaacgttctataacggcgacgtgtcgttttcgggcggcaacgtcaagaccagatattatgtcggcgccaattacaaccaccagacgggcgtgatccgcaccaacaagatggagaagatgaacttcaaggtgaagatcagccatgaattcacgccgtggctcgaagtcggcgccaacgtttcgggcaactatatcaagaaccaccagattccgggagccaactccggcacgaccatcatcgggcgcagcatccagcagcggcccttcgaccgtccctacaaacccaacggcgactattacgtgggcggcaccgacgagctggtgtttcacaacccgatgcagattctcgacgaggagacggcctatatcgagaacatgcgttatctggggaatttttacgctacgttcaagtacaaggacaagttcgccttcaaatcttcggtcaataccgacatcacgcagatttacgactacacctactacaacgaaaaccacccttacggcaagggcgtgggccgtatcgtcgattacaaccggacgatcaagaatatcctcgtggagaatttcgcgacttacaacgacaagttcggcgacttctcgctcagcgccatgctgggtcattcgttccagaaggtgaccacccggtcggccaaactcgacggcagcggatttccctcgccttcgttcgacgtggtgggcgtggcctcttcgctcgacgcctattcgggatcgctctccaattacgccatggagtcctatttcggccgtgcgacgttttcctacaaggaccgttatgtgctgacggccacgctgcgcaccgacggttcgtcgaaattcgcgcgcgacaaccgctggggctggttcccgtcggtgtcgctgggctggaacatctccaaggagaatttcatgaaggacagcgatacggagcttaagttccgcgtcagctacggcaagaccggcaatcaggagggtatcggctcctacgcctatcaggcgctcatgtcgggcggctacaactacggcaacggcagcggcatcgccgtttcgaccttcggcaaccgcgacctgacgtgggagaaggccgaccagttcgacgccggattcgacatcacgctgttcaaggggcgcgtgaacatcatggcggacgcctattacaagaagaccaaggacctgctctacagcacgccgatccacagtacgacgggtgtgacgagcatcatcagcaacatcgggtcgatgcgcaacatcggcgccgagctgacgatcaacacccatttcaatttcggtcccctgtcatggctgtcgcagttcaacatcgccaccaaccgcaacaagctcaccgaactgctgggcgacgacaagccgatctcgatcggcgccaaccgtgcgctgcaggtcggcaaggaggtcggcgcgttctacctcttcatcatggacggcatctaccaatacgacggcgaagtgcccgccgagcagtatgcgcagggaatccgtgccggcgacgtgaagtggcgcgacgtggacgacaacaacctgatcaacgacaacgaccgtcaggtgatcggctcctcgaatccctacttttcgggcggctggaacaacaccttccgttacaagggtgtttcgctcgacgtcttctttacctacatgtacggcaacgacgtctatgcggcgtggaagatcaacacctccaaactgggacacaagaacggcgtgctggccgaggaggcccgcaaccgctggacgggacccggttcgaccgatctccatccgcgctcggtgagcggcgacacgaacaacacccgcaactccgaccgctggctcgaagacggttcgttcctgcggctgcgttcgctgacgctttcctacaccttccccgaaaagatcagccgcaggctggccatgaagtcgctgcgcgtctattttcagggagacaacctctggctggcgacccgctattcgggctgggaccctgaggtgagcaacaacctcgatccgcgctttatgggcgtcgacaacttctccgtaccccagccgcgcatgttctgcttcggccttaatgtgacattctaaaaagctgacaaccatgaaatatataaccgtattactgttctgcgccctcggcttcgcaagctcctgctcgaatatgctcgaccagtattcgcattcggccattccgcctgaggccgtaaccgaaaaggatctgccggcgctgcgtctgggcatgtataaccgtgtgcagaacgagccgcagacccgctcgttcatcatgtgcgacattttgggcggcgacatcacccaatccaactacaatccgatcgacgtcatcaattcgacgctcagcccgctgaattcggcgatcgtcaacggctggaacggctattacagcgcgctctatcaggtcaacaacctgctggccgtgacggcgaagttccccgattcggaaatcagcgtccgcgccagaggcgaagcgcactatttccgggcctatatctatttctgcctcgtgtcgcgctggggcggcgtgccgctgctgcgcgaaaacacgctcgacaagctgccccgcagcccggccgccgatgtctgggcgctgatcgaggaggacctcgacacggcggcttcgctgctcgacaccagcgaaagctactactacgtgtcgcgcaacgccgcgctggcgctcaaggcccgcgtgatgctttcgcagggcaagatgaccgaggcggcgcgtctggccgaggatctcattacgtcggggccttacaagctcgattcgttcgacaagattttccggaagaaggccaacaccgaaattattttcgccttcgagaatatctccgaagagtcgtcgatcaatatcagcgacctgttctacacctacggccatcccaacaaggggcagggcgtataccggctgcccgcctctaccgtggagctgttcggcgccaacgatacgcgcaaggagatgagcgtcatcaatatcgccggtacggactgcctgaacaagtaccccagcggccagaccggcaaggaccccgtgatcgtgtcgcgcatcgccgagctttatctgatcagcgccgaagcgcagggccgcgccaagggcgtcggacgcctgaacgaactgcgccgcgaacgcggactcgacgacatttatccggcctccgacgccgcctatgtcgacgccgtcctcgacgaacgccgccgcgaactgctgggcgagaacttcatctatcacgatatggtgcgtacgggcagggccgtcgagcgtctcggaattcagaaattccagctgctgctgcccatccccggcaaggaactgcagctgaatccgctgctggaacccaatcccggctattaaatcctaaaatgaccgaaccatgaaaaacaactgttatatcaaactgcttttttccgggcttttcgtgctggcgggcttcgcgttctgcggctgcaacgacgatcccgaatatacccgatacgaagccgttccccgaagcgagatcggccgcaaactggtcgaagggacgaatctgatcgcccacatctcggtcgattcgacctatgtgctggccaacggcgcctccgtgacggaactgcgctacctgtcggcgtcgggactcgccatggcggcgttctttttcgaaatagacctcacttcgcccgacattgcgctcgaagtctgcacccctcagaacaagccgatcggtgtcggtttcgaaccggtgacgcagcaggcgatgcacgtcgacgccgagggacaccgggtgctgggcggtacgaacgccgatttcggcagcgagacgcaaaaaggcccgcagggaatcttctggaaggacggcgtcgcgcaaaagaccgtgttcaacacgacgcctgcgcggccgcgcagcttcttcgcgattcggaccgataaaagggccgttgccgcggccgcggccgattacgacgaaatcgccgcgtcgaaggtcatctacgaagccgtgggcggcggtccggtgctggtcgacgacggggtggttcccatcccgcccgatcccaacgacctgtcggtcgagccgcgtacctgcatcggggtctccgaggacgggacgaaggtctggatcatggtcgtggacggccgcaacttctactactcgaacggcatgtcgttcgtcgagctggggcagttcatgaaagccgtcggttcgtacgacgccatcaatctcgacggcggaggttcctcgaccttcttcgtgcgcagcgcgcccggcttctcggccgacgaccgtttcgaaatccgcaactggccgaccgacggcggaggcgtcgagcgcgccgtgtgcaacggactgctgatcgtttccaacaaataaccgatttaacacatgcaatcaattatgaagaagatcagaaaatacggaataatcctgtttgcggggctttgcgcgtgtgcggcgtggtcctgcgaggaggacaagaccgaccggaaattcacgccgaaggatcccgtcatcaagctgggcggcgatgtcgaggtcggaaaggcgggcggaagctataccgtccccatcgagtcgaacctgccgtggcgggtcaggtccgaagcggactggattctgctcggcgaggtggagaacggcatgggagacggcgaattcacctttaccgtaagcccgaacaagacgcttttcgagcgcgaagggcgggttacggcgtggatcaccgacgaatatgcgcagtcgatccgtgtcgtgcaggcgcccagctcccccgaagacctcgaagtgcactggtacgtcaagaccgacggcagtgccgacaacgacggcatgacgtgggagacggcgaccacgctgcacaatgcgctgtcgaagagcatcaacggcaacttcatccacgtggcggccggcacctacgtccctgagcagagtctggcgggaagcaagggcgcggcggaggacgccacgttcgagatctcggccaacgtctcgctgatcggcggttatccggccgatgccgtgacgggcgccgtcgccgatccggacgccaatccgaccgttctgagcggccgtctctccggcggcagacatgcctaccatgtggtctgcgtcacggcggccaaggccgacggccggcgggtgctgatgaaggggctgaccattaccgagggcctttgttcggggacggcttcgtattatacgctcaacggggcgcgtttctacatctcgcgcggcggaggcgtcacggtcggcaatgcggcggtcgatatcgcggactgcaagatcacgcagaacaaatccgccaaggactgcgccggcatctgcatcgtggccggggccgacgtgtcgctgacggacaccgaaatctcggaaaacgaatgcagcaacggcaacggcgccggcctgcacaacgaagcttcggtcgtccgtatggaccgctgcaccgtgcggggcaactccgcgtcgggtgtctgcggcggcgtttatactttcagcagcagcgccccgtcctatacgtacatctacaacagtacgctttgcgacaaccgtacggatgggagcaagaactcccgccgcggaggggccgtttacagccgcgagtattcggagaccgtgctggtgaactgcaccgtgcacggcaatacgggcggcaacggcggcggcatcgccctgtacggggcttcgggcaaggagtccaagatgacgctcgtaagctgtacggtgaccggaaatacgtcgctgttcgtaggcggcggcgtggaattcacgccctatacgacgatgaacgtctacaatacggtcgtttcgggcaataccgcagccaacggcggcgacgatctggtgggaaccaataccgctttggcggttacggccaacctgcctgcggtgctctcgtacgccgtgaacggaagcgtggtgtacggggccggcaaggccgtggtggcgggcagcagtttcgatccggcgacgatgctcggcccgctggccggcaacggaggcccgacgcagacctgcctgttgctggggacggacaatcccgcccggacgctgggcatgccctatgtcgatttgtcggcgcttgggcaggatttcgatccgcagatcggccccgaaatcacgggcttcgaccagacggggctttcgcgcgagggaacctcggcgatgggagcctgcgtgaagtaacgagacggacggagggcggtcggatttctgtaggccgctcctccgcccgatattcggcggcgctcttttgcggagcgccttccgcccggtcgccggggtgcggactcccttttgcgggcggaccgttccccggcgattttcgggtccggatttgcttatttcttcgtatcctttcccattttcttgttttttcgtacctttactaccgtttttgcccggcaggccgattccaatgatgcgagacaccttcgccgtcgttcgccgtccggtgcaacgcccgtaaaaccgcaatgaattatgatgaaaaaaagtgcaattctgctgctcctgctcttcgccgcgctggcggccggggcgcagcccttctaccgcaaacccgtcgccccggtgcgcaacgtcatcgtgatgattcccgacgggacctccacgagcgtcctcgccgcggcgcgctggtataaattctacaacgacccttcgcagcggacgctcaacctcgattcctgcctttgcgggctggtcgggagcttctcgtccgattcgccgatcccctgctcggccccggccatgtcggcctacatgacgggcatgccccagcaggcgggcaacgtttcggtctatccggcggccaatcccgcgcaggatatcgtcgaggtcgaatccggacgggcctgtcagccgctggcgacgctgctcgaagcggccaagcacgaccggggaaaggctgcgggactcgtcgtgacggtcgatttctgccatgcgacgcccgccgcctgcgcttcgcaccactactcccgccacgcctatcccgcgctggcggcccagatggcgggcaacgacttggacgtgatgttcggcggcggccggaagcaggtctcggacgccatgcgggcgtatctgcgcggcagcggcgcgacgcttatcgagcaggatgccgcggcgttccgcgcttacgacggcaaaggtcccgtgtggtcgctcttcgcgcaggggaacatgagttacgacctcgaccggaacgatgccgaacagccgtcgctggccgagatgacggccaaggcgctggaggtgctggacagacatgaaaacggctttttcctgatggtcgagggcagccgcgtcgatatggcggcgcacgccaaggaccccgtgggggtgattaccgagatgctggccttcgacaaggccgtgggcgtggcgctcgatttcgcccgccgcgacgggcggacggccgttgtcatcatgcccgaccacggcacttcggggctgagtttcggcgacggggcctataaggattacgcctccaagggactcgattcggcctatatgaatatctcgaaggtgcgccgcacggcttcggggctggaaaaaatactgctcaaggcgcggccggaacagatccggcccctgttccgcgaatacaccggcatcgagcttacggacgatgaattggccctgctccggagttcgcgcaactataccgaggccgactacatgaaggtcgccaacagcgtgaacatggtgtcgagcattgcccgcatcgtgacctcccgcacccatttcgggtttctcagcggcagccataccgccgaagacgtctttctggcggcttaccacccggagggcgacctgcccgtggggcgcaataccaatacggagattcatgcctacatagccgacctgctcggtttggagcgtccgttggctgaattgaccggcgaactgttcgcaccgcataccgaggtgttccgcggcgcgaagtgctcgatttcggcggccgaagggcagatgccctgcctgacggtccgcaaggggcgccgtacgctgcgcgtaccggcctacggttcggtcgcctacctcgacggcaagcccctgaaactgcgctcggcagtggtctatatcgaccgcaacgacacgttctacctgccgcgcgagttgggcgaaaaattctgacccggcaaactcttccggcggtcggcgcgcattggggcggtgtccggcacacatttgggcggtgtccggcacacatttgggcggcgtccggcaaactcttccggcggctttcgggaccccttccggatttatacggcccgctccggacttcggcgagaagtcccggagcgggttttttcgggccggaggttcaggatttcgggcggttttgagggataaccgctttttcttgttatatttgtgactcaaataaaaacctcaacttatgaaaaaatcgtgtgttttggtcagcggcggcgccggttatatcggttcgcataccgccgtggaactgataggcgccggttacgacgtggtgatcgtcgataatctctcgaacagcgacatggacgccgtcgagggagtccgcaggatcacgggcgtcgaagtgccgttcgaaaaggcggactgctgcgaccgcgacgctttccgcaaagtgttcgaaaagtacgacttcgattcggtgatccatttcgcggcgtcgaaggccgtgggcgagtcggtcggcaagccgctggaatactaccgcaacaaccttacgtcgtttatgaacgtcatcgacctcatgcgtgagttcggacgtcacaacatcgtcttctcgtcgtcgtgtacggtttacggcgaggccgacaagctgcccgtgacggagcagacgccccgcaagcccgcgacctcgccctacggcaacaccaagcagatgtgcgaggacatcctgcgcgattcgctggcggcctacgacggcatgaagggcatcgccctgcgctatttcaaccctatcggcgcgcatccttcggccctgatcggcgaactgccgcgcggcgtgccgcagaatctggtcccctacatcacgcagacggccgccggactccgcgaatgcctttcggtcttcggcgacgactatccgacgcccgacggctcgaacatccgcgactatatcgacgtggtggacctcgccaaagcccatgtgacggcgattgcgcgcatgatcgagggcaagaacagggagaagtacgaaatcttcaacatcggcacgggacgcggcgtttcggtgctcgaactggtgcgtaagttcgaagaggtgaacaacctgaaactcaactacaagatcgtgggccgccgtgcgggcgacatcgtggcgatctgggccgatccgtcgtatgccaacgacgaactgggctggaaggccgaacgttcgctcgaccagacgctggctgcggcatggaagtgggagaagcatatccgcggcatcgaataaccgcctccggcatgccggaccgcggcgctgcgtttcggcggcgaaagctgccggggagtgcttcgcaagcgtgctttcggataaatttagggaggccccggattccggggcctccctctgcttaaaacatgctgaagttttcggaaggttcggtcggtgaagtgttttaagcgtatgcggtgctaaccgtgtgtcaggtcggtgttgtggacgcccagcacggcgcggcccgacggatcgttcctgtcgcggaaggccgcgtcccaagccagcgcctcggcggtgctgcacgctacggagggcaccgagggaacgcactgggccgcggtctgcgacgggaagtgctcttcgaagatcgtgcggtaatagtactcctccttgttgcggggcggattgatcgggaaccgctcggcggcgtgttccatttcgcggtcggagaccgcttcggaggtgattcgtttcagggtgtcgatccagccgtagcccacgccgtcggagaactgctccttctgccgccagacgatctcttcgggaagcagctcctcgaaagccttgcgcagaatccacttttcgatacgcccgttcttagccattttcgcttcgggatcgatgcgcatggccacgtccagaaactccttgtcgaggaacggcacgcgtccctcgacgccccatgcggagagcgatttgttggcccgcaggcagtcgtagaggtggagcttgccgaccttgcgcacggtctcctcgtggaatgcgcgggcgttcggggccttgtggaaatagagatagccgccgaagacttcgtcggcgccctcgcccgaaagcaccatcttgatgcccatggatttgatgacgcgcgccagcaggtacatcggcgtagacgcccgcacggtggtcacgtcgtacgtctcgatgaagtagatcacgtcgcgcaaggcgtccagaccctcctgaatggtatagtggatttcgtggtgcacggtgccgatccggtcggccaccttgcgggccgccgcgaggtcgggggagccttcgagtccgatggcgaaggagtgtagccggggccaccacgcccggtcgcggtcgtgcgactcgacgcgccggtcggcgaatttccgcgccacggccgagatgatcgacgagtcgagacctcccgacagcagtacgccgtagggcacgtcggacatcagctgccgcttgacggccgcttcgagggcggcgcgcagggccggaatgtcggcgccggtctctttcacggcgtcgtattcgaaccagtcgcggtcgtaccagcggaccattttcccctctttgctcgaccagtagtggcccggcaggaagggttggatcgtggtgcagaccccttcgagggctttcagctccgaggccacgtagaactgctcgtcgcggtcccagccgatgtagagcgggatgacgccgatcggatcgcgggcgatcaggtattcgtcgttttcgatgtcgtacagcgcgaaagcgaagatgccgctgatcttttcgagcagtccgacgcccattttccggtaaaggggcaggatcacctcgcagtccgagcctgtccggaaatcgtactccccggccagctcgtcgcggatttcccgatggttgtatatctcgccgttgacggccagcaccagtttcccgtcgcggctgaagaggggctgtccgcccgactggggatcgacgatcgaaagccgctcgtgggagagaatcgcccgctcgccgcagtagacgcccgaccagtcgggtcccctgtggcggatgtttttcgacattttcagcacctgcgtgcgcagcgcatccgatttctgccggatgtcaaacagtcctacgaatccacacattttctgttcgtttgttgtcatggaaccctcccttggaataggcggttccggggtttgtcaataggataagccgggcgtgcggcgtgcgccgccggcgggcaggccgatgccggggacgtactttgtgcagcacctccccggcgtcgcccgcattgcgtcagttgttttcggggcgcagcttgcgcaccacggcgccggtctgccacatctcgctctcgcgcatctgacgcagctcttcgtcgagcttctcgcggtagtcgggcttgctgttgaggtcgatcgaacgctgggcctcgttgccggcggcgacttcgcggtaaagctcctcgaagacgggtttcgtggcgtcgcggaaacgtttccaccaatccagcgcgccgcgctgggccgtggtcgagcagttggcgtacatccagtccatgccgttctcggcgaccagcggcatgagcgactgcgtcagctcctcgaccgtctcgttgaaggcttccgagggggtgtggccgttggcgcggagcgtctcgtactgggcggcgaagatgccctgaatggcgcccatcagcgtgccgcgctcgcccgtcaggtcggagtagacctcgcgtttgaagtcggtttcgaacaggtagcccgaacctacgccgatgcccagcgccaccacgcgctcgaaggcgcggcccgtggcgtcttggaagaccgcatagctcgaattgagtccccggccctgcaggaacatgcgccgcagcgaggtgcccgaacctttgggggcgatcaggatcacgtccacgccggccgggggcacgatacccgtgcgctccttgtaggtgatgccgaagccgtgcgagaagtagagcgccttgcccggcgtgaggtgtttttcgatggtgggccatacggcgatctgacccgcgtcggacagcaggtactggatgatcgtcgcgcgctcggcggcctcttcgatgccgaagagcgtcttgcccggttcccatccgtcggcgacggccctgtcccagctcttgctgccctcgcgctggccgacgatgacgttcaggccgttgtccctgaggttgagcgactgccccggaccctgcacgccgtagccgatgacggcgatggtttcgtttttcaggacttcgcgggctttctccaaggggaactcctcgcgcgtaacaacattttcttcgactccgccgaaattgatctttgccataattagtatgatttaaaagtgatttgaattcgtctgccgtcggctgcgttccagctcttcgaggtactcgttgagcagttcgcgccgcgatttgatgatggctacgatgccgctgcgcacgaactgctgcacgccgtagggctgcagcaggcggaacagctccttggtctcggccttgtggcccgtcttctcgaccacgatgtagtcgtcgtcgatttcgaggatgcggacgttgtgctggcgcacgaggcgctcgacgctgcggctgcgcgtcaccttgtagagggcgatctcctgctgcaccacttcgtcggaggtgtagacgaaggtcttcagcacgtcgatcttcttttcgatctgccgcaccagcttgtcgacccgttccggcccggtgcggacgacgatcgtgaatttatggatgcccgccagcgccgactcggaggtcgtgaggctctcgatattgacgtcgcggctggtgaaaaccgtggtgatctggttcagcagacccaccttgttttccgaaaatacggtgatgatatattcctgttcttccattgctcgttcggattttactccagccggatcgctgcgacgggcgcgccggccggcaccatgggaaatacgttgtcttcgctttcgacgcgcacttcgagcaggtatgcgccccggcaggcctgcatctcggcgatcgcctcggcgagttccccgcgccgctcgacgcagcggtaggcgatgccgttgccgcgggcgatcagcccgaaatcggggtttgccagctcggtgaacgaatagcggcggtcgtagaaaagctcctgccactggcggaccatgcccagaaacgagttgttcagcaggacgatcttcacggccacctgcgactggaagatcgtgcccagctcctgaatggtcatctgcaggccgccgtcgcccgcgaaaagacacacttcgcggtcgggggcgcccagcttggccccgatggccgcgggaagcccgaagcccatcgttcccagcccgcccgaagtcaccatgctccggctgcggcggaacccgaaatagcgggccgcgaacatctgctgctgacccacgtcggtcaccagcaccgcgtcgttgtcgtaggcgcgggctacggcggcgaccgcttcgcccatgcggatacggccttcggcgggatggaccgcccggcggatcaccttttcgtattcgatcttgtcgcaggcgcggaattcgtcgatccacgcccggtggttgcgggcctgtatgcgccgggtgagcagcggaagggtctgtttcgcgtcgccgaccagcgcaacgtcggccgggacgatcttgccgatctccgcagggtcgatttcgaggtggatgatcttggcgttcgccccgaaacagcccggattgcccgtcacgcggtcgtcgaagcgcatgcccacggcgaggagcaggtcgcagtcccggtttttgatgttgggaccgtagttgccgtgcatgcccagcataccgacgtactgcggcgagtcggtcggcagggccgaaagccccagcagggtcgatgcggcgggcatgccgctcttattgaggaaggcgcgcagctccgcttcgccgccgctcaggatcacgccctgtccgatcatcgccagaggccgttgtgcggcatcgatcagccttgccgcttcgtcgatgcgctcttcggaggggaccgatgcggggacatagctgcggatcgaagccactttctcgtagctgaacggggccgttccgcactgggcgtccttggtgatgtccacgaccacggggccggggcggcccgaacgggcgatgtagaacgccttggcgatggcgcccggaatctcttcggtgcgcttgacctgacagttccatttggtgacggcctgcgtgatgcccacgaaattggtctcctgaaaggcgtcggtgcccagcagcgacgaaccgacctgcccggtcacgagcaccagcggcgtggagtccatcagcgcgtcggcgagtcccgtcacggtattggtggcgccgggtccggaggtgaccagacagacccccacgcggccgctgacgcgggcgtagccctgcgcggcgtgtacggcgccctgttcgtgccgcacgaggatgtggcgcaggcggtcgcggtagtcgtagagtgcgtcgtagacggggatgatcgccccgccggggtagccgaaaatcgtatcgacgccctcgcgcaggaacgattcgatcagggcctgcgctcccgtgacggagggaccgggctgcggttcggacatgtttgtttgcgtcgtatccatgattgctgctgttttacttattcttcatcgacgatgcgtacggcgcccttgtcggccgagctgaccagcttggcgtaggcgcgcagcgacgcggggactttgcggtcgcgcgcggcggggcggaaatgctcctgagcggccattcgcgcggctatttcggcgtcgtctgccagaaggcgtatcgagcgacgcgggatgtcgatctcgatctcatcgcccgtccggacgacggcgatttcgcccccggacgcggcttcgggcgagacgtggccgatcgacagccccgacgtgccgcccgaaaagcggccgtcggtaatcagcgcgcaggctttgtcgaggtgcttggatttgaggtacgacgtggggtagagcatctcctgcatgccgggacctcccttgggtccttcgtagcggatgacgaccgcctcgcccgcctgcacttcgtcgccgagaatgccctcgatagcttgttcctgcgattcgtagacccgtgcgcggccgcggaaaacgtgcagcgactcatcgacgcccgccgtcttgacgatgcagccgctgcgggcgatgttgcccgtcagtacggccagtcccccgtcgcgggagtaggcgtgttcgacgtcgcggatacagcccgtcgtgcggtctgcgtcgggggcgtcgtaataggagtgctgcgcccccagttcgcggctgtaaagccccgcaggggcgctcagccagcggcgcagggccgcgtcggtcagcgtctcgctgcgcaggtcgcaggcgtcgatcgcttcgcggagcgtccgcccgtcgatgcgcgggaccgaggtgtcgagcaggccggcgcgcgccagttcgcccagaatggagaggatgccgccggcgcggttgacgtcctgtatgtgatactgcgagttgggagccaccttgcagagtaccggaacccggcgcgaaaggcggtcgatgtcctgcatcgtgaaatccacgccggcttcgcgggccacggccagcaggtggagcaccgtgttggtcgagccgcccatggcgatgtcgagcgacatggcgttctcgaaggaggctttggtcgcgaccgaacgcgggagcaccgattcgtcgcccagaaaataatagcgttcggcgttgcggacgatcagcgccgcggcgtcttcgaacagccggcgtcggttggcgtgcgtggcgacgatcgtgccgttgcccggcagcgagagtcccagcgcttcggtcaggcagttcatcgaattggccgtgaacatgcccgaacacgagccgcagccggggcaggcgcagcgttcgacgcgcgcgatctgctcgtcgctgcaggcttcgtcggccgccatgaccatcgcgtcgatcaggtcgatgtccctcccgtcgaatttgcccgcctccatcggccctcccgacacgaagaccgtcgggatgttgagccgcatggcggccatcagcattccgggggtgattttgtcgcagttcgagatgcagaccagcgcatcgaccttgtgggcgttggccatgtattcgacgctgtcggcgatgatctcgcgcgagggcagcgagtagagcatgccgtcgtggcccatggcgatgccgtcgtctacggcgatggtgttgaattccgcggcgaaacatccgcaggcttcgatgcgctgtttgacatactgcccgatttcgtgcaggtggacgtgtcccggcaccagctgggtgaacgaattggcgatgccgacgaccggccggccgaactgttcttcgcgcatgccgttggcgcgccagagacttctggcgccggccatgcggcggcccgtcgtcgtgacggtgcttctgagtgtgtgtttcatcttctctcttttttcggcgtatccgcttcaggcggacggcccggacagcaaaaaagcccttctccgtcggagaaaggcttttctataatctttcgagtatacgcatcacctttctcccgttatcctgtagtgacgacgagcagcagattaatgacgttattgttcgaatgattcagagcggtcatggccggatttctgtatttgttccgtttcaaagatagggatataaaatcagacgtacaaataaattcctaaagaaatttaataatgtgatattccggaagcagatcgcgctctcaggtttttattttcaggtcttgcatgctgtttgcttacaatttgaaaccgctatttttggctttaaaaccggttttaggccgatttgcaagagttccatgctccggaagctctgaaatgtcttactgtttttatattattataggtgtgtccggcctttttgtgctatttgttccgagtgaaaacccttcctgattattcggcgggcatcttacgaatcgttacctgatttggatattaaatttttttgttttatatttgtccctgatggatatgaaacggaatcatacgatgttcggagagtgcgggaacacctgcgctccgacgacgtatgccgtcctctccgttatcttcacgactgccgctactacaacccctgtgggggtttagtttgttttttccgtcagaagcatctccgtatgcacacccggccgaggctgccggggcggaaccccggattttaagtcaaaggcagtttaattcaaagaagattttaccatgaaacatatcaaggttttcgcccccggaacggtggcgaatctgggctgcggcttcgacatcatgggcctgacgctcgacggcgtgggcgaccggatcgaggtcgccgccgaagcgggtgcgagcgggcttgcgatccgcaacgagagcgggaagagactccccgaaaaacccgaagacaatgtcataaccccggccgtcgcggccctgctcgaagcgtacggaaagcccgtgcgggtcgaaatcacgattctcgaaaagatagcgcccggaagcggcatcggatcgagcgccgcctcgtcggccgcagccgtctacgggctgaacgaactgctgggccgccccttttcggcggaacggctggtggagttcgccatgatgggcgaagcgctgatcggcggcacgccccatgccgacaacgtcgggccggccctgctgggcggcgtggtgctgatccgcgggtacgggccgctggacatcatccgcctgccggtgcccgacgactttttctacgccgtggcgcatcccgacatcgtggtcggcactaaggaggcgcgcgaggtgctgccccgcgagattccgatggcgcatgccgtcacgcagtggggcaacgtcggcggacttgtcgccggactggcgctgggcgacgtggcgctgatcggccgctcgatgcacgacgtcgtcgcggagccttaccgcaagggattcattcccggttacgaccgtttgaaggaggaggtgctctccgaaggcgctctggccatgaacatcgccggatcgggaccttcggtctttgcgctggccgccgaagggtcggtgtcggaacgggtcgccgaacggatgaagagccatttcgccgggctgggaatcggctgcaacatctatgcgggccgcgtgtcgaaccgcggtgcgcgaatcgaagaataagaaaaaaggaaaaccatgaaatactacagtacgagagacaaagcacatgcacggccctgttcgctgcgcgaagccgtcgaggcggggctggcgcccgacgggggactgttcgtccccgaacgtattccgcaggctgatatggcggtcgcggagcggctggccggggagtcctatgccgcattggcggggtatctggccgcactgttcttcggcgaggatatcgacgccgggattctgcagcgggagatcggccgcatctacgattttcaggttcccctgcgtccggtcggcagccgctatacgctggagctgttccacggcccgacgttcgcgttcaaggacttcggcgccggattcatgggccgcatggtcggcctgctgggcggcgcggacgaaaagctggtgattctgacggcgacgtcgggcgacacgggcagtgccgtggcgcacggtttttacgacgtgccgggcgtcgaggtggtgctgctctatcccgaagggaagatcagccgcctgcaggagtgtcagatgaccgcgctcggaggcaatatccatccgctgcgcgtggccggaaccttcgacgactgccagcggctggtcaaggaactctttgcggacagctctttcagggccgcgcaccgcgtatcgtcggccaattcgatcaacctgctgcggtggattccgcaggcgttctattacttctacgggtatttccggtggcggcaggcgtcgggcggcgaaaatccggtggtcgtggtgccgagcggcaactacggcaacctctcggccggcatgctggctcgccgcatggggctgcccctcggcggattcgtcgcggcgtcgaacgccaacgacgtggtgcccgaatttctgcggacgggcgattaccgtccgcggccgtcggtgcggacgccggccaatgcgatggacgtcggagcgccgagcaacttcgagcggatgatgtggctgtgcggcggcgatgcggacgccctgcgcggcgaattgcaggggttccggtgcgacgacgccatgatccgccgtacgatcgacgggctgtaccgggattacggttatctatccgatccgcacagcgccgtgggctatgcggcttccgtggcctgcggcaggccggggttttacctttcgacggcccatccggccaagttcggcgaggtcatttcgcccgtgaccggggcgaaggtgccgctgcccccgcgccttgcggagctggtgaaacgtccgcgggtttcggagccgatggcggtggagcttggggcgctggaggagtacgttgccggagtgtgagattcgcggcggtccccgctggtgtttcggtgccgatgacggacgaatgacatgccggtgattgccgatgacggttctacggcggccggatagcgggcggggcgatggcggaatccgtccctttccggaactgcgcggcagggactggcgatgtccggttacggccgggccggtttggagccgagccgactcccggccccgaaacggcgggaagaatggaattgaaaaagggttgcaacgcggcggttgcagccctttttttgtgcgggatttccgggttgcgtgcggaattccctttttgtgtgcgtgactctccttttgcgtgcggggttcccggctaaatatgcgcggcgatgaaatccccgacctcggaggtcgaatagcgccgtttgccctgtgcggcgagatcttcggtgacgatcccttcggtgagcgcccggtttacggcgtcgcggacggcgctcccttcggcggtcagccccagatgttcgagcagcatggcggccgagaggatcgcagccatcgggttggcgatgtttttgcctgcggcctgcggataggagccgtggatcggctcgaaaagcgcgatttcggaccccacgctggccgacggaagcatgcccagcgacccgctgatgacgctggcttcgtcggtgaggatgtcgccgaacatgttttcggtgacgatcacgtcgaaatgggtcggctggcggatgatctgcatcgcggcgttgtccacgaacatgaagtccagctccacttcggggtattggggtgcgagctgctgggcgatctcgcgccagaagcgcgaggtttcgaggacgttggccttgtcgactaccgtcaggtgacggcggcggctcatggccagccggaacgccacgtgcagcacgcgctcgatctcctgccgcgagtaggtgcaggtgtccacggcccggtcgcccccttcgtcgcggccctgcggccgtccgaaatagatgccgcccgtcagttcgcggacgcagacgaagtcggtgccccgcaccacctcggccttgagcggcgagcggtcggccagcgtgtcgaagagcgcgatggggcgcaggttggcgaacagtcccagcgacttgcgcatgcgcagcagcccctgttcggggcgtaccggcgctttgggatcgttgtcgtatttggggtcgccgatggcgccgaacagcacggcgtcggcttcgcggcagattttgtgcgtctcctccgggtagggatcccccgtggcgtcgatggcgcaggcgcccaccagtgcttcgcggtaggtgaagttgtgcgcatacttccgggcgacgcagttcagcgccttgacggcttgcgcgatgatctcaggaccgatgccgtcgccggctaaaagggctatgttaacattcatggtcgttatagtttgtttcgattatgttcagcattttgatcgtcgctttgatggcggcttcggtctggtcggcatccagaccgcgcgttttgaataccttgccgcccatttcccacgtgatgatggtctgcacgaaggcgtcggtgcggccgccgggcgggatcgagacggtgtagttgcgcagcatcgggaactcgcgccggagctggtgctcgtagatttgccgcagcgcccgcatgaaggcgtcgtactggccgtcgccggccgaggtctgctcgtactcccgtccgttgatctcgatcttgagcgaagccgcgggatgcagcccctgcgccagcgaaaggctgtagttgaggatgcggaccggattttcggccagatcgtaacgcagtacgtcggcgatgatgtagggcaggtcctcggcggtcaccagctccttcttgtcgctcagctccacgacccgttcggtcaccttgcgcatcgaggcttcgtcgaggtcgatgcccagcgtttcgaggttcttcatgatgttggccttgcccgaagtcttgccgagggcgtattcgcggacgcggccgaaccgttcggggagcagttcgttgaagtagaggttgttcttgttgtcgccgtcggcgtggatgccggcgcactgcgtgaagacgctttcgccgacgatcgggcggttggcgggaatgcggatgccggtgtaggtctcgaccatgcggctgacgtggttgatcttcgtctcgtcgatgccggtggcgcggtgcaggcggtcgtgcaggacggcgaccgtactcgacagcggtgcgttcccggcccgctcgcccagcccgtttaccgtgacgtggaccccgtggaatccggctttcacggccgcggcggtattggcgacggccagatcgtagtcgttgtgggcgtggaagtcgaagcgcaggcggggatagcgccgcaccagatcgccgcagaaccgttcggtggcgtagggatcgagcacgcccagcgtgtcggggcacatgaaacgctgcacgggggcgtcggccagtgcatcgagcatggcgtagacgtactccggcgaatgctgcatgccgttggaccagtcttccagatagacgtttacccgcatgccccgcgcgacggcccggtcgatcacggcgcggatgtcgccgaggtgctcttcgggcgtgcggcggagctgttcgcggcagtgcttgagcgaccctttggtcagcaggttcacaacgcggcatccggcgtcgccgagccagtcgagggatatgccgccgtcgatgaaccccagcgcctcgatgcggtccgaatagcctttggaggcggcccactcggcgatgcgccgcacggcctcctgttcgccctgcgagacccgcgccgaagcgatctcgatgcggctgacgcgcagttcctccagcagcagccgggcgatggagagcttttcgcgggcgttgaacgaaacgcccgacgtctgctcgccgtcgcgcagcgtggtatccattatttcgaccgggggaagcatcgtcgcgggctattttcgggcctcttcgaaccgtcggatctggtcggagatgctgcacaggtaatccacgtcgtcgtagccgttctgcaggcagcgtttcttgtaggcgtcgatctcgaaccgctcgctgcggcccgtggcttcggcggtcagcgtctgccggtccagatcgaccgtgaaacgggccgcgggatcgtcgtctatggcggcgaagatcgccgcgaggaactcgttgcttaccgtgatcggcagcagaccgttgttgagggcgttgttgcggaagatgtcggcgaagaaactcgacaccacgacgcggaagccgtagtcggcgatggcccatgcggcgtgttcgcgcgaactgccgcacccgaagttgcggcctgcgaccagtatgcggcccccgtagcggctgtcgttgagcgggaacgaagcgaccttccggccctcggcgtcgtaacgccagtcgcggaagaggttgtcgccgaagcccttgcgctcggtggctttgagaaagcgcgccgggatgatctggtcggtatctatgttttccgtgcggacgggcaccgcccccgacgtgaaggtttcgaatttgggtatggacatttttcttggcttttacatttcaaacaccttgcgcgggtcttcgatgcgcccgcagacggcagcggcggcggccaccgcgatgcccgaaagcatcgttcgtgcgcccggcccctgacgcccttcgaaattgcggttcgaggtcgaaacgcagtatttgcccgccggaatcttgtcggcgttcatcgccagacaggccgaacagcccggctggcggagttcgaatcccgcgtcggccagaatccggtccagtccctcggcccttgcggcggcttcgacgcctttcgagccggggacgatccacgccgttatgttgtcggccttgcgacggccttcgaccagccgtgcgaagaggcgcaggtcctcgatgcggccgttggtgcagctgccgacgaagacgtaatcgacgggtttgccctgcagcgttccgccgggttcgaatcccatgtacttcaacgccttgggatcggcgtcggcgggaatcgccgcatcgacggccatgcccatgccggggttggtgccgtaggtgatcatcggggcgatgtcggcggcgtcgaagcggtattccttgtcgaaaaccgcgtcggcgtcgctgtaaagttcgcgccagcgggccgcggcccggtcgaaagcggcgccctgcggcgcgcgttcgcggccgcggaggtagtcgaacgtggtctggtcgggggcgatcatgccgccccgcgccccgcattcgatgctcatgttgcagacggtcatgcgcccctccatcgagagggagcggatcgcttcgccggcgaattcgatgaaatagcccgtgccgcccgaagcggtcagccgggagatgatgtagaggatgatgtccttggcttcgacgcccggccgaagcgtcccgtccacggtgatgcgcatgctccgcggcttggactggatgatgcactggctggcgaagaccatttcgacctccgacgtccctacgccgaacgccacggcgcccagcgccccgtgcgtcgaggtgtggctgtcgccgcagacgatggtcatgcccggctgggtgaagcccagttcgggaccgatgatgtgcacgatgccctgccgggggtcgcccacgccgaaatgctcgatgccgaaccgggcgcagttggccgccagcgcttcgacctgccgccgcgattccggctcggcgatcggcaggtgctggtcgacggtggggatgttgtggtcggccgtcgccgtgatctgcgccgggcgcgccacgccgatgccgcgtcgttcgagtccggcgaaagccacgggcgacgtcacctcgtggatgtactgccggtcgatgtagagcacgcagcgtcccccgtcttcggtgcgcacggtgtgcgcatcccatattttgtccagaagagtctttcccatcttacgcctccttttccttgcgttcggttacgttcagtatgcgcagcgcgtcgaggaacgcctcgatcgacgcccgcgtggtgtcggtgtgggcggcgaatccgtggaccgtgcggctgccgcactgcacctgcacgtgtacgcggcccacgtcgttcgaccccttggtgatggcctgcatgaggaattccgtgagcacgaccttctcgttgatgagggtcttgatggccgatacggccgcatccaccgggccgttgcccgtggcgatggccatgcgttcgtggtcgccgaacttcagcaccacggtcgccgtcggaacgagcgttccggtggtcacctgcaggaatttgagcgatacggactgttgtttcatgcggtcgatgtcgcccaccagatacagcaggtcgtaatcgtggatctccttcttcctgtcggcaagttcgaggaacttggcgtaggtgtcgtccgtctcctcctgcgtgaggttgtagccgagcagttcgagccggtgcacgagcgcggcgcggccgctgcgggccgtcagggcgatgaccgactggttgagtccgacgtcctgcgggtcgatgatctcgtaggtctggcggtctttcagcacgccgtcctgatggatgcccgacgagtgggcgaaggcgttgcggccgacgatcgccttgttgggctggacgggcatgttcatcaggctcgacacgaggtgcgaagccttggtgatgagctgtgcgtcgatgttcgtatcgacgttcagctccttgtggcagcgcagggtcatcaccacctcttcgagcgaggtgttgcccgcgcgttcgccgatgccgttgatcgtcacctcggcctgccgcgcgccgttgaggatgccgctcagggtgttggccgtagccatgcccagatcgttgtggcagtgggtcgagatgatcgcccggtcgatgttggagacgtgatcgacgaggtatttgatcttcgcgccgtactcgccgggcaggcagtagcccgtggtgtcgggaatgttgaccaccgtggcgccggccgcgatgaccgcttcgatcacgcgggcgaggtattccggatcggcgcgcccggcgtcttcggcgtagaactcgacgtcctcgacgtagcgcttggcgtatttcaccgccccgacggccgattcgatgatcttttcgggcgtcgagcgcagtttgtcgtagatatgctggggcgatacgccgattccggtgtggatgcgcttgtgcttggccagccgcagggcgtcggcggcgacgtcgatgtcttttttcacggcgcgggtgagcgcgcagatcgtcggggccgaaacggccttcgaaatttcaagtacggagttgaagtctccggggctggaaatcgggaatcccgcttcgatgatgtccacgccgagactttcgaggagtttggcgacttcgatcttctcggtggtgttcaactgacagcccggcacctgctcgccgtcgcggagcgtggtgtcgaaaataaaaagtttttcgcacataataggacttgatctaactaaccttggcaacaaatatattaaaaatatttccgaatcccttcattctgcgcaagtttcgtttgccgcgccgcccgtgccggagtgcgttcgggcggggttttcattacagattcggcgttgtggaagagtatccggcgaaagtccggcggctttgggccgggagcgcttacggattataacctttcggaatttgtcgcacggccgccgatttgttgcgggaaatctcttccgaagaccggattcgagccggaaacggggaaaaacgacgggccgctccccgaagagcggcccgtttccgtaaatacgcttatggttgttggcatttactttctgcgctggatgttgtcggagacggtttcgaccgtgcagggaccgccgtacgtcactttggcggccgtcgaggcgttgattttcaggcggcccgaacaccagacgtcggctttggcgtagttcgacaccgtcaggtcgtaatccgagacccgcagttcgggggccgagaaattcgcgcccgacgaaacccggaccgtggcgtcggcgacctgcgccgcgcctttcaggtagattttgccgtagcttccgacgctcgcttcgagcgaactgccgctgaatgtcccgttgaacgagccgccgctgctgacggtcagcttcgccggccgggtctttaccgttaccgtgccggagaatttggcgtagctgtcgatgcgcatcgtcagcgcgtcggcggtcagcgtgctgccgacgctggcgccgctgctgatctcgaccgtgaggtcggaggctttgatgtcgttcgagaatttggcgtaactgcccactgtcagtttgcagctgttgcggcactccacgggagcctgcgccgatccgtagctcgaaatccgcagctcgccgtcgccgcagcgcaccgagcctgcgaatttgccgtagctcgacacgtcgagtttcgcggcgccgggcgtgtcgatgtcggcgctcaccgatccgtagctcgatacggagaccgaaaccgacggacctttcagcggcattttgcagttcaccttgccgtaggagcctgccgatatttcgcgcagcgaggccgatgccggaacggtgaccgagaccgagatgttttccgtgctgttggcgttgacgcggaatttcagcttcccgccgtcgcgctccagctccagatggtcgatgacgttgtcgtcggccgtcacgctgatggttttggccgcggggctgacggtgatatcgaagaacgccgcggccgagatgcccgtgtagtcgcccgccttgccccagtcctgcgtcaccatgcgcccgctgcctttgagccgcccgctgcgggtgcggctgctccggtcgaaggcggcccgcttgatgttggtgccgatctcgccttcggtgttgtagagccggcggatctgttcggcggtgagcacggcggcgaatttgtccacatagtcgcgcttgacctgcgccgtggcggcgatgttcgagagtttggccttcaggctgtttttctgcgtggcttcgtcggcgccggaagcgccggcacgggcgtcgacggctttgtcgagcgcttcgcggtaggccttgtagatcggttcgaattccctgcgctggcgggcgctcagccccagctcgcggacgatctgttcgcgggccgccttgttcagctcttcgagcgactggttggccatatcgatgcgttccgccgcatcgatggcctgccgggcttcggccacggcgcgcgcgatttcgcggtcggagaggtccgtcgcacggcgcgcttcggccacggcgcgttcgatctcccggccggtcgcctccatggtccgccgggcttctgccatggcgcgttccagctcgccggaggagacgctccccgcggcgttcgtcgctgtgcgggcctcggccagcagttgttccggttcgttgcaggccggtgcggtatttcccgtcagggcgaacagcagggcgcagaggaaaagcaggatatgtttcatattgaaatgtttttagagttgctggttgtaaaggatgtcgtcgtaattctctgcggcggcctgacgcagcgtctcggccggggtcgtggcgagcatctgttcgaggtccggggccggcgtgtcggccctgcgggtgcggtattcggtaacgagcaggcccatgacgagcacggcagccgcggcggcggccgtcaggcagtatctgcggacggtccggggagatgatgccgggcggcgggacgtccggctgaggatgcgctcgtgcagcgcttcgagactctgcggcgggatgcggtaaggcatttcccggccgctgttttcaaattcacggttcatatttcctgcgttagtttttctttcagtttctgtactgcatagtggtaattgaccttgagtgtctgttcgcgctgtcccagcacgcgggctatctgtctgtaggacatcccgtcgtaatagcggaggttgaagaccagacgctgcttgagcggcagttccagcacggcctgctggaaacgcacctgcatttggtcggcgtcctcgccgcactcttccgccacgcggcccgccagtgtccggctcacttcgtcgagcgaggcgaacagtcccgttttgcgccgccggagcagcgtcagggccgtgttcgtggcgatgcggtagagccatgcccccatctcgtcgctcccgccccggaaggtgccgatcctgtcgtatgcccggacgaaggtctcctgcaccacatcctcggcgtcttcgtggaccaccaccagccgccgcgcatgccagtagagcgggcggaggtacgccccgaccagccggtcgaaggccccgcgccgggcgccggggtcgcgcagcgccgcaagctcttctgccgatatgtcgcgggtcgtctccatgagggtttgtcaataagacgcgtcaaaggtgcgaaagttaaatccgaatccgaaatttttctgctccgatgccgaattttccgcgtccggtttttgattcttgataatttggcttatctttgcgctccgaaacaggcggaattggggcgcggcccgcgaggtctcgctgagaaccgcccaaggtaacacattaaaaacaaattgcaatgaaaaccatttctgtaaaggccgtaaagcgtgaagagtacggcaagaaagcagccaaggccgtacgccgcgagggcatggtcccctgcgtactgtcgggccacggcgagtcggtcgccttctcggtggacccccgcgagatcaaacccctgatctacacccccaactcctacatcgtcgagttcgatttcgacggcaagaaggagcaggccgtgctgcgtgaggctcagttccaccccgtccgcgagcagatcctgcacctcgacttctaccgcatcgccgacggcaagcccgtttcgatcgcgattccggtacgcctgacgggtaacgccgagggtgtgaaggtcggcggtaagctggctctgtcggcccgcaaactggtcgtcagcgcgctggtcgagaatctgcccgacgaactggtcgtagacgtgaccacgctgggcgtcggcaagacgatcttcgtgggcgacctcaagttcgagaacctgaaattcgttactcccgcaaccaccgctgtctgcgccgttcgcgtaacccgtgcttcgcgcggcgctgcggctcaggattagtcggtagcgtatgaaatatcttattgttgggctgggaaatatcggcgccgaatatgccgggacccgacacaacatcggattcaatgtgttggacgccctcgcagaggcgtccaacgctgtttttaccacggcgcgttacggcgatgtggcccaagtgaaacacaagggccgcacgcttattctgctcaaaccctcgacctatatgaatctttcgggcaaggccgtccgctactggatggaggccgaaaagatcgccccggagaatctgctggtcgtttcggacgatatcgccctgccgttcggtacgctgcggctgcgcccgaaggggagcgccggagggcataacggcctgaagaatatcgccgaacttttgggaacggagaatttcgcccggatgcgcttcggcgtgggcggcgacttcccgaaggggcatcaggtcgattacgtgctgggcgagtggagcgaagaggaccggaagacgatgcccgaacggctcaaagttttctgcgacgcgattctgtcgttcgccacgatcggcgtggagcggacgatgaacttcttcaacaagaagtagccgaaaacaagaatagatgcctgccggcatatgaaacgggaaaccgggctttcgtgcttgcacggaaaggcccggtttttcgtttttgtgtattccgcaggaatctgccgttttcggcagtttcgccgtggaaatcgcgccgtgcggtatggacgcggcgaatgcggcgtgatttcgggggcggagcgtcgggcggttggcggaatggccggcctgccgccttcgggcgacgtcttgggcggcggatagccgttgccggcatgtcgcggccttgcaacggggtgtgcgcctactcctcgtcgtaatagagttcgtccatcaggccgtccagctcgcggcgctccttcttggtggggcggcccgtgccgcggtcgcggaatacgaagacggtctcgcgcggaacgttgagtttgtccagctcctcctgcggcgtgacgttgaggcagtacaggggaacgttcttggccggctggcggctcgacacgaggtcgaggaccttgtaggaataggtcacctgcatccggcgtacggcgatcacgtcgccgattttgacttcgcgcgaaggtttggcgtaggcgccgttcacggtcaccttgttgttgcggacggcgtccgcggcgtcgctgcgggtcttgaacacccgcacggcccagaggtatttgtccagtctgatgtcgtccataggtcgttacttttcataaatggattcgctgcggggcgtgtcgtgcgactgttcgtcgttctgacggctgacgctgaggatcatccccagagcgatggtggtgaagagcgtcgaggagccgccgcgcgagatcaggggcagcgtctgccccgtttcggggatcaggttcaccgtcaccatgatatgcagcagcgcctgacaggttatcagcagcgccagtcccagcaccagcagtcccggaaaggccgtgccgcaccgtcggaagatttcgattccgcggaagaagatccacagatagagcatcagcagcgcgatggccagcacgatgccgtattcctcgacgaagaaggcgtaggcgtagtcgctttcggggtggatcatctcgacgcgcatggcgctctgtccggctccctcgccgaagatgccgccgttgtaaatggcgatcatcgaacgctcggtgtcggtgaggtgttcgatcggcttgtcggtctgcgaacgggtccagaggtgtatccatgtcgagacgcgcccttcggcggtttcgctgcggccgaggttgagcgtcatgatgaggacgatgcccacgcaggccagcccgacgagcttcatcagttcgccgaagcggacgcgcccgatgagcatcatcacccacgaggcgaggaacaccagcacggccgacgaggtgtgggccgggaagatcacggcgcacgagacgaccacgggcatcaggatcggccatgtcccttcgcgccagatgcggcgctgttcgcgcgacgaacgccatgtccagaacctgagcgacggcacgatgcgtattttgtcgatcttcgactggcgtcccgccagctggctggcgaggaagagcaccgtggcgaccttcagcgcttcggagggctggaactggaagggtcccagcggaatccagcgggcggcgccgttggtcgtggcgccgatgaagtagacggcgacggtcagcaggaccgaaaggatgtagacggggcgcgaaaagaggttgtagatgcggcagttgatcttctgcacggcgaccatcacgacgagactgacgatcaggatcatcagctgctggcgcaggaaatgcgccgtggtgcgggccgtgtgtgcgtcgtaagccattttggccgtcgaggagtagaccaccagcaccgaaaccaccgccagcaccgcgatgatgatccacaacacgcggtcgcccgtgaaaagcctgaatttgggcttttcggccgtttcgccgcacgcgttcgccgcttgcgggttttccccgtccgcagcgctcccgtattcgcttccggagcttcggctgccgccccgaccgccccggatttcgctgccgttcgacgcggcgtctccggccgtgcgcggagcgttcccggccgtttccgaccaaggctcctgcgcctgctgcgcgccctgcgtctgtttccgttcgccgaacttcatcgccttatgccttttcgtttacccacgccttgaacagctcgccgcggttctcgtaatttttgaagaggtcgaagcttgcgcaggccggggacaacagcaccgcgtcgccgggccgggcggcggctttggccgccgtcatcgcggcgtcgagcgaatcggtggagatcacttcgggcacgacgcccgtgaactcccgaagcagtttggcgttgtccacgcccatgcagacgagcgtgtgcaccttctcgcgggcgaaatccttgagcggcccgtaatcgttgcctttgtccgtgccgccggcgatccacaccacggggcgcttcatgctttcgagcgcatagtagaccgaatcgacgttggtggccttcgagtcgttgatccatagcacgccgccgctctccctgaccggttcgagccggtgttcgacgggcgcgaagccgtaaagcgaacggcggatcgccgccggagcgattcccgccgcgagggttgcgagcgcccccgccatggcgttgtaggcgttgtgcaggcccttgatctgcagtttcgcggtgtcgatctcgaccgaggtctttccgacggccgccgtgaatttgccgtcgcagaggaaagcgtcgcctgcgccgctggccacggcgtttttcgccgcgaaggggagctgcttcatgcgcaggtcgtatttcggaagctgctgccagatcacttcgtcgtcgcccgaatagacgaaatagtcgcgcgaagtctggttctgcgtgatgcgcatcttcgaatcggcgtagttctggaagcagtggtcgtagcggtcgaggtggtcgggcgtgatgttcatcagcacgccgatatgcgcccggaacttgtacatgccgtcgagctggaacgagcttagctccagcacgtaccagtcgtaatcgcccgtggcgaccgagtaggcgaagctctcgccgatgttgccgcccagagcgacccgcatcccggcgtcgcgcatgatcttgtatatgagcgacgtggtggtagttttgccgttcgagccggtgatgcagatgcacttcgcccggcccgtgtagcggcccgcgaactctatttcggagatcacgggaatgcctgcggcgcggagttttcgcaccagcggcgccgtttcggggatgccgggcgacttgacgacctccgcggcgtcgaggatgcgctcttcggtatgggcgccctcttcgtagggcacctgccactcgtcgagcttggccttgtagcggtcggcgatccgccccgcatcggagaggaagacgtcgaaccctttcttcttggcgaggatcgcggagccgtatccgctgatgccgccgcccagcactgctatctttttcatgattaccggatctttaacgttacgagggtgatggccgccagcagcagcgagatgatccagaaacgcaggacgatcttggtctcgaactgtcccttcttctggaaatggtggtgtacgggggccatcagcagcaggcggtggccttcgccgtatttgcgcttggtgtatttgaagtagccgacctgcatcatcaccgagaaactttcgaccagaaagacgccgcacagcagcggcagcagcagctccttgcggatgcagagggcgaagacggcgatgatgccgccgatcgacagcgagccggtgtcgcccatgaagatctgcgccggaaaggagttgtaccaaaggaagccgaccagcgcgccgaccagcgccgcggcgaagacgaccagttcgccgctgtcagggatgtacatgatattgaggtagtcggcgtatacgatatgtcctgagagataagccagtacgcccagcaccgccacgatcggcaccgagacccccgtggccagtccgtcgagtccgtcggtgaggttggcgccgttggagacggccgtcaccacgaagatggcgaccagcacgtagagcagccacgtcatcgtggtgttgccgcccgtgagccagccgtaatcgaattcgttgtttttgatgaaggggatggtcgtctgggtggtcttgaggctttcggagctgataaccacgttgcggtgtacggtttcgagcacggagccgtcctcgttcatgtagaccgtctgtacgggctgtacgactttgtcgcggacgacgatctcctgcgacaggcacatcgtcgtgccgacgatgatgcccagcccgacctgtcccacgatcttgaaacggcccttgaggccctccttgttgtggcggaaaaccttgatgtagtcgtccagtccgccgatcagccccagccatacggtcgagacgatcatcagctggatgtagatgttgtcgagccgtccgagcagaaggatcggaaccagaatcgccagcaggatgatcacgccgcccatggtgggggtgccgcgcttctggagctgtccctccagaccgaggtcgcggacctcctcgccgatctgcttgcggcgcaggaagtcgatgatcttgcggccgaaaatgatgacgatcagcagcgcgaggatgatcgacgccgcggcgcggaacgaaatgtactggaacatgcccgaaccgggcaggttgtaggcttcgtccagatacttgaagatgtaatagagcatattgttcgttgggttttattttccgaatgaatggaaggctttgcggacctcctcccggtcgtcgaaggggtgtttcacgtcgccgacgatctgataggtttcgtggcccttgcccgccacgagcaggatgtcgcccggctgcgagagcatcaccgccgtgcggatggcttcggcgcggtcggcgatgcgcaggaagcgcgcgccgggttcgagtcccgccgccatctggtcgagaatcgcttcgggcgactcgtggcgcgggttgtccgacgtgaagacggccgtgtcggcgtaccgcacggcgatctgcgccatttcgggccgcttggtgcggtcgcggtcgccgccgcaaccgcagacgacgatcagtttctgcgccggggtgcggatctcctcgatggtgcggatcacgttttcgagtgcgtcgggcgtgtgggcataatcgacgacggccgtgacgccgtttgcgctccggaccagttcgaagcggccgctgaccgggtgcagcatgctcgccgtgcgcagcgtttcgccgcggtcgaagcccagcaggacggccgcgccgtatacggccagcaggttgtaggcgttgaagcggcccaccagcccgacccatacctcctgtccgtcgatgcgcagcagcatgccgtccgggtgcatctcgacgatcttgcagcggaagtcggccatcgagcgcagcgagtaagtgtgtatggccgcggaggtgttctgcaccatcacgcggccgtttttgtcgtcggcgttggtcagcgcgaaggcctcttttgagagtgagtcgaagaagagtttcttggcgcggatgtattcggcgaaggtcttgtggtagtcgaggtggtcgtgggtgatgttcgagaagatgccgcccgcgaagtgcagcccgcgcgtgcgctcctgcacgatggcgtgcgaagaacactccatgaagcagtactcgcacccttcgtcggccatttcgcgcatcatggcgttgagccgcacggggtcgggcgtggtgtgcgtcgcctcgacggtgcgttcgccgaccttgtagaccacggtcgaaatcagtcccgccttgtgtcccaaggcccgtacgaggtcgtacagcagcgttacggtcgtggtcttgccgttggtgccggtgatgcccacgagtttcagcgcgcggctggggtggtcgtagaacgccgcggccatgtcggccagcgcgcctgcggcgtcgggcaccgcgacgtagacgacgtctgcggcggtctgttcgggcaggcgttcgcagacgactgcggcggcgccttttgcgacggcggcgggaatgaagtcgtgcccgtcgttctgcgtgccgcgcacggcgaagaagcagtcgcccggcccgacggcacgcgagtcgtaaaccaacccggcgacggcggccgaatcgtcgccgtgcagcgccgtgacgggggtatttcggagaagttctttcagtgttttcataaaccgttgtcttttgtcgtattcgccccttgggcgtctttgccgccgcggtccgcgggattcggagcgcaggcgcttccgcgaacacgtccggaagccgggaaagtctccctgcggcgcggcgccggagtgaatatcgtcagttctttcatcttagttcagcgttatggcgaccgtcgcgcccggcgtgatgcgcgctccgggagcgaggctttgccggacgacggctccccggcccgaaaagcggaccttcaggccgcggctttcgagtacgaacagcgcgtccttgagtcccatgccccgcacgtcgggcatcgtgcccgtttcggccggaaggctcgtgatgaccacgttcgaaaggctgtccacctgcacgcggccccagcccgtgcggtggtcgaacgaagcgcggggcgaaagcttgtccgccacgcggcggatctggccgatgtcgccgcccttgatccggtcggggtggcggcgcgggccgtgccgctcgacgcggccgtaccagtcgcggttgcggttgtagatgtaatcgaccatgcgtttgacgaccggacccgccagcggacctccgtaataggccttgccggcctgcgcacgggtttcgatggtcgtcagcaccgtgtagcgggggttgtcggccgggaagtaggcgatcatcgagccgaggtagtagcggccttcgcggctgcgggcgtcggtgatctgcgccgtgccggtcttggcggccacgcgcagccgggcggtgtccctgaaatagaggctggcggtaccctctgtgcagaccagttcgagacaccgctgcacctcgcgcagcgccgagcgcgagcagatcgacgaggcgagggtgcggctttcgaaccgctcctcgacgcggtcgccgcgccgcagttcgcgcaccagcacgggcgagatcattttgccgccgttggcgatggcgttgtagaaggtgatcatctggatcggagccagccgtacgcggtagccgtagctcatcttgaccagcatgacgcccggatcgggaactttccagtcggtggtgatcgacggggcgcgctcgcccagccgttccagtccgacggtctgtccgagacgtagtttttcgtggaggaagtcgctgtactcctgcttcttgcccgtgatgccgtagcgctcccagatcgccttggcaaagtagacgttcgacgacgaagccacggcgcggcggaagtcgatgacgtggtcgccgcggtgcgagtcgcggatattcttggccgggcctacggtcaccgggtcgccgttgtgggtgtcgtaggcggtctggggagacatgtcggcgtcgtcgagcagcgtgagcatcgtcgccagcttgaaggtcgaacccggctccatgctgcgccccagcgcgtaattctcgcgttcgtaaaacgtcccttcggttcccgcccggcccagattggccatggcgaggatttctcccgtatggacctccatgacgatcgtcgtgccccagatggcgttctgggcttcgagctggcgccgcagcgccttgtcggcgacgtcctgcaggtccagatcgagcgtggtcaccacgtcgtagccgtcttcggggtcctcgtggccgccgcccgcgacgcggccgtagaagcctctggcgatgcgctgccgcagggctttgccgtcgcggcccgcaagctcttcgcggtaggcctcctcgatgccgtaattgcccttgtcgcccgtcagtccgatcgtgcggcgcgccagttcgccctgcgggtagacccgctggtcgcgttcgacgagccggtagaccatgcccatgttccagttcagcagcggataacgccgcagggtctgccattcggcgtagtccacttcacgggggaagatattgacgggcgtgtggtcgcggatggtgtcgtagatgcggcgcgtggcgaactcttcgccgcgcagacggtccatcaggcgcgagaaccacccctcggagcgcaggtaggtcgtgtcgcgtccgttgacgagccggtagcggcgggcgtgctcctcgcggaatttgcggctgtattcggcggcggacttgtcccggaagaacgccgcgagcagtttggccagcgagtcgctctgttcgcggaaggttttcagcgaatcgagacccggcgaagcgaagtcgaaggcggcctgatagcggaagatcgaagtcgccagcggcgcgccgccgcgcgagaggatgctgccgcgctgcgccggaatggtctcctcggtgaagatgcggctggccagccgttcggcgttgtaggccacttcggaactgaagagctgcacccagaccaatcgtccgagcacgacggccccggcgagtatgaacagcacgtaaagcagtcgtacccgcagcagaatgtcgcttttgatcttcgaacgttcctctttcatcgtccgtcagttttcgatgatttcgcccggcgccggcgggtcggtaagctcgatgccgcgttcgcgcagccgttcgacgatggccgagtgggtggtgcggcggtaacgctgttcctgcaggcggatcgagcgttcgcgcaggatctgcacttcgcgttcgaggcgcgagtatttcatgtccagatgcagggtggtgaacatcacggcgatgctcaaaaagaacatgcccgcgatcgagagcatgtagggatagtatttcgagactccctcgtggacgaggatcgtacctgagaagagctgccagaaggtgctggccttgcggcggcgctcccggcgctgacgctcctcctcttcggccttctcctcctcttcgcgttccatgtcggcgcggatgtcctcgtcggcttcgccccgctcgatgcgcagcacttcgcgccgcacgcggcgggcgaattcctcctcctgcctgcggcgggcctcctcttcgggggttaccgggtcgaattcgtggtccttgaacatccttctctgctgcttttgtcgttgaatgattcgcggcggcctccgccctccgttattcgttctcccgttttgcggccgcgcgcagcttggccgagcgcgaccgggggttgcgttccaactcttcggccgtggggaccacggccttgcgcgttatgatctcgaacggcgtgagggcgcgtccgaaaaagtctttctccaccgagcctgagaaattcccgctgcgcaggaagttcttgaccagccggtcttcgagcgagtggtacgagatgacgaccagccgcccgccgggacgcagtaccttgagactctgctccagcgccattttgagcgcctccatttcgccgttgacctcgatgcgcagcgcctgaaaaagcttggtcaggaacttcgactcgtcttttttcggggtgcagggcttcacggcctcgaccagctgcgccgtggtctcgatcggtgcggcttcccgtgcccggacgatgcagttggcgattttccacggggtctccagctcgccccagtctcccagcaggcgcgtcagcgcgtcggccggatagccgttcacgacgcgggccgccgtcagcgcgccccgctggttcatgcgcatgtccagcggcgcttcgccccggaacgagaaaccccgctccacggcgtcgaaatggtgcgacgagacgcccagatcggccagaatgccgtccacctgctccacctcccgcagccgcagtgccccgcgcagaaagcggaagttgctctcgacgtagtggaaccgcccgtcgtcggggcagttcgcgcgcgtgtcgcggtcctgatcgaaggcgtagagtctcccgccgggacccagcttttcgaggatgcggcgcgaatggccgcccccgccgaaagtgaggtccacgtaagtgcccgcagggtctacggcgagcaggtcgacggactcctccagaaggacaggtatatgatactgagacatattcgttgctgacaaggtcgatttgggtgtaaagttagggatttttcgaaaaagaatacctatatttgtggatataattttttgtacgtctttatgcccagaatagatatcggagcggtacttgccgacaaagccccgcggctggcccgctggattcccggcttcgtcatcggctggctccgccgcacgattcacgagtcggagatcaattacattctcgaacactactggaacctgcccccgcaggagtttatccgcgcctgcttcagggagtggcaggtgacctatacggtcgaggggctcgaaaagctcgatcccaagggtcgctatctgttcgccgcgaaccatcctttcgggggaatggacggcatgatgctcgccgacaagctgatagaccgcttcggcgacgcccgcgtggtggtcaacgacctgctgatgcacctcgaaccgctgcgtccgctatggattccggtgaacaagcacggttcgcagaacagcgcctacgcccgcaaattcgacgaggagttcgtcggcgaagtgccgatcctgaccttcccggcggggctttgctcgcgctgcatcgggggcgaggtgaccgacctgccgtggaaaaccaacttcctgaaaaaggcctacgcttcgcagcgcgagatcgtgccggtgttcgtcgaaggacggctgtcgaacttcttctaccgcgtggcccggctgcgcgtgatgctggggctgaagctcaatatcgagatgctctggctgcccgacgaaatgttttcccaaaagggccggcacttccgcattttcgtgggcgacccgattcccgtctccgagctgcagcgttacggcggactccgcgagcaggccgaattcgtacgtaaaaaggcgtattttttggaaaatatgctcgcgccggaaccggaaaaacgctaaaatcggtatttttgccccagttatatgcaacagagacaaatggaagccatcatacctcccgtcgaaagggaactgctccgcgccgaactgacgccggagcgcaaggcccgcgatacgaagaaggccgggaacgagatttatatcttctcggccgccgagtgtccgtcgctgatgcgcgagatcggccgcctgcgcgaaatcgcgttccgcggcgcgggtggcggcacgggcaaggagctggacatcgacgccgaagatctggccgaggacggctactaccagctgatcgtgtgggaccccgccgccgaagagatcgtcggcggctaccgtttcatcatctgcacggacgaatatccgcgccatctctcgaccgaacactatttccgcttcagcgacaagttccgccgcaaatacctgccccgcaccatcgaactgggccgttcgttcgtgcagccctcctatcaggcgcgcggcaacgccaagagcatctatgcgctggacaacctctgggacgggctcggtgcgctgatcgtgctggacccccgcgccaaataccttttcggcaaggtgacgatgtatacgacctacaaggccgtggcccgcaacgccctgatctggttcctgcgccgttacttccccgaccgggacaacctcgtcgagggcatccatccgctccggctcgatctggacgacccctattacgagcagctcttcacagggcagacctatcaggagaattaccgcattctgattcagaaaatccgcgagttcaacgagaacattccgccgctgatcaacgcatacatgaacctttcgcccacgatgcgggttttcgatacggtgtcgaatcccgatttcggcggtgtcgaggagacgggcattctggtcacgatacgcgacatctatcccgaaaaacgggagcgttacacgcgctggctggggtggcaggccaatctgcagtaccgccgcgagcttttccgcaaacgggtgcgcgagcatctggaccggatcaagaaacgcaaaggcgaatgacgtctgctgcatcggataaaagccgcacggaatgccgtgcggcttaatttttcagacggaaatcggtcgcgggatgcagtaaaagggcttttgcagcgtttataagggcagtaacgctaattagattcgctatgaaaagattgttttcggccctcctttgtctggccctgatcgcgggatcggcggcgtgcagcgacgacgaaacgacccgtcccgtgctggtagtcaacgccggcgagagttttctgtcgctcgacgcactggcccgcgccggcaagatctccgtaacttcgtcgctgccgtggcgcgtgacggcagccgccggggacaagtggtttacgctctccgccacggaaggcccggcgggatattccgagatcgaggtgaccttcgaccggaacgaaggccccgcccgcagtgcgcagctggcttttgccagcgaggacctgatcgtgccgttcgtcgtgtcgcagagcgcgccgaaggacggttacgacgcgccggattactatttttatgccggattcggcacgatgccggccctctatgccggattgcatgtgctgtcccacgacaaaccgagttatttctattatacgcgttcgagaacgttcgacccggataagttcccgccgcatgtcaaagtcacgacggcggccgaccggacctcggatgctaccgaagccgaaaaggacgcgatgtgccgcgaaatgaaacggcgagttctggagatcaacaaggccgatccgacggccgtcttcggtctctatgtggacgacctgcgctgccgtttgggttacgactggttcgtggcgcagggaatcgactccgcgcgggtgaaggtgagcctgctttcggacggaacggcgacatacaacaacttttacaactatttcggcgatccggccacggctcagcagaactgggaaacctatgccgcggaggtagaggcgctcgactggaatcacgggggacgttatcccgaaacccgtgccgagttcgaactcgaatcgtggacgtggccttactacctcgcgacccgtcccggctatcgcttggtgatgcaaaacggggcgctgctcgaaagctcctgcccgttcattaccgacaaacttcgtgaaatgcagatcgaagatattcagccctacgagatgctgtcggcactgcccgaatcggcccgcaggcagttctacgacatggcgggcttcgattacgacaagttcgcggcgctgttcgacgcttcccccaaaggcaacctgatcatcatcggaacgagccatcagaacgccgcgagcgaacagcagcagcgcgattacgtggcgcggatcgtcggacagtacggcgcagcgtacgacattttcttcaagcctcatcccgccgacacctcttcggcgtcgtacgaagccgactttccggggctgacgctgcttcccggtcagatgccgttcgagattttcgtctggtcgctgatggatcacgtcgatatgatcggcggttatccctcgacggttttcctgacggtgcccgtcgataaggtgcggttcatcttcgctccggatgccgagagtctggtgcggccgctcaacctgctgttccgcgatgcggcgaacgtcgagtggatgcagtaaagggtcttctgcggatgtggttcctgcggatatggaaacagccggtcatgcgaccggctgtttttttgtttgcaggcgtgctgcctgcctttttcgggtcttgtcccgtttgtcttggttgtccgttccgtccgttcccggcagcaggcttaccgcgaggcggccagcgacgagggagtcacgccttcggagtttttggcccagtcgccgcgggcgcggagcacctgctcgacgatgtcgcgcacggccccttcaccgcctttgaattcggagacgtaacgcgacgcttcgatcacttcggcggcggcgtcggccgggcagaccgggatgcccacttcgcgcatgcactccagatcggggatgtcgtcgcccatgtagattgcgttccgggggtcgatgccctcctcggcgaagtattcgtgcagggcgctgatcttgtccatgcagtcgatgtaggcacgggtgacgcccagcatcttcagccggttttcgagggtcttgccgcgtcctccggtgatgatgcagaccttgtagcccattttgatcgcgtaggccagcgcatagccgtccttggcgttgtagcggcggatgaagtcgccgtcgagtgtggggatgatgccgccgtcggtcatcacgccgtccacgtcgaagacgaaggcttcggtgcggactatatcttctttgaagtttcccatatgctgttgcttatgattgaatagatgttcttgagttgcagatcgtcgtcgagcagggcgcagtggcgggcgcgggtcccggtgtcgttgcgcacggcgggacctgtctgcacgtcggccggggaggccgcgtcgagcgctttggcggcggtctgggcgatcagcggtttgagcacgtcgaacggaagccccgcactgccggcgatgcgttcggcgacggcgtacatgtgattgacgaaattgcaggcgaaaaccgccgcgagatgcgctttcgcccggcaggccgagtcggcccagatcaccgtgcgcgagagacggcgggcgaaggcttccagctccgggcgcagggcttcgtcgtcggtttcgagaaagacgggaatctgcgaaaaatccacttcgcggcccttggtgaaggtctggaggggatagaagacggcccggcgcacgggttggccgggcagggcttcgagcggcacgcttccggcggtgtgggccacgacggcccccgcgggaatgggcagcgaagcggccgcttccgctacggcccggtcgcttacggcgatcaggtagatgtcggcttcggccagccgcgccgggtcggccgtccactgcgtagcggcgagtgcggcgacctgctgcccgcgtgcggcgttgcgggcgaaaatctgcaccagcttcagaccgcttttggccacggcctgcgccaatgcttccgcgaggttgccgctgccgattatgactacgcgttccataaatttctttgtcgtttcgttaaagcaggtccaccagccgcacgttgtcctgcgatttgcgggccgtttccttcaggttctccaactcccggtcgatgcgggtcagttcggcgttgcgggccagatcgacggtcgtctgccccgacgcttcgaccgcttcgagcaccccgtagacggtcagcgttccggtgtcgtgcgccggggcgaaggccacttcgcgctcgccgtcgcccgaaggcacggcgatgagctgtccggcctgcacgagctggtagagtacgtcgttgacgatgcgcgtgggcagtccgagccgtgcgcggattacgtcggcgggcgttgcaccgcccttttcgcggaagtgccgcaccacggagagcatcacggccagcaggatcttacgccgctggtcgtagcttatcagcagcgattcgcgctcctcgccgaagcgggcgatgttctggtaggcgaacgacagctcgccgccgaacagcaggatctgccacgaggtctggagccagatcagcagcagcggaagggccgcgaaactgccgtagatggcgttgtaggaggtcatccaccgctgaatgtagatatagccccactgaaagagcaggaagagcgtgccggcgacgatgcccgccatcagcgcgctcttgaatttgactttggtgttggggatgatgatatacaggatggtgaacatcacccagatgatgaacatcgacgcgaagcgcgagagcaggtcgaaataccagctgccgtcgaatcccagcagctgctgggtgtagttgcctacggcattggccacgacccacagcaccgggacgatcatcaccacggcgatatagtcggtgtactggcgcgtcacgctgcgttcgaccttgacctcccagatgttgttgaaggcgctttcgatcgagccgaagacccggattatggcccagaagagcatcaccagcgccacggccgccaccacgccgccctgcgtgcgggccagcgccttttcggcgaaaccgacgacgtagtcgatgatttcggggttctgcgggaagagggcgtagaggttgtcgatcagtccgtcggccagtccgaagcccttgaccacggcgaaaaccaccgctacgatcggcaccagcgacatcagcgtatagaacgtgagggccgcgctgcggacgatcgtgccgtgttccagcaggccccgcgccgtgtagaacagcaggcggtactgctgtacgagccaccggatgaccgggttgcgccattcgttgatgtcgcgccggaagatcgtgtcggtgaagtaggtgaatatctcgctgattttcataggctgttacgattcctgcaaacggactgcgcgccgaacgccgccgggcgcattccgatatgctgcaaatatagctatttcaaccggaccgcccaaaatccgtttccgattttggtgaaggccagccgcacgtcggctcccgcgtgcacgcccagccgccgggccagctcctcggctccgaacgggaagtcgcgtttcatcagctcggctccggctcctttcaggctgcgtttcagccgccgcgggtcgtacggttcgatgctttcgactgcgaataccttgccgattacctcctgcggctcttcggcggcgaatccgtagccgttttcgctccagatgtcggccttgccgcgcaggtggagccgcgccagccgcgccttctgcagcgcgacgtcgggcacgaccagccagcggtagcgcgacgggtcgaagttgtcgggtacgggcggcggcgtctggccgggggtggccgtgaaactgccgcggccgagcgccgtcgccgtgagggcgggacccgtgccgtcggcatagacgagcacctccttgcactcgtcgccgagcgaaacgacctccacacggctgtcgggaaagagccgcagggcttcgtccacgtcgaacagcggcgagttcttgatgcacagacgctccgacgcgcgcatgataagcggcatcagggcggtgacgtcgggcgagcacgcttcgagccgcaccagcttgcggccgtcggccgagcggcggtcggggtcggcgaaaatccagtcgaagcgcagtccgggccgttgcagatactcctcggccgaggtgtggacgacctctatgttggcggcttggagccgccggaagttttcggcggcgatacgggccagcgtttcgctgcgttcgagcgtcaccacgcgccggaaacggcggctcaggaagagcgcatcgacgcccagtccgcaggtgaggtccagcgccgtgtcgccgtcgatccgtttgtgcgccgcacacgcctcgctcgacgcctgctcgaaggccagtggcgggagtatgcactgcgcggcggcatacgacggcagtttcgatgccgcccgcgcgaggtatttgacctgcgtggcgaccagccgcgcgtggggcacggtgcggtcgagggccacgtccagcggatcgcggccgcgggagacggcaatggcccgctgcacttcgtccgtaagcaggagttcgtattcttcggaggtcatcatgccggcaaatgtacgctttttttcggttcggcggaccacgccgcaaccgttgcgagcgcgaaaaagaggtaaacggccgccgtcgcccctccgccgagggcgtattccgccgcagcgcagggcagatccgccgtgacgcgcgccagcgcgttgagtccttcggccgtgtgcgacaacacgcattcgaatgccggggccgcccatccgaccggcagcagcatccagagcgcgccggccagcaccacggcgcttccgagcaggatcgctgccggattgatgacgactcccgccagcggcacgatgccgaacgtatgcgatacgaggggcgccgtggccagcgtcgccgcaaggctgaccgccagcgcgtcggtgatcggattcagcgcccgccgccgggtgcggagccggcggcagaggggtacgccccatgcgaggatcgccgcgacggccgcgaacgagagctggaagctgatgtctccgagccatgcgggattccacaacagcatgccgaaggcggccgcggcgagggcgttcaggccgttgtattccgacgcggaggcgagggccgactggagcatcgtgaacatcaccgccgccctcacggcgctgggcggaaatcccgccgcggcgacgtaaatccagatgcaggccgccgccagcaggttgcgcagcagatggcccctgcgcagcagcggcagccaccacaacagcagattgaccagcgcgaagacgatgcccgtgtgcagtcccgatacggccagcaggtgcgagagtccgctgcgcgagtaggccgcgcgcagttcgggcgtgatgccgctccggtcgcccgccgtcatggcgcggcagacggcacccgcgtcgccggggattctcagacggcccattcgttcggcggcgtgcagatgcagggccgtattgcgggcgggcaatcgttcgagtatggttcgctccgacagccatatcgttcccgcgaatccccgccgcgtcatcaggcggcggtaactctccgcgccgccgcgcagcggccggaccgtgccccggcagcggagacgctcgcccggatgcaggggcgtcagagtgtcggcatggagtgtcacccggtcgcctgcggggcgccatgtgccgtcggccgggtcgcgccacgccgtgacggtcgcttcggcggaagcatagcggccccggtcggcggggatgccttcgacggagagttcataggccgtgtataccccgtaaggtaccgtgcgtccggtatcgcggagctgtgccgcgccgaatcccgccgtgaagagcatggcgagggtgcagagcggcgaccggagaagcagcgccaagacgccggagagcaaaaaggcccctgcgagaaaccacaggggcagtgcgaaacggtcggcggcgagaatcccggccgcaaacggcacgacggctttcagcatcggcatgcggtcgagtttggcaagcaggaattcgggtttcatacctgcaaatatagcaaaatagggctgttctgtgtgctgttcgggcaaaaggatttcgtgtcgctgccggatcgggcgggactctccgccgctattggcgaaatagctcccaaccccgctccacatcatccatatcggccgccgtgccgttttccacccgtgaaatggccgccgccatgcggagcatcgtcgtccggtcgcgggtgtcgaccggacggtcgtcggcaatgcccacggcgtcggcgactgcgcggatgtagatttccgtatggttctccgaaggcggggcccagcgcgagatcatgccgcggatggtctccagaccgtggcggatgcgataggtgtccaagaggacgaagatcgcccgatacccccacggcatggattcgaactgcttgaacgccggatcgcgcgagggccgcacctcgcctttgtagcggaccgccgactgccggatattgccggggttccggttgctcagccccctactcatcgctcgcctccctccggatgcggcggcggacgtagcggcgcagccagcggaacagcggggcgtcggataactgcgacgcgttttcgaggaacgaccacagctccacgccgcacgtgaagcccgtgaagagccgtgcgacgttcagctccatgaagtcgaggatgcagctgtcgatcagccacgccatggcgatcgccgtaatggcaagggccagcttgaggaccgtgcgccatgcttcgcggctctcgaagtaccatgcgcggccttcgcggcgggccgccgcgcggctggcggcgacgcctgacaggaagtcgatgccgatgaagaccacggcgcaggccacgagcggcccgatcggggcgaacagggcggcgatccccgccgccgcgccgctaacgagtctgtacaaagtttccatcggtcgtgcagcggttgaggatgttctcgtgcgggtcgtattccggaaattcggcggcgtgcgtttcgaggtgttcggcggcgcggcgcaacagcgttcgggcctgacggcgcaggctccgttgcagctcgcgcagggcctgcgtgccggcgggctggtaggcggcggatttgggcgcgacggtgccgcactgcccggtgcggacgtcgagccgcggctggagggcgatgcgcgtgaaaaacgctgccggagccgccagatagtcggtcgtgaagccggcatgcgagccggcgagaagtttctcgtacagccgccgcccgatgaccgggacgatgtagcgctgttcggccgcggcgatgtcgctctgcgtgacgctctccggtgcgagatactccccgtcggcgaaggccagtgcgacggcctgcgcgggggtgataagtgtgttcatggatgttgtaattgaaatgattttcgaatagcgctgaaagcggcgcagaagttcccgcggggcgtcatagccacaaacgcggcaacagcgtgccggtgcgggaaaagcaagacaacctttgcgtcatcttggccgcgtgcgacaactccccgccggggcggggattcagggcgggtcggacttgtaaacgacgccgaaggcggcgaacagaaagtttcgaaagcacccggagaatcaggtcttattctatactcctgatattatacttcgtgatctcggacagaaacgcctgctggcgctcgtcgtcgggatcatactccagtccgtcggccttgcgggcctcccagaccttcatgtagatcggcttggagcgtgtcggcgggcggtttacgatttgcagcgacgacgtgtcgaatcccgatacggaggtcaggagctggcggatcggttcggtcagttcggcctgctcgccgaggatgaccgtgttgagcgccacttcgtactcgtgcaggatgcgttcggcgctgaatcccgaagcatagtccagtccgctcagggtccggaaccacgagtgggccacgacgatgtccgacacggcctgctcgtgcagcgcctgccagtcgccctcgttctgcgacgcgatcggaatgaaacgcgaattgtcgttctgctcgccgccgtcgcggatgacgaacatcacctgtccggggttgcccgcgaatttctgctcggccagccgtacgatgcgttcggcttcggcttcgctgtccaccgtactgtcgagcatcatcacgccggagagctggaacgagttgtcgagccgcgagatattccacttgtcggtcttgtaggcgatggccgagacgttgaaccccgcgatgtagggcggcacgccgtaatgttcgaacgtcggttcgtagtccttgtagtggatcacggcgcgcagcgtgccgtcggactgctcttcgaatgtcgggtagaggggcagggtccgcgcttcggccgctttgaacgccgtccagtcgtggtggagcaggacgtgggccgagtcgcgggccagccggcagcgcgaggcgtcctgatggtgcagcgagaggaacgtatgcccggcgtcggtcaccgtttcgagaaatgcgttgccgaagagcgccttgtcgaacgccagcttgttgagcacctgccgcaggctctccccgtcgccgtttacgtggcgcaggaaggccgcgagccggggctgctgcacctcgtcgcacgtgaagcccttgcccgaaatgtagtcggccttgtcgttgatgatgcggcggtgggtcaccgagcggcgtgccatcagcgccagcgcgttgggaaagaggttgtcgtcgccccagcgccagaacgcgtcgttttcgacacgtcctgcgccgagcgtgatgtagggatcggccgtgcggttgttcaccgcgacggccggtttgattttgtgctttttgctcatggttcctgttgtttgagttccggggccgggtcggtgtcctcgcaggtgagggtcacgacgaccggcgtgccgtcgaggggttttacgcccgattcgttgctcaccgagccgagccgcaggggttgttccctccccagccgggctgaccagccgatcagcagccgttcgcccgatgcggccgtgacggttgcgatcagcccctcggtcgcggccgtgcggcggaatgccgggccgaaaagcgtgcgggccgcttcgcggctgacgacgagcttcagcgtatgacgcacgcgctgcggtccggcttgggtgtcgctcagctcggtataggaggagcgttgttcggcgagcggcagccgcgtgagcagcgtcccgtcgcggaataccgcttcggcgcgcccgtcggcccccagcgccgcccgcaggagatttcctgcgggggtgatcgcggcggccgtgatgccgccggcgggtttgcggggtgtggacgctgtcatcgctatacccggaatgcgtaagagagcatcgtctcgtcgatcacgtcgcatccggccatgaagacggcgcgctggcggttctccatcaggtcggggttgtaccacatgcgcacttcgttgcccggaaagtcggacgtgttgacggccagtacgagattgcggcggtcggtcagcaggcagaacgacttgtggagcgaggtgtcggccagataggcccccagacggacgtcgacgagcgggatgccgtggtaggctagtccctgacgaccgttggtgctttcggcgtaggccgcgtcggcgcccttgctgtcgaggtacttttcgtaggcgtagtagagatccgaggtgacgaagaaggcgagctggccttcggctttgcggtccttgatgcgttcgtcggcgttctgccagaggtcgtcgaggatcgcgacgatcttttcgggattggcgaagtcggcggcttcgtagaccgaattgtggaaccgctcctgctcggcgccggccttgacgcttttgaggaagccgtcgaaggtgttgaagcccgaagcggccgtcgtgtcgccgacccacatcgtggcgcggattccctcggcgatggcctgcttgaagagcgaagtttcggcctgctccagctcgctgcccgtcaggtcgtccatattgacgtcggcgcgcgccgcgattttctcgtataccagcgagaagtagtcggcggccgagaatcccagctcggccttcacgcggctcagagcgatggttttctgcagtttggtggcggcgctgcctccggaccaccctgcggcggtgtacttctggaggacgttgcgctgcccttcccagagctggatggtcgtcgggacgggcatgttgtagaggaccctcacgcccagttcgccggccgaagggccgctcaggatgggacggaagaagatgttttcgaggtcggaaccggtgtactgcttggcgttttctaagaaactcatggttgaaatgattttggtggttgttcgaatggtcggggagcctttttctgcgggactctcccggttttacatgttgcgcagacgtttcgcgtcttcggagtaggcgcgttggttggccgtccgcacgaggtcgccgtaagagggatcctcgcggggccgggtttgcgtggggacgacccgctgctgagcctgacgcaccgcggcggcggagcggcggagcagctcccgctcttctccttcggtgtggaggatgttgcggtccgcgggcagctgctctccggcgctgagaccgatgcggacgagcaggcgttcccagccgcgggcgatgtttcgcgtcagcgagggggcgggatgccccgccgcatcggtcacgacgtcggccagaccggccgcgacggcctcttcgggcgacagccagcggccgttgccgttgttttcggccatcagggtttcgaattcggccgccgggcgtcccgaacgggcggcatagactgcggcgatgcgcgcgtcggtctggcgcagcaggtcgagtttgccgttcagctcggcggcgttgccttcggtggcgcagacggccgtgtgtatcaggtagagggcgttggccgatatttcgcggcagccgggcgacgcggcctgcgcgatgatcgtcgccgccgaggcggtgtacccgtaacagcgggtcgtgatgtgtgcgccgagcgccgtgagcgcatcgtggatcagcagcgcgtcgttcacgtcgccgcccgtcgagcggatgttgaccaccacttcggacgcgtcgatttcggcgatgcggcgcacggcgtcgcggaacttttcgtaggtcgccacgcgcgcttcgggccggtcgaactgccactcttcgggcacgccgatcgtgccctcgatgtcgatttggcagacgccggcgttgttatcgatttgaatttccgatttcatgtttcaggatttgtacgagttgtaatagtagctgcggattttttcgtaggagcagcagaacagctcggccgtggcgtgcatggcttcgcaccgcggcacgccctctgcgcccagccgttcgatttcgccgcgtacggcccgctgttcgcagacccgcaggttgaccagccccagttcgaacagccgttcgacggcctgttcgccctccagtccgccgatttcccgcagcaggatcgcggccagtcgttttttgtggcgggtcgtcatgcgtcggggagttgggtgaaagtgcagcggacggaggccgcctgcgggtcgtaatcttcgacggcacggagcgctgcgcgtaccgttccttcgcccgtgtcgagcaggaacgccgaacgcaggtcgggcgctcccgttccgggcgtgaaaaggctttcgaattcgtggggcgcgagccgcagcgagagtgtgatgcgccggcctgcggactctcggcccgtttgcaggtcataataacggtgcagcccccgcacgccgtcgcggtcctcgaagcagagcgtgaatccctccgccgcgccgtccccggcgaagtggaacgctgcgagcggatattgcgcctgccccgacggaaatccccaccgctcgccgtcgggcaaggggtgcatgcctgcgaagcgtacgatgcgcggcgtgaagttggtgccgtcctcctgtgcgtcgtcgcggtctccgacctgcatgattacggccgaaggggcgttggagtaacctcccgcagtgctgatcgtggggctgaacagcggattggccagcgtcttttcgccctccttggccgcacgggagtccgtcgtgacgctccattggccgaaggggctttcagcctcggcgtcgaaacgggccacggctccgtcgcccgccggatagcgccatgtgcggcgttcgtggacttcgggggcgatgtccgccagcaccacgggctgcgagaagtcggttttcgcccgccagtcggccgcggggcctgcggcgaagaaatcgtccgccggttcgatccggacggttcttgtcgcctgttcggtgtggaagcgcaggttgaagaggtgctgcagcgcttcgagcagctccgactgccggatccggtgccgggccacgtcggcgaacgtgatcgccgacccgtatccgggtgccgacgagaaacgcggctggagcgaacattccttgtgcagggtgagcgacatgccctcctcggccccgtggaagtaaatccggttgaagtacttcggcgacgagggcgagagccgctcggcggcggtgcgcacccgcagttcgacggtggtctctccccgctcggcgatatacccgtcgtacagcgcccaatccccggcgtacggctcccaacgggtgccgctgcggacctgcagcacgggattcgccacgctgcccgccgccggcgtgacgacctgcgccgtgcgggcggagaattcgctccaaagcgtgtccgccgttccgttcctcgtatagctcagacggtattgccgtccttcggcgtggtcgaagacgatcgccgtgtagctgcggttcggtgcgatcccgccgcggcggtcttcgtaacggttggccagcgtgaaacgcatgtcggcgcccgtgccgaggtagaccgaatcgaaccctttgagccgctggcggctctggatcacgtggtcggtggtgtacttcaggtaatactcgaatcccgcgctcacctcggtcgtgggcgtgaatacgatattgccccggtcgaaaccgaaacagccgccgttgttgctcaggccgggaaccggttccccgtcggtgtcgggggtctggggcgtggccgtctcgacgatgttccccacggagttgagcgcggtgttcgggttggcggccacgcggcccgaataatcggcctttgctgttgcgggggacagccgccgggcgaaaaagcccatgcgggcggcaagggccgcggtgtcgcgcgaggcgtatgcgccgctcatgtagagcgaccggaacagctccgactccatgaatctgctttcgatgcggtaccccgcttcgccgaagatcgtttcgacgagcgtcgccacatgcaggaacgggtggtaatcgtccaccgtcaggagccgctgggcggggagcaggtccgtcgggctgttgcgctgcgggtattcgtcgcggcggatcggaaagaacttcacgggcgaatcgtccgtccagcctgcgagaatcgtctccggagtcagggccgcccggaaatcgacgccgagggcgttgaacatccgccgtgcggcgtttttcgcccagcccgctccgccgtcgcggatttctatccggtatccttcgtccgatgcgctcagcatccgcactgttccgctcagcatcacggaaccttcggccgtaagttccgccgtgtgcagcgttgcgttgaaccgttcggcggtatgcggatcgcgggcgaatccggcgagcgcatcgttgcgcatcgttgcggggatggtcagcgtcagcgaacggccttcgcgggcggcctcgacgtcggcgagggtcgcggcgtcgtatcccggcacggcaatccgctccgatccgaggtcgcacggctttccgtcgatattcagttccatggcatgcgggttttgcgcttggagcggatttcgatttcgagacagctcaccgccgcgtggcggtgtacgacggccgccggggttgttacgtcgaccggcgtatatcccccgtcctccgccagccatacttcgggcgaagccgtgatctcgctgagggtttcgagtacggcccgcgtctcgtaagccgatacgagcgtcgtccgccgttcggtgcgggccgccgccgtgaggtggccgtcggttccgtacgccctgtccttaacggtctcagccgtcaccgatttttcgatcggaaaggtgtaatgctcgatgctgcccgcactgctgcgccatgcgagcctgcggccgccggaaacggccgggaccaccgtgtaggagaccgagccgcatttcccggcgtccacggtcagcgtttcggcgtccggaaagtcgcgggtgtcgagccggaagacgagcactccgccgctttttgtgcggtagctctcggcggttgcggagtccccggcctgcgccgtgaccgttatcgtgcaggcttcgtcgcagagcagcgtcagctcgtcgctttcgcccggcgagatcgtgcggacggagggcatggccgtcagcagggcgggggccgcgacgatgttgcggcggggcaggaacgtgcgttccggggagacggctttttcgccgtttgccggggccgtttctccggccggggtcatgccggcctcgacgaccgccgcgatgcagcggccctcggcgacgtggaatccggtgctcccggtcacgggcgagaagcggatggcgcggcgcaggcagggcgcggcgtcgaacgagaccgacgcgcttcctgcgaaacgtcttgcgccgatcaggtctgcacttccggtgtcggtgatgcgcaggtcgatcgtccccgccgccgcggccgtgaccgtgtagcgaagctctccgccgagcggggcgtactgttgcggaatttgtgtgaatgtcattggatcgtgttttgagagatgtcgttacggcggagacgcgccccgccgccttttgcggctttctcgtgtgcggacagtgccgtgccctgagccgggccggggcggtgtcgccgcaagaggcggggcgctccgaatcagaagaaggttacgatgcgcgcggcggcggtctgcgagatttcgccgtgcggcgtaagtgcgaaggcacgggggcggaccgaaagcccctcgacggcgagaacccgttcgtcgagcgaaagcgccgcgaagatttcgagcagctgctcctccatccgggccagcgcagcgcgccgctccgtgggggagagccgtgctccggagcttaacaggtggagcgtcatgtcgtacgtcgcccggccgtggccgcgtccttcgacggcgtgcagttcgaggggcgcgagccatgccgccgggtagctccgcacggtgtgggccatgccgtcttcgggtcccgtgtggaaagcgtaaccctgctgcaccgcgagcgcttccgccgcaccttcgagatgggtgcgattcattgttgacaagtgtttgaaagattgttgaaaaacggtaataacaattcgtaaggggctgataaagaattttgtcccgttgttgataacccgtgcacggtgcaccgtgcggtgtgaattgtgatgcaaatatacatcggcggatacccccttgtcaagaggtcggggcactttttctaaattttatggaaaaactcccgatttttgattacctttgccttatcgaaaccaacagttttataccttatggatgatggtcatagttccacgtatagcggctgtgtcgtatctcaatacgataccgttcatctatggtatcgagcacgaaggtaacctgcgtgccgaactgctgttgtctccccccgccgtctgcgcaaagaatttcgccgaacacaaggccgacatcgccttggtgcctgccgccgccgtgccgtcgctcgccgacgccgatatcgtcaccgaatactgcatcggcgccgccggtcccgtgcggacggtcgtcctgctgagcggcgggccgatcgaaacggtgcgccgggtcttcctcgacgcccattcgctgacctcggtgcagctggccggctatctgttggccaaacactggaaggtctctcccgaatactatacgttggaggattacgcgcagctggaccgcgccctgccgggcgacgccttcctgctgatcggcgacaaggttttcgactacgagggccgcttcgcctattcgtacgatctggctgccgagtggaaaaaggccacgcgtctgcccttcgccttcgccgtctggatcgcccgcaagggtgtcgatcccgatctgaccgaagggttgcagcatgcgctgactttcggcatcgaacacacgtacgaggccgtcctcgaacacggcttcgaccgcaaaccgtacgatgcgtacggctacctaacgcagaatatcgactatattttcgacaatcagaagcataaagcgctgcaaaagttctggaactccggcatcaaggtgtctccgagggccaatcccggctgaagagcttagcggacggctgtccgcctctctgccgaacgggattatgaactttaagaaggagagcgttttatgattacgatttacctcaagcaatacaacaagattatccgcaatgccgacacgaagctcttcgacgagctgggttacgacgacattttgtggatcgacatgcttctgcccacgatcaaggagcaaaaggccgtcgagaatttcatggagatcagccttcagaccaaacagcaggtcgaggagatcgaatcgacttcgaaatactccgaagacgagaatgccatcatctccaactccaacttcttcgtgccgacgggcgacacgttcatcgtcgaacccgtgtcgttcatcatttcgaacgagggtgtgctggtttcggtgcgcagtgccgaattccggactttccgcgagacggagaagcgcctgcagatgaactaccgcaactattcgacgggttatcacctcttcatttcgctcttggaggtgcgcatcgacttcgacgccgacctcgtggagctgatcgccaagcaggttgcggcgctctcgaaggacatcaactccgaagattcgatcgacaaggccgtgctgcaccgcatcagcgccctgcaggagagcaccatgtcgctgcgcgagaatatcttcgaccgccagcgcgtgctgtcgggcatcctgcgctccgaacgcttcccgaacgacatctatccgcgcttgcagctgatgatcaaggacgtgaactcgctgatcaaccatgccgacttcagcttccagcgtctggactatattcaggacgccgcgctgggtctgatcaacatcgagcagaacgagatcgtcaagatcttctccgtggcggcggtgatcttcatgcccgcgacgcttatcgcgtcgatctacggcatgaacttcaaattcatgcccgaactggactggaccctgacgctctccaacggctggaacattccgctgggctatatcttcgccatcggcctgatgatcttctgttctgcgctgaccatctggtacttcaagtacaagaagtggctctgaagacacgcccgcagagcgggcgcgctcctgcctttcccgttactccaccagccgcacgaaacaggcgtcgcttacgtcgccggcgttccagtccgataccagaaatgcgttgtcgttgaaactgttgaagtcgaacgtggagacgtttatatcccatgccgaagttcccgaatcggaccgtttgttgacccagtataccgctccgaaattggtatatacggtatagagcatcgggcggtaatgaatgtccgacgaggtgtagagcgcgcctcggttggcatagcgcagcacgccgcgtttgccgccctcctgcgcgcagttcttgcgccgtccgtatccggaagccccgaccgggaagaagaggttcgcaccctctccgcctgaattcgtactccctttggggttgtagacgaaacatccgcgcatgcctttgttcttgttgctggcgttgtaataggcgtagctgtaaatgtctttcacgtcgaaagaggtttcggtggattcgtcgtcgtaaagcacgccgtatgcgaactggcagttgagttgcagggtgtggaaatcctcgtattcggctacatggcagttggaattgccgttgatggtctgtttgcggtcgctgaatccttccgaagcgcggggcctgttcgtgatctgcgtttttcccgcgacctcggtccatgtccccttctttttcgattccaagggagccagatcgaactcggtcgtcgcatggtccttgaaattgtcgaatacgttgttggtcgcgtcgatgggctggtcgaaattgccgaagcggaacagcgacccctcctcgcacggcgacttcgcttccgtgtcgttgtagcaaagattgaaacagtgccatttggcatcgcccgcgatttggtcgggagcgtagccctgacggacgaagatccggtggtagcaggagtagttgtgataacgcaccagaatgatcccgtacctgcattgatccgcgtcgatcgtgccgtccggctggtaggagaaacggatctcggacccggtggctcctttggcccgccctccgagtacgccattgatcctgatccagtcgccgccggtctcgatttcggcctcccacggcccctccgattcgaacggaaggtattgtgcggcggcctcgttcttacggtgtgtgagcaccacgttgaacggtttgtcgttgttgtgacggcggtaaatgcccttggggttgatgacgcggcggacttggaatatcgttacggtgtccaccgtaggttcggagtgcccctccagctggacggtcagtttcacctttgccgagcgtctgtatgaaaaataggggttgttgcccgaaaatccggtcgtactcaccagctgcaatgctctggtgtaacacggaatctgcaagacggtcctctctttcgcctcgtcgatcgtgacgatgtagtcgccgttgttcccgccgtcgatcgtgccgcttttcgaaagctcgtactcccggtatccgcggggcgcctgccctttctcttggggaagcagcagctcttggccgtatgcctccagactttctcccgacagggccgttccgaagtctttctgaagccagtaaaagtagttgtagccgctccagaaagatttgtcgcgtccgatccagttgatgtgggtcgctgccagcgacagaaatccgttccacgggccgtctttgatcttcgggtggtcgggatccgcattgccgacattgcccgcagtggggtttccgctcagggtgtagacctcgtcgcggtagtattcgaactcgtcgccggcttggtaaggcccccagttgttctccacgatttcggctttcagatttccgacgggtttgcctttgatcttcaccggaagcatcatcgagtgatcgtacagataggagatgtaatagggattggggacgtaaatgccggggtcctcctgatagtcgatatgccagtccacgtcgttcgcgctgccttggaagcgcatcgtgagcttgtagtggaaattgcgttccgcattgtagtcgtcgtcggcattcttgccgagcatgaaccggtagaagatcgtaccttttccggggttttccgcggtgttcgagatatagaatccctccacttcgatataggtgccgcagggcttgccgtcgcggtatcccggatcgtcggggtcgttgccgtccggaaaggatatgtgctggttgtcgcccgacacgtcctgccatttgagcttgccctttccttgcatgttttcgtagaagaagagcgaccgggcgtcgttggcgtgcagctgctccttggattgggcggtccctcccaaggggttggagccttttgtcagacgcggccactggttgaaatcggttccctgaccgtattcgatcgtgtcgcccgcgaaccatacgtcgttgtcggggtccttgatgcgctgttcgtcgtttgcgtccagcagcgtgcaggaccggggtatgttgtgtatgcgcgcggacttgatgtaaatgtagacgttgtcgtagagattcttcgtgtcgaacgatatcgtgaccttcgatgccagccggcgcagccatgcgtggatcgtcggcttggccgaattgatcgtcagcagcggcgctttgccccggaccgctccggattccggtttgttggccgtgaagtagccggacatctgatcgttgttccgcgtcagttcgggatcggtctcccatgccggggcgattcgtctgaaatcctcctccagagcgattttttcggcatatcgggtgtttgccgcgaggtcgcccatgttggccacggcgtagatccggtaacgtccgtagggtatgttgtacgtgaattcggcccgctgcgtggtctgctcggtcgggcttccttcccgttcggggttcgaaatcttcatctgctcccgtgtccggtaaccgcttcctgcgagcgagccgtcttcattgtaccatgcgatgaagatatcttcgatttcggcgatctggtcgcctttgaggctgcgggtttttccgagggagaggttcgaaagggcctgaaaggtcacggcgaacgatacgcggctttcgcccttgccgatcggttccgcctccgcgtccaagtcgtcgcgcatacaggaaccgaatccgaacagcatgccgcccagcagcaggtagtatatcgctttgcttttcatccgtttcagtcgtctgtttagggtaacagtccgaatccgggatcgagttcgaccagctcgtagggaaacacctctacgacgagatccggttcggatgtcttcgaaatcgagaatttgtagtaatagttgcgccggatgtcgaacggatctccgacggcgcttccttccggcggtgcgttatagtatttgaattctacggtatactccttgccgggcgcctccttgaatcggacccgcatttcggctgcgtcggccgctttgcggttcgcggtccctgccgcgacgttccggtattcggggacgtaggcgacgaaacgcccgtccgccgtccggtcgaatgcgcgtattttcggggcctcgtcgttcctgccgtccggcagatgcacggtgtccgtgtagtcgccggcgtagtttcccttgacgtagtcgtcctgcgagtagaccccgctcggtgcgcaatatcccgttgcgttgtagcggagcagttcgaccttttcgagcgtccagcccgatgtcttgcagctcacctccaccttggccatggcgcgcagcaggtggacggttcccagatgggtcagcatccccggtgtgaacgtcatctcctcgcagctttttacgccgtacatcggaatcagccgttcgcgggacagagcgaacggtgcggagaacgtgtaacggctgctttccgccgtgcaaagctcctcgatcgtcgtctctcccgccgtcatttttccggggtaggagggccagttcgccaatgcgacgatcttgaaattcgcgggcggcatcttgtccgttttcccgaccacttcatacgttttcgaccggtcggaatcgtctccgtcggggataagctccacggtctggaacgcggagaggtatcggttctgcgcatcgaaaaagaagaatctgtaattcccgttttcgaggtcgatcccgttctcgaattcgctctgcgtgccgtcgtcgtacgagccttccggcgttccgcccgcccgcgtgccgttcgtgctgccgagcgcgatgcggaagcttacccgcacgtcgtccggccgctccgtgccggttccggggaccggctcttcatgtccggtccggcggcacgacacgagcgtcgcgccggcgagcgtcgcgagacagatgaaaatgcgtatgattccgttcggtgacatgtgcgtaaattgtcagattcccgtattctgccaaaccattttccacgaatggatgttgatgctcatgctgatccagcgcattccctctcccagcacgcatacgatgttgtattcgtccatgcggtcgaggaattcctgatcgtccatgtcccggcggtattcgcctttgaccagcagggcgtagtccaccagcggaatgctgagcacggtctttcctgtgtcgttgtcgcgcaccgtcaatctcatcttgcgctcctccggcagttcttccggcagcagcgccggcgtattcgctccggttgccgaccggaacgtcgcgctcttgtcgcgcaccgtcagccgtgcggtggtcagctccgcgacaacggcattgaccgacgtcacggcgtcggggaggtcgggaagcgccgtcccggccgtcgcggactgtttgtgccatgcatgataggtcaccggttcgtccggcagcaactggttgtcccagtccatccggccgttttcggcggtgatccggaacgagaaacgcttctcgtcgagccgctctcccgacgtctgctgcaatacgacgcgaacgttgttggtgttcttcacgagcggtacgacgtaggtgtaggtgccctccgtgtcgccgaaggtctgattcggcagataaccgtggtagagcctgtcgaggtcttcgcggacatgccccgtcccgtcggatccggattcgcgcttcagcgtgcaggtcagctccttcccggatgacgattccgggattctgaacgaacctttgtccgtcgatccgcaccatgccagcaggtcgtaggttcccggagcgacgtccacctccatggcgtatccctctttgccgagggcttcgccgctttccgtgcgctgccagaccaccctgccgccgccgtcgagcagatagagcgttaccgactcgacctcgtgggcgaatgcgtcggcgaatttcaggttcatgtcgtagcggaacttcacccggtaatttaccgaacagtcgccctcgccgtcgtagatcacgctgtcgcagcccagcagcgtcagggcgcagacgatcgccgcgagcgtccttttgcctattgcgtatatgtaagacgatgtgcccatctctgtcactctgtttagttcatcgggtccggaccggggcagccccttccgcgaaggggctgccggaaactacaggtttacgttctggttgacgattttccatgagaggatattgatccgggcgcctacgtaataggtatccttttcgtcgttcttgcccggtacgatctcctcttcggggtcgaagatgcctttgccgatcttcgtgagactgttgacggtcaccatatagtgatggttgcggacgatgccgtacttggcgacggggatcacccgtttgttttcggcgtcggtggtcgtcgcagcgttgttcaggtgctcgatcgggatgttgtagtacatcaggccgtctttgtagccgatcgcctcgttgtaggcgttgaaatccttcatgttcttctcgacctcgccgagttcagtatcactggccggggcatacgtttcgcccgactttctgtacagcgaggtgcctgcggcgagcggtttcagtttcaggtatacctttccgtcgcggtcgttggccagctcgacgcagtcatgatctatctgcacgtattttccggtcgcctcgtcttccagacagtacaggttcagcttgttccctttctgaagcgtgttgagcacgtagttcaggtagtcgttgcgtttgtagagcgttccgttgtagcgtatcatctccagcggctgttcgttctcgtcgaggatctgcgctttgagcaggatgctcgtcacggccgagtggagatactccgatacgatttccgacgtgttggagttctcggcgcagtaggctgactgcccgaattgtttggtaagcttgtcggcgttgatgtaattcaggtattcggcgactgcggcttctgccgaaacgtcgggatacttgccgtcctgtttgccgtagttgtaggattttccccagtagctgcggaacctgaccgcatcgttccaagcgaatccgaggtccgtatccgaccacgtggtttcgatgttcttgacgatgtaggagtccttggcggtggcgttcagcccccatccgaggaatcggacgtagatgtcggccgctccggtctgcgttccctgctcctgtttgttggggtctccggcgacggtcaccttgatcttgtagattccgggtttcccttcgaccggaacgagctggtcgttgtccacgcgcagggttactttcgccgccagacgctccacgtagatgtctacgggcgttgcgttctgcgcctcgtccagctccttcttgaagtccgattcgctcacctccgtcacgaagtagggaaccgtcgccgacgtgcggccgtagctggtggtgctcatggtgaagtgcgacccgttgtagatgctgcctgcaagcagtgtcttcatctcgtccagcgtgtttgccggctcgaaatcctccggcgtgttgagcaccgtgaccaagtgtttcgggtggttggtttcggtcaggcctttcagcacgatgaccgattttccgaagaattcgatgttgcccgcggggttgtcctcattctccgtgccgctgtcccagacgtttgcacgggcgatgaatatgccgttcgtatcgtagaagaagaagtcggcgttgaccacttcgtgctcggtcgcgtcgccgtattccaagtcgcctccggtcgcgcgcgtggagttcgcgtcggtgatgttgactctcagataggctttcccgtcgaatgatccgggtttgttgctgttttcggactcttggtccgaacaagcgcagaatgctccgcaaacgagtatcccgcaaaggatgtttttcagtttcataggagatgtgattgaagttttattttttgttctgtttttgcaactgttccaaagcctctccggcctcgcgtatgccggccttctcggcttcccgcagatagccggcggccgtttcgtactcctcggtgagcatggcgtatgcgccccgcgcatagagggcttcgggcgactccccggcttttcgcaggtagtgttccgcgtttttcaggtcgcctttctgcatggccgtgttcgccgcgttgaggttcgccgccgtatcttcgggatacatgcgtacggccgtttcgaatatttcgttgaattcgtccgaaccggggctgcaggcttgtgcggccaagtagaattcgttgagactcagtttctgcggctgtgtgagcatgatgcgccggatctcctgcgcgtcgctgaacgtgcggacggtgtacgtgatccggtagtccgtgtggcgcagcgcggggtagcagtttttcagcaggaaatcgtactcatcgggataggagcgtttgattttcgcctccttggcgtcgggttcgagcgaactgtcgatcagggcgagtatctccgcgcggtgcgtcaggttcgagcgttcgacatagctgcgcagtccggcccagtcctccggttcgtaatcggtttggatgatcccctcttcgaagcggtagagctgtccgatatgctttttcagcgcttcggtgcggcctatggccagcatgcggttgtgcgtccacggactttcgggcgatgcgtagcctttgagccataccgacgtgatggtcacgtcccggtcgttgcgtaccgaatcgatggtggcctctatcctgcccagttcggccgtattgcggcggtagtcggggtagatgacggtcttgttcaccgggaagtcgatgaatgcggacccgctcagcgagcggcttttgacggtttcggccgccggacggacatagaccggccggggagtgtaggggacgggttcctcgaagtgccccagcaggccttgttgtgcggcgagcatcgtgttgcagcagccgtaatcgcggcgggagagccggagcgccgcgccgttcatccattcggcgtatggcacgatgacgtgataggctacccgttcgggtttttcggcggccttgaagcttgtctcgccgtcgcccgacagcatgccagccccgtttctcatataataatagtagcgtcgccggccgtagatgcctatggcggacaggtcggccgaatcggctccgttcacgagccggggtgtcagaagtacggcgcggttcgcctctacctccagccgggagagttcgacatccatctccacgaccagatattcgccgttccgatccatcttcaggctcccgaccgagaccccgtctacctcttgagcgtgcagcagcggactcgttcccagcagcagcgacaggaaaaaaatcgttcgtttcattgcagcgagcatttagaatacgtaaaccagattgacggccgctttggtcggccccacgtaatgatgcggtttgtccttctcgactctctttccgcagcctacgcatcggaagctgtcatattgcgtgtaggcgtatccaacgcctatttcggcttcgagattccagtgccggccgagtatccaagcgtatccgtaggcgacgccggcgcctatgaaccagccctgatagcggtagtcggagagtttcgagaggtcggaaccgaggaatgaaatcccgtttttcacgcctccgatgttgtactgccctccgtgtgcgtggaaacctatgaaatgtcctgcgaaacggtcgcagaaccataaccgcgcttcggggcgcacgagccagtgcttccagcggcgtccgtgcgacagtgtccatgcgttgaaatcgcccgtgatgtccagtgtccatttcggcgccagtccggtttccacaccgaggtttatgttcatgaaagcatcggacagtacgtttgttttcaaagctacgctctgcccccggacgttccatccccagagcgatgcgcataacaaaagaaagattctgaatttcatggccgtatcttcgatcaggttcgtctgcatgcatgtatacggatcatcctcaaacggacgctcccggaccgtattctttcggatacgtgccgggtttcggaactcggacaactgcgtatacaaggttgttccatagggcaattcttcgatatgccgtttcattcgagatgagtatccggctgatattcggcaaattcccccccccc

SEQ ID NO: 12086 - DNA, 50239 bp, Unknown
  gut microbiota DNA sequence
ttttcgttcatctacaaagaggttctgacaaaacccagaatcgaataaacgaatgctttaccccacacttgaatagatacgaaaattgcggcgcaaaattgttttggccgaatctatctaaacaagaaaatgagtgctgttcattgccccgattcacgttgaaactgtcagatttctttgtaaggacagagtgaaaaacactttccgtatgtctgtcggtttgcgacaggacaaaattagaaaataattttcggattgaacaacactcattatggaaatttcatgcaaatttcataaaaaagtattttttctgcaagaataaaagatattgattcacaattttgtttatatcattttgggcggaaaatacgctgttcggtccgattgctgccggaaacggtttcggcccggttgtcaggggctttgtccggcttccggggcgtttttatcttgccttgccgaaagaaacggcattatgcggggtttccggctaaaatttgtatctttgtcgggcgcaaagcccggcgtgcaatatctttgtcgactgcaaatcgtctgccatgctcgaaaaattggccaaacaaaccgccgtctacggcatcagcaccattgtggtgaggtttctgagctatctgctcacgccttactatacccgtattttcgggcaggagacctatggcatcgtcacggacatctatgccctcattccgctggcgcttacgctgctgacgatgggcatggagtcgagctatttccgtttttcggccaaggccgaggaggccgggggcgacgttcgggccgccaaacgcaggcttttcgccacgacgtggggcgttacatcgctcgccgccgtggtgttcttcgtgcttgtcgcttcgttccgcaacggcgtcgcggggctgatgggcgaggcttatgccgcgcatcccgaatatgtggtctgggtggggcttatcatcctcttcgacgtctgggcctgcatccccttctcgcggctgcgcgagcagggacgggcgctgctgttcgtcggcatcaaggcgctgaacgtggtgatgaacgtagcgctggccgtcgctttcggcgtcgccgggcttttcgctacggaattcggcgtcggttgggtcttcgtcgccaacctgatcgccagcgtcgtgacgtggctggtcatcctcgccaccgtggaccgcaccgtgcccaagatcaactgggcgctgctggccgcggtcttcgcctattcgctgccgctgctggtcggcggactggcgggcacggccaacgagttcatcgaccggcagctgatcaaatacctcgtgcccgaaggagccatggcgcaggtaggcatctacggcgccattacgaagatcgccgtggtgatgatgctcttttaccagatgtaccggcttgccgccgagccgttcttcctgtcgaatttcaagaagtcggatttcgtgcagatgaacgccgcggcgctgaaatactacgtcatggcttcgatgctgatttttctcggcatcgccttgttccgcgacgttttcgcgctgatcgtgggccgcgacttccgcgaggggattttcattctcccggtggtcctcggtgccaatgtgctgacgggcgtctggctgaacctgtcgttctggtacaaacgcgaggagaagacctcgctggctattgtggttacgggcgcgggtctggtttcgatgctggttttcggcttctggtgcatccccgtctggggttactacggagccgcatgggcgcggctggcgagcgaattgacgatggtcgccgtgagctggtggctcaaccgccgtttctatccgacgccctatgactggcggcgtatcggcgagtatgtcgccgcggcgctcgcggttttcgccgtgtgcgaagccgtgacggcctgcggcggcaataaattgatcgcctatgcgtttaatatagtgctgtttgcggcctatgccctctacctcgtccgccgggaacggatcgacgttgcggcactggtgaaggcggccttgaaaagaaaatagaagggctggcaatgcgatgagacaaagtgcaaaagagaagatcgtagtgctggcggtgagttttgcgctcttcgtcggcggggtgctggccctctcgatggaccggggcgcggggcgtacggtcgtccttgcgtgcgtcgtgctggctttgctggccgtcgccgtgcggcagacggttttgaaaaacggaaaaaagaagtaacgagacatgcggtttgcggatataacgggacaggaggatttgaaacggcatctggtgcagagcgtggacgccggacgcatcagccacgcccagctcttcacggggcaggccggggcgggcgcccttgcgctggcggtcgcctatgtgcagtacctctgctgccgccaccgccgcggcggggattcgtgcggcgagtgtcccgactgcaagcagatcgctgcgctggcccatcccgacctgcatctggtcttcccggtcaacaaacagggcaagaagtcgggcgaggtgatgcgcagcgacgagttcctgccgctgttccgcgggcttttcgccgagcgcggcggctatttctcggcgcaggactggtacgaccggctcgatctgggcaagaccctcaagggcatgatcgctgcgcgcgaagccgacgacatcatccgcaaactgtcgttcaagagcttcgaagccgactataagaccatgctgatctggctgcccgaagcgatgaacgaggaggcggccaacaagattctcaagattctcgaagagccgtgggaaaagacgcttttcctgctgatctccgaacagcccgaacggctgctgccgaccatcatttcccgcacgcaggaggtcgccgtaccgcgtatcgcgcccgatgtgctggagcgcgcggcgcaggagcgtggcgttacggacccggtcaaggcccggaacatcgcccgtctggccggcggcgatctggtggaactgcagcacctcgtggccggtgaaagcgacgccctgcgcaaagagaacttcgaccttttctgcgggctgatgcgtttgagctacaacgacaagcatctggagctggtgacgtgggccgaggaggccgcacagctttcgcgcgagcagcagcgggccttcctgcgcgacgcttcgcgcctgctgcgcgagagttacatgctccatgcgggcataaacgaaatcagctacctctggggcgaggagctggctttctgttccaaattcgccccattcgtcggatcgcagaacatcgaaccgctcattgccgagatcgaatgcgctttggcgcagatttcgcagaacggaaatccgacgatcgtattcacccattttgcgctttcggtgagcaaaatgataaaacgactttgagttatggcacgtgtagtacttttgaccggcggcaattccggtgatgtgaaacggacgcttcaggcggcccagcagctcgtcaacgcgaaggtcggcgccgtgctgcgctgttcgcaccgctacgaaaccaagccttggggcttcgacgccgacggggttttctccaatcaggcgctggaggtctcgaccgacctgctgcctttggaagtgctcgacgctgtgcaggccatcgaacgggagctgggccgcaaccgcgccgccgaagccgtcgagaaagcccgcacgggcgtgaactatacctcgcggccgatcgatatcgacatcctcttctacgacgacgaggtgatcgacagcgaacgccttaccgtgccgcatccgctcatgggcgagcgggagttcgcactcgtgccgctctgcgagatcatgcgccagcgccgccatccggttacggggcggaccgtgggggagatgctcgaagagcttcgtaacaagtaaattccggagatgaagacaaaacgaatcatactgtttcttgccgcggccgcgttgtttacggggtgtttcaaagacgtctcgtacaagacgacctatgtgttcaagccgctggagcaggagaaatcgggcgatcccacgcagattcttgccgccgcgaagctctatgcctttgcggccgacacctcttcgtgggaggtcgcttcctacaaagatgcgctcgcgggcgtaatttcgcagcggggcaaccgcaacgaaaagatctccacgccgctcgctgcgggcgaaccctatgagcaggagggcgtcgaagggctgctccagatgtcgttcgacagatcctcggtgatggtggttgccgtggacacgaagaatgaactttacggctatacgcagcaggaagtgccggaaaacacccctaaaatctatgtcacgctgattttcaagcggtggaaacagggttactcctacaaagacggcaagtggctcatgttcaacgattcctatacacccccgatctatatcgacagccaagtcaccgcgcagcttcaggccgaggagggcgccgaacccaccgtgccgtccaacctcagggtttacgcctatgccgtcgatacgaccgcatggaagatcaactcttacaacgatgcggcgcagcggatcattacctcgaagagcgatcccaagcagacgcggaccagccccgacttcgaagcctattactccaaggagtcgggaacctacggcatgaaggtcagcagtccgacgctgatggtggtcgtgaccgatcccgtcaaccagctctacgcctactcgcagcaggaggtcgagatcgtcgagggcggccagcccgtaaacttccttccggtcgttttccgcccgtggaagcaggaatacctctatgtcgaggagggcggctggcgcgtggtcaatgacaaactggctcccaaggagcctgaaaaagcaagcaagagataacgatgcagacccgtaaacgaaatatcctgcgcctgctgcgcgccgcagtcctgctgctcttcgccacggcgttcctgagccgttgcgcgagcatgatgacccccacgggcggtccccgcgacaccctgccgccggtcattctgaacatgacgcccgacaacttctcggtcaaccggcccaccgtgcaccatgagaagatctacatcgaattcgacgagttcgtgcagctcaaggatcagcagaaggagttcttcacctcgccccagatgaagaagaagccgctggtttcgatgcgcggcaaaggcatcgtcgtccagctgcgcgatacgctcgaagccaatacgacctatgcgctcaacttcggcagcgccgtgcgcgacaacaacgagggcaaccccctctattcgatgcgctatgtcttttcgaccggacccacgatcgactcgatgatcttttcgggctatacggccgacagctacaaggccgactcggtgtcgaagtcgttcatctggttcttcccggcggattcggtcgaaaacgtggccgaatacgactcgacgatcttcaagtacaagcccgccgtaatcgcccgcgccgaaaacaacggcatcttcatcgcccagaacctcaagccgatcccctaccgggtttacgccgttcaggacaagaacgacaaccagatgtacgaacccggttccgatcaggtcggcttcctcgaaaagagctacaatccggccgagatgcccgactttgccatgtggtacgattcgatccgccagtatgtcacggccgagcctcagctctatctgcgcatgttcaccgataaggcgttccgccgccagctgctttcgcagaccgaacggcccctgcagcacaaggcgatgctctacttcggagctgcgcatccgcgcatcgaacgcatccgcttcgacagcattcccgaagaccgcgtcatcgtcgatccgcagaccgtcgggcgcgacaccatcgccttgtggttcaacatgccctcttcggcgttgcccgatacgatcaagggtgaaatcacctacttcaagcacgatacggtcaatgtcctgcaggaggttaccgaaccgctgaaactctcttggcggctgatcgagaccaaggagcaggagaaggagcgcgagaaactcgaacgcgaccgccgcaaggccgaggcggccggcgaggagtgggtcgaacccaagaaggagaatcccttcgcctataagcttccgctcacgggcgaaatcaatcctgagaacaacctgaccgtcgatttcgactatccgcttacccggctcgactcggcggcgatgctgctgacgctcacccggcccgacaacagcatcgaggacgttccggtgcgcttcgtgcgcgacacgggcctgctgcgccgctggcatatcgaggcgccgtggacgagcggcggacaatatacgctgaccattcccaagggcgccattaccgatgtcgcgggcttctccaacgactcgatcgtcgggaaatacacggtgctcgatcccgaaaagttcgccaccgtgaaaatccatgtcaagggcaaggacgacaaggccaaatacatcctccagctgctcgatggcagcaatgcgctcaaacaggagaaacgcgacgtcaccaccggcgactggcagttcaattacgttcctgcgggggagatcaaattccgcatcatcgaggacatgaacggcaacggcaagtgggatacgggcaacgtggtcgagcggctccagcccgaacgggccgaaatctatgccaacgacgagggcgaagacacctttgcgaccaagaccaactgggaggtcgaattttcgatcgacatgaaccgggtcttcgctccggtgacgatggagtcgctttcgcgcctgctcgacgagcgtgaggcgcagcgtctgcgccgcgaggcggagaaacgcgccaaggaaccgaaaaccaaccgcaacagccacgaccagaacaaccagaacaacgccaacggtttcggaagcttcggcggtttcggcggcggcatgaacaacagcatgaactctaccggaggcatgtttaaccgatagcgttatgataaagagacaacttaaaaccctgctgtttctcgcctttgccgccgttgcgtggcagggcgcgtcggcgcagcatacgctcggcttcacggcgggttacggcatggccagctcgcggctcgaccccaagcaggagatgaaggctatatggggttcctacaccgccgggcttacgtggcgctattacggacagcagcgtttcgtgggcggcttcggcatcgacctcgaattcctgcagcagggattctcgctggccaccaacgcctcgatggtcgaggagaagaaggattaccgctactacacgcgcaacgtcaattcgatcgtgctgccgatcgtgtggcagccccacttctacctcttccgcaatcatgtccgcgtctacctcgaagcggcggcgactttctcctaccacctctcttcgacctatgagaacgaggaggcgaaagcttcgggagcggccgactggaagggcgactactccttcaaactgccgcgcgacaaccgctggggctacggactcgcgggcggcggcggtatcgcgctgctgatccggcgtttcgagatcaatgtccgcgcccgctactatttcggactttcggacattgtgcgcaaccgcaacaaatacgccgacaacggtatcgacggttccgaaaacccgttctgggcgacgccgatgcgttcgccgctcgacaacctcaccgtttcggtcgggttgagctaccgattcaacaaggagggcttctcgacgtggaaaccgcgtcccaagcgcgaaaagaaccgcgaagtcttcaaatacggattataaaatttcaccatcatggaaacgacaagacagcagaaaatcgccaaacagatacagaaggacgtcgccgaaatctttcagaaggagggcgagggcatcgtccgggggtcgctcgttacggtcacggccgtgcgcgtgtcgcccgatttcggctacgccaagatttacgtcagcgtcttccccttcgggcgcagcgccgcattgatgcaggagcttgaccgcaacaacaagttcatccgccacgctttgggccagcgcatccgcaatcaggtcaagaacgtgcccgaaatccagttcttcctcgacgattcgctggagtatatcgaccatatcgagcaggcgctcaaaaacgactaacccttccggcctcacgccatgctgccgcagttcttcgcccgccgctacctcttctcgcccaaatcccgatcggtcgtcaatctgatttcggggctgagcgttgcggccgttgcgatgcccgttgcggcgatgatcgtcctgctctcggtcttcaacggcttcgagagcctcgtcaagtcgatgtgttcggccttcgacgccgatctgaccgtctcggcccggcaggggcagacctttgcggccgacgcggtcgataccgcggcgctgagacgcattccgggtgtggccgccatgtcgttcgtgctggaggagagcgccctgctggaacacggtgaccgtcaggccaccgcgacggtccgcggcgtcgatgacgcctacgaagcggttttcccgttgtccgacgccgttgctgccggagagtaccgggtgcgggtgggcgatctcgaacggctcgtcatcggtcagtcgatggcctacatgcttggcgtgcggatgctggctgacgccgacgtcggcgtttacgccgtgcggcggggaagcttttcgtcgctgctgccgttcgacaactatacgcggcggacgatcccccttggcggggtctatacgctcgacctcgaaaccgaacggacctatgtcctcgcttcgctgcgcatggcgcaggagcttttcagccgtcccggccgggtttcggggctggtggtgcgcctgcgcgacggcgccgatgccgtgcaggtccgcgacgccgtggcgcagcagctgggcggcgattaccgggtccgcacccgctacgaattgcgggcttcgttctaccggatcatgacttacgagaagtggggcatcttcttcatctcgctgctggttctggtcgtcgcttcgttttcggtcgtcgggtcgctggcgatgctgatcgtcgagaagcggcgcgacatcgggacgctgcgcgcgctgggcgccgatacgacgctcgtgcggtcgatattccgcagcgaagggctgcttatctgcgctctcggcgcggcgctgggcgtggtgctgggcgtcggtgcgacgcttttgcagcagcacttcgggctgatcgagattccggccgaaacgttcctcacgaagagctatcccgtcgaattccgtccgggcgacctcgcggcggtgcttgccgctttcggcgcggtggcctgtgttatttcgaatattaccgtgcgcagcatgataaaaaccaacgttaagctatgagacgtattgtccgcatattcctctgcatgttcctgctcgttctggccggagcctgcgcccgccacaagatcattcccgacagaaaactggcgcagatttttcatgacgctttcctcgccaacgcctatatcggcagcgaacaggtggacatcgattcgctgaatatctacgaaccgatcttcgccggttacggctataccaccgaggacgtctactacaccatcggcaacttctcgaaacgtaagagcgcccgtctgggcgacgtggtcgagctggcgatcgaaatgctcgaagccgagggcaaatattacaaccgcgaagtcgccgtcctcgatacgatcgacaacgtcgcccgccggagcttcacccgcacggtctatgccgactcgctgatccgcgtcggctcgctgcgcgatacggcccgcctgcggttctccgtcgacgtgcggcccggcgagtacaacctgagtctcaaatacctcgtcgattcgctcgaccgcaacgaaaagggcctgcggggcgtggtgtggctcgaacgccgcgacagcacccgcaccaacgtctatacgacgaccctgcgccgcgaccggcaggagaatttcacccgccgctttacggtcgataccacccaccggcggctatgggtcgatttcatcgagttccgcgggaagccccagcgtccttcgctgacggtcagcgacctgaagatcgactatacgcccgaaacctccgccgctgtggacagtctctacatgcagcagctcgacatccgtattttcgccgatgaattcttccgcgcagccatcccggcggatagcctctaacctgctctggacgccgcagggactcgtccgcaacccgctcgtcgaagttgcggcggatggtcgtgtcctctcggtggggacctgcaccgaacccgaccgtatgccgggcaccgagttctactccggtgttttggcgccgggactggtcaatgcccactgccacctcgaactctcctacctgcgcggcgcgattcccgaaggatgcggttttgcgggtttcgccggagccatggggcaggtccgggagcggttcggccccgaagagcggctgcgggccgtcgcagcggccgacgccgccatgtggcagggcggagtgcaggccgtcggcgacatctccaacggcgataccaccttctccgtcaaggagcgcagccgcgtcgcctatcatacattcatcgaattttttggcctgcgtctcgcgtcggccgattccgtgcggcccctgctccgccatccgcatacctcgctgacgccccattcgctctattcggtacaggatgcgcccctgcgggcgatcgccgccgagggcgacgcgccgttgtcggtccatttcatggagtcgcccgccgaatccgagcttttcgtccgccgcggcccgctttgggagtggtaccggaaggtcggtttcacctgcgacttcctgcattacggctctcctgccgaacggctcgtcgcatgcgtaccccgcgaccgccgcgtgatactggtgcataactgctgcgtcacgcagcgcgacatcgacgtcgtcatgaaccatttcacggcctccgtccggtggtgtctctgcccccgctccaaccgctatatttcgcgtctcgaaccgcccgtcgaactgctgcgccgcaaccggctcgacatctgtctgggcaccgactcgctggcttcgaacgaccggctgtcggtattcgaggagatgcgcatgttcccggaggtgccgctgcccgaactgctttcgtgggccgccgaaggcggtgcgcgggcattggatatggatgccgagctgggcgaagtagcgcccggccgccgctgcggactgacggtcatttcgggactcgactacgatacgatgcgcctgactccggcgtcccggatacggagaatcctgtaatataaaataaggaggaggcccgcaaagacctcctcctttcgtttcggatgttttccgtcctatttgttcaacgcattgcagatgcgttcgttgatcctgcggatgcgctccggctcgaccttcatcaccttgcggtcgtaggtcatcaggccgttcacctccacttcgacgtcggtcgtctgcgtgtagaccgccgctgcgaatccgcgcccgatcagcttgtagagcatgtcggcgtatttctcgtattcgtccgtcacctccttgggcgagttcaggcggacatagccccagttgcggtcgggttcccaaaggtgctctttcatcaccagcccgatgccgccgtattcgcccagcaccgtcgcgcggttggtgtcgagcagcgtcatgcgcgggtgcggatagtggtgcgtgtcgaggatgtcgcccgtcaggtagtggttgccgccgctggcgggattgaccagacgcgaagggtcgtaagccttggtccactcggcgatttcgggagccttgaactgtccccacgcctcgttgaagggcacccatacgccgatcgagggaaccgagtagaggcagtcgatgatctctttccactccttgcggaagttggcttcggattctgccgagcggtgtttctccgcgccgttgaagtagttgtgcatctgccactggggaccttggtcgccgttgggcatatcctgccatacgatcatgcccagcttgtcgcaatggtagtaccagcgcgccggttcgaccttcacgtgcttgcggatcatattgtaacccagctccttggtctttacgacgtcgaacgccagcgcctcgtccgacggagcggtatagagtccgtcgggccaccagccctgatccagcggaccgaactggaacagcggttcgttgttcagttccagacgtacgatgtcgttttcgtcgcggccgatcgagaatttgcgcatcgccgtgtagctctgcacctcgtccaccttcctgccgttgcgcaccagcgccacttccatatcgtagaggaacggcgatgcgggactccacaacttaggctccgccacgttcagctccacgggcgcaccgctgagcgcacggccctcggctaccttcgtgccgttgtcgtaaagacgcacttcgatcacgtcgcccggctgcgcgccgcaggcggccgtctccacgcgaaacagtttgcggtcgaggtcgggcgtggttcggatgttcctgatgtactgctgcggcacggcttcgagccataccgtctgccagatgccgctcacgggggtgtaccagatgccttcgggacggttcacctgcttgccgcggggctggcagcccgcgtcggtggggtcccacacgcgtaccttcagctcgttgtcgcccttcttgagcgccgccgtgatgtcgaattcgaagggcgtgaagccgccggtgtgcgttcccacgcagacgccgttcacccaaacgtcggctttccagtccactgcgccgaagtgcagcagcacgcgtttgccgttccatttcggggagatcgtgaaggtgcggttgtaccagagttcgttccggtcgcccagacgcttgccgacccctgagaggctcgactccacggcgaacggcaccagaatctgcccgtcgtatttttcgggtgtctctcccatcgggagaatcgcgtaattccaaagtccgttgaggttctgccagccgtcctgcacctgcgtgcgcgtcatttgcggacgcgggtattcgggcaatacgttctgcgggtcgagtttttcgccccactcggtgccgatgcggtcgcctgcgggctgccactgggccgcgcctgccagagttgtcagcagagccgcggcggtcaggagaatgtttttcttcatgtttcggttattatcaggttaatatatcgtttcaaacagtacaaatttaagtcatcttgccgggaaaacagtccgcatccatgcacaaaaagtatgtttgacacgccctgacgcctgcgaaaacgtattttttcgtactttcagctcccgcggccggatgtgccggccggggatgcggcatttttggacaaacgataaaaagccctatctttgtaaacgtctaaccggaaccgaagtggaagattcgacattgatagcaagggtgaaagccggcgaccgcggcgctttcaacgaactttacggcatctactgggcgtcgctcgtcaattatgccggcctgttcgtcggggacgacggcgcggaggatgtcgtgcaggacgtcttcgtgcgcgtgtggctccaccgcgacaacctgcgcgacgacggcacgctgcagggctacctgctccgctcggtctaccacgcttcgctcaacgccctcaagaagggcgccaacgccacggcctaccggtcgtgggtggcgcagcagatcgaacagagctgttacgcccattacgatcccgatgacagcgaggtgattcgcaaactctactcgcaggagatcgccggccaaatcgacgcggcggtcgagtcgttgtcgcccaagtgccgcgaggtgttccgcatgagccatatcgaaggactttcgaaccgtgagatcagcgaacggctgggcatcacgctttcgaccgtcgaaaatcatatctacaacgccctgaaacagctccgacaaaaattgagtcattataagatgttgattctcttgacaatgtatattctcggcagataatttttcatttttgcataggtgatttgtcccggcgaggtgtatttagggtagaaacccaatattccgaaccgtgaaacaagacgacacgaccgcccgtttcgacgagaaacagctcgctgcctacttctccggcaccgcgactcccgaagaggagcaggccctgctggcgtggattcgcagcagcgacgataaccgccgtacctttgccgagctgcgcgccgtctggcagcgcggccgcatgcagcgtcccgatacgcagctgcaggcccgtttcgtgcgttcgctcaacagcctcaaccggcggatcgacgccctcggcgccgacgccccgctccgcaggggccgtcgtattccgctgcgccgcttcgctgcggcggcagtcatcgtcgtggcgctcgtcgcggctttcatgacctaccgggtcgtcaccgcacctttcgtccatcgtttccacaacgccgataccgtggccatgcacgtggccatgcccgacggcaccgacgtctggctcagccccggtacgacgctctcctacgacgatacgttccgcatcgacggccgcaatgtcgcactcgacggcgaggcctatttcgacgtcacgcacgatgccggacaacccttcgtcgtcaccgcgcccgcattccgggtccgcgtattgggcacggtcttcaacgtccgctccttcagcggcgatccggtcgccgaagccacgctggccgaaggctccgtggccctgcagcacgccggcggccgcaacctgatctgcctgcatcccggccagcaggccgtctatgacgccgacgccgagttgctcgaagtcaacgaagtgcctgtgggcgacctgctgctgatccgttacggggtcgtcaccctcgatgacgtcacgctgcccgaaatcgtcgcgcgcatcgaacggacctacggcgtaagcctgcgcatcggggcgcagcagatacccggcgaacgctacaatttcagtttccagaaggacgcttcggtcgaggacgtcgtggagctgctgcagttcgtgtcgggctgtcgtttcgaaataattcagctgaatcgataaatagtaacccaaccccaaatccgctcagcctatggaacaagagtcttttgctatcctttagtccgaacccgccgttcggaccggccttaaaacaaacttcttcctttattctaatctgaaacataatgaaaaaatcgattacttcactcctgaaagggtggtgtgcggctctgttatgcgccggcctgacgctcccgtcgttcgcggcggccgatgccgacgcggctttcgccgcgcagcgccacgatctgaaactgtcgctgcgcaacgctcccctgcgcgaggtggtgacggctttcacccaacagacgggcgtggtcttttcctatgaaacttcgctcggcgaacgtactcttccccatgtggacgtcgcgctgaacggctcgacgctcgacgagatgctggcttcggtattcgccggcaccggcatttcctataagatcaaggacaaggtggttgctctgtccgcgcctccgcagtccgatgcgccggccgcgcgcagcgccgcgcagcagcggaagcagaccgtcgccggccgtgtgaccgacgagcagggcgaaccgctggccggcgtgagcgtgctggtgaaaaatacccttacgggcacctccaccgatgccgacggccgctactcgctctccgtttccggaagcagcgccgtgctggtcttcatgtacttgggattccagaccctcgaagagcaggtcggcgcccggagtacgctcgacgtgacgctgcgcgagaacaagcagatcctcgaagaggtcgtcgtcgtgggttacggttcggtcaagcgccgcgacctgatcggtgccgtggatcaggtggacagcaggcagttcgccgaacgctccaatccgagcgtctcgcgttcgctgcagggcgcgatccccaacctcaatatctcgatgcgcgacggcaagccttcgcgcgcggcgaccatcgacatccgcggtaccggctcgatcggttcgggcggcggagcgctggtgctgatcgacggcgtcgagggcgacctcgaaacggtcaatccgcaggacatcgccagcgtatcggtgctcaaggacgcatcgtcggccgccatttacggcgcccgcggcgctttcggcgtgattctcgtgactaccaagtcggcttccgaaggcgaggtgaacgtcacctacagcggcagcttctcgatccactcgcgcaccgtcaagcccaacctcgtgaccgacggttacgagtggacgacgggttatatcaacgcatggaacggctactacaacggttcgaaggagcttaattcgacgatcaacaacatcgtgccctattccgattcgtggtacagggaactcgcccgccgcagtacggacccctcgctcgaacgcgtgcgcgtcaacgacaacggcaaatacgaatatttcggcaataccgactggaccaaagccttctacaaggacgtgaactattcgcacgagcacaacctgagcatttcgggcggcggcaaaaacgccgattattacgtttcgggccgcttttacgatcaggacggcatctaccgcgtcggcgacgaacgctacaagcagtataacgtgcgggccaaaggcagcgtgcgcatccgcccgtggctgcgtctgaacaacaacatggacttcacggtcgtggactatcaccagccgatgctctactacagcaaccagctcgtgccgcgcatggtcgaacactccggccagcccgtcagcctgattaccaatcccgacggcacgtggacctatgccgccgtgctgaacggttacgccgggttcgccgaagggacgagctaccagcaggaggataaattcacgctcaaggacaagctcggcgtcgagatcgacctcgtgaaagacgtgctcaaggtctccggcgacctgtcttacctcttttcgcgcaacacgcgcgaacgcgtgaccaacatgtacaccggctataccggactcgaatcgaccatcacggtcaatgaaagtcagggcagcacgctccagaacgtccgttacgacatgaactatgtttcgagcaacatctatgcggaatacacccccaaactgggcggcgaccactcgctcaaacttttgggcggctggaacctcgaaaagaagaaataccgcaccctgaccgtcaagcgcgaggggctgaccgttccttcgaagcccagcttcgggctgatggacggcgtgacgagcgaccccacggtcggcggttacgactggagctacgtcggagccttcttccgcgccaattacggctacaagggacgctacctcgccgagttcagctgccgctacgacggctcgtcgaaattcccccagaattcgaagtggggcttcttcccctcggcttcggtgggctggcggctctccgaagagaagttcatggggtggtccgagggctggctcgacaacttcaagatccgcctttccgccggttcgatgggcaacggcaacatcgacccctacaagtatatcgactacatgaccctcaagtcctcgaccgtggtcatcggcaatgcgctggggacctacaccgtcgctccgggcgccattccgctctcgctgacgtgggagacctcgaccacgtacgacgtcggcgccgatctggacctattcaagaaccgcctgacgatgggcttcgactggtaccgccgctatacgaccgatatgtataccgtcggcgtgagcctgcccgccgtgtacggcacggcggcccccaagggcaacaacgcttcgctgaagaccaacggctgggaactctccgtaggctggcgcgacagcttcaaactggccggcaaggagttccgctacggcgtcaaggcgatggtctgggattcgcgtacgtgggtgaccaaatacatcaaccccacgggcaacctcgacgactattacgaaggtatggagctgggcgaaatctggggttaccgcgtcgagggtcttttccgcgatcaggacgacatcgactcccacgccacgcagtccttcctgcaatcctccgacaaggtgacgcgccccggtcaggtcaagttcgccgacctgaacgaggacggcaagatcgatcagggcgccaagacgctctccgaccacggcgacctgaccgtcatcggcaacacctcggcccgctaccattacggcatcaacgtcaatctgaactggaacggcatcggcatttcgaccttctggcagggcgtcgccaagaagaactggtatccgcgctacgattcgggttacttctgggggcagtacaaccgtccgttcggctacatgctcaaggcccatacgggcagcaacgtctacagcgaggagctggacaactgggacacggcctactggccccgctattcggcttaccagaccaacgaaagctcggtgaaccgcgtgctgaccacgcccaacgaccgctacatgcaggacgtgtcgtacatccgcctgaagaacctgaccgtcgattacaccttcccggcccatatctgccgcaagatgcggatcaaggggctgaaggtctatgtttcgggcgagaacctctggacctcctcgccgatgttcaaatactgcgacaactacgaccccgaagtcatcaacgcgggcgactccgacttccgtacggccgagggcgacggttacagctatccgatgctgcgcaccgtgacgctgggtctcaacctcacgttctaattctcaaaccatgcaaacgatgaaaaagctgtttctgattctgtcggtcgccgcggggcttgtctcctgcgaggatttcctgaccgccggagaccccaataagatcgacgctccctcctatttccgcaatgagagcgatctggaggcctatgccaacggatttctgcaaaccatgatcccgaccgccatttccgtggccacgggcgacgcccgcgccgactacatggcttggcgcggcgagtggcagtacctcaccgacaacttcgacgccgacgaccagtcgggctggtccacgggcagctgggaggacctgcgcaacatcaactacttcctcggcaacttccgccgggctgcggccggcgaggcgattctcgaccattacgaaggcgtcgcacgcttttggcgcgcctatttctacatgaacaaggtcaagaccttcggggccgtgccgtggtatgacagggagatcgacgccaacgaccgcgaggcgctctacaagccgcgcgattcgcgggaatacgtcatgcgcaaggtgctcgaagacctcgatttcgcctcgacgcactgcatcaccaacgccaagctcgaagtcaattcggtgcgcatcacccgcaacgtggcgctggccttcaaggcccgctgctgtctctacgagggcactttccgcaaataccacgcgaacgatccctcgaccggcaagccgtggacggccgacgagtcggagatgtacctccgggcctgcgtcgacgcctgcgaaacgctgatgggcgagggcaaatatgcgctggtttccgatccggccaaggtcgccacgcagtaccggagtctgttcaccagcgagagcgtcgcctccggcgaggtcatctgggcgcgcgcctacgacgcttcgctcaacgccacgcatattctcaatacctatttcgtgaatatgcagtacggcagctactcgctcacgcgccagttcgtcaatacctacctcaaccgggacggcagccgtttcaccgacaaggcggggtatgagaaaaccctctttgccgacgagttcgaaaaccgcgactaccgcctgatgcagagcatccgctatccgggctatacgcgcaggaacaacaacgtcaatacgccctacgcccccgatttcggctactgcgtgacgggctaccagcccatcaagtgggtcatcgacgacacctcgatggacagcaatacggctccctgcgccaccagcatcccgatcctgcgctatgccgaggtgctgctcaactacgccgaggccaaggccgaactgggcgaattcagcgagacggtctggaacgccacgatcaaactcctgcgcgaacgcgccggggtggacggcacgatgccttcggcctacgatccctacatggccgaatacttcctcaacaccacgaccgacatggccatcttggagatccgccgcgaacgcggcatcgaactgctgctcgaaaactgccgctgggacgacgacatgcgctggggcatggggcggctgctggaacgcccgtggtacggggtctatgtgggcgaactgggcaaggtctacgacatggacggcgacggttcgggcgacgtctgcttcgtgcgcgaaaatcccccggtgacggagccgggcgtgacctaccgggtgctgggcggcgactatgcgcttaccgacggcgacagcggctatatcgagtgctacatccgcatgaaccgcaagtgggacgacaagaagtacgtgcggccgatcccgaccacggccctcaacgacaatcccgcgctgggccagaatccgggctggaagaaataaacgattgcgaacctgaaaaatgaaaatcatgaaacgaatatatcagtttttgctgctggccgccgggtgcgcggcgctgacgacggcgtgcagcgacgacgatgacagctatctggtccgcgagacggattcgatccgcttcgccagctgtctggcctcgtccaagcagatcacgctccgctgcaacggcagctggcgaaccgtgattcccgaagacgccggatggctttcgacctctccctccgaaggcgtcggcagcggcgcgttcgagtggatcgccgtttcggccacgcacaaccgctccgccgagcgcacggcgaccatctacctcgaaagcggcggcaggcaatatccgatcacggtcacgcaggccgacggcgctgtcgtttacggcgcgccctatgtcgaaggcaacctcatcgagcaggagccttcgaaatcgcggctctgcttcacctacgccaatgcctacggcgacgagacgatcgacgtgagctgcaccctgagcggcgattcgcagggcctttcggtggccggcgcctcggtccggctcgtcaacggcggcgctacggtggcgctcgacattgcgggaacgccgaccgtgccgggctatgcggccttcgccgtgtcggtggacggcgtgcagatcggtacggcccgcgccaaggtgtacgccatgagcgaaatgccgatcgaggggcttcccgtgacgtgggagttctgtcccgtcaagggcagtaccgaggacgtcaatgccctgaaagcccggcagccagactgggtaaccgcgtcgcacagtctggtttcggaggacggccgcgcttacatcacggtcgtcgaagccgatgccaagacggcttcggcggtcaacagttggggctacaacgacgggcacgcctatctcaaggggctttataccggcgattactggctgcagaagattccggtgaaatacctcgtctccggcacgaagatcaactgtacgggcagcatcggcggttcgggctcttcggcggggttcttcctgatcgagtactcggccgacgggcagacttggcggcaggccggcggtgcgaagagcggaaccttcaacaataccgaggtgacctaccatgtccgcgcctacgacagtccgcttttcgaaggcgggaatacgggctatttctcgtacgacttccccgtcgaggtcacgatcaattcgggtacgctctggatacgctaccgggtctcggccaacgtgcgcatcacggcgaacaatacgatcactacgggcggaggcggttcgacgcgcctgaagggcactttctcggtgtcggtcgtcgatgagaacatgaactgatgaaaacaacgaacagtatgaaaaaatacctcactctgctgttgctggccgtcgtttcggccgcagcgggcgccggatgctcctcggatgacaggccggtgcagatcacgtcgctcaaactcaacgagaaggatctggaacttaccgtcgggcagtcgttccaactggtcgccgcgacccgtcccgccgatgccggagtcacgctcaagtggagctcttccgaccagacggtcgccacggtcgatcagaccggactggtgacgctccgcgccttcggcacggccgtcattacggcccgctaccgcagctattcggcccgctgtacggtcgccacgctgcaggagccgccgctcgacccctcggctgcgctcgcggccccgctctccgacgggattatctacagcaagaacgtactgctgtacgctccccggcgcatcatgcagggcttcgacctgaccgaaagcggcagcatctactactcgcaggtcggctccgacggcgcgacgctcaacatctgccgtgccgcgggtccggggctgaatgcgcagtccgactgcatgatcctcaagtacttcggccacggcacgcagatcgtcgccgaggaggcttccgacggcaagacctacatctggcttaacagcaacgcttcggtggacaaaagcggcgagtacggcgacaactggtccgtgtcgcgggtcgaattcgttccgggcgcgacctccgacgccggctatgcgggagagaccttctttctcaacaaggacggacagtacgaccagcaggtctcgatcgacttcggggcgcgccgcctgctcatcggttcgcgcaggtcgggcgtgcgctacttctggattttcgatctcgacgaagcgctggccctgccgctcaagaagatgacggccacggtgacggtcggttcggcgggcagcgaccccgtgacccgcgagatcgaggcccgcgacctgaacgactgccgcgtgctgggcagtttttcggtgcccgccgggtcggacaaggagaatgacgtctactcctattcgcatcagggacacgaagtggcgggcaactacgtctacttctacgaaggcaacgccgtcgagacgggcgccgattcgttcgaatcgaaagcctatgtcacggtcttcaactacagcggcaagatcgtcgtgccgcgtaccgaagtggcggccgtcgccgacaaggcgggacttgccgccgcgggacttacgaccacgggctatgccgagggcgagagtctgaaggtgcgtggcggcaaactctatctgggcgtggcgtgccgcgacggatcgtcgagcaaccgccgggccaatattcttgtctatgactgcgtgcagggcgaatgacgcttctgcgccgcaaaacgacgaagccgggggccgatccccggcttcgctgttttttgcgagtgtggttttgtccgtgcgaacggcggttccgtctgcgtgtacgtatgcggtctcactctgtccgggcggccgcattcgccttttcctccggattcccgccggcttatatcggcaggtgctcttcgagcgtgcggcgcaggtggtcgctgtcgaggtgggtgtagatttcggtggtgaggatgctctcgtgtcccagcatctcctgcacctgacgtatgctggcgcctccttcgagcaggtgtgtggcgaacgagtggcggaaggtatggggactgatgtgcttgtcgatgcccgcgcgctcgacggcccgcttgaggatcgtgaagaccatcacgcgcgtgagctgtccgccgcggttgttgaggaacaccgtctcctcgcccgaacgtgcgctgcgccgctcttcgagataccgctgtatcttgtcccgcgccgtgttgctgatcggcaccagccgctgtttgtcgcctttgccgatgacgcggatgtatccttcgccgaaaaagaggtccgaaagccgcagcgaggtcagctccgagacgcgcaggccgcacgagtagagcacttcgagcatggcgctgtcgcgcagccccttggtcgagcgcatgtcgaccgtggcgatgatgctgtcgatctcgtcggtggtgaggatgtcgggcagcgggcgtccgaatttgggcgtgtcgacgaactcggcgggcgaactttcgatctggtcgtttaccagcaggaagttgaagaaactgcggatgccgcacaggcagcgggcctgcgaggtcttttcgcgcccgcggtcgaagagccatgccatatagcgctcgatcatcgttccctcgaccttgcggggggcgacgtcgtactggcggaggatgaagtgcgcgaactggcgcaggtcgcgcatgtacgattccacggtattttgcgagagacgtttttcgagtttgatataggtccggtaacgacgtcccgtctcttcccactttttcgtattttctgccatcctttgcctgctatattccgagattatcgctaactttgtccgggctaagatagataaattttacataatatgaactatatagcgttgaatattgccttttcggaggatgagcaggccgaaatactgaccgccgagctggccgactatcccttcgagagtttcgaaaccgaagacgggatgctcaaagcctacattccgcaggagcggctggccgactgcaaagccggggtcgatgccctgctggcccgctacggcgtgcagggacgctatatcgccatcgagacccagaactggaacgccgtatgggagagcaatttcccggccgtcgatgtcgaaggccgcctgctgatccgcgcgccgttccacgatcccgcccccgaaggggtcatggaggtggtcgtcatgcccaagatgtcattcgggaccggacaccacgccaccacgtggctcgtttcgcgcgccgtgctcgatctgggcgtcgcgggccgccgggggcttgacatgggcagcggcacgggcgtgctgtcgatcgtcgccgccaaatgcggcgcggagcacgtcgatgcggttgatatcgacgactgggccgacgccaactgccgcgagaacatcgccgccaacggtgtcgcggaccgcattacgccgatgctgggcgacgtgcgccgcatcgccggacggcattacggtttcattctggccaatatcaaccgcaacatcctcttggccgacatgccggcctatgccgccgcgctcgacgccggaggcgatctggtgatgagcggatttctggaacccgacgttccggcgatcacggcctgcgccgaaaaactgggactcaggcccgttgctacggcggtgaaggagggctgggtgacggtacacgtacgcaaggagtaagttgaagacgtacaaggggcgcggggtagttctccatacgctcaaatacggcgattcgtcgatggtcgtctacctcctgaccgatgccggcggccgccgcagttacatggtgcagggcgtgcgcagccgcaatggacgcggttcgaagctggcgctgttccaaccgatgtttcccgtcgaattcgaggggctggaatcgccgcggcagcagatgcaccgcttcaaggaggtgcggggcggattcgtcttgcagagtctgcctttcgacgtgcgcaaatcgaccatggcgctcttcatggcagaggttttgtaccgcctcgtcagggagtacgacgaacccaacgaagcgcttttcgacttcgtgtggaactgcgtcggggcgctcgactcgatggacgagggggtggtcaatttccatttgtggtttctcgccaacctgagccggtttctggggttttgtcccggcaacgaatacgcctccggcgactggttcgatatccgcgaggggctttatacgaaaacccggcccgcgcacgttagctatatgaacagggagtgcgcctgcatgttgcgcgattttctggagtgcgacgtgcgctgtctctcggagatcggtctcaaccgcggccagcgggtcgagtttctcaacgccgtgctggtctatttcgggtaccacctcgacgccatcagcgccgtgcagtcggtccggattctgcgggaggttttttaggaaaagtgcaacagaaaatagaaggaaagttatgaaaaggatgtttatgatcgccgtcgccttgttcgcggcgttttcgctttcggcgcaggagccgggcaagttccggctcctgcggcccgattcgacccgtaccggcagtttcaggcttcccgattcgcttcgggtcgagatgtccgttcccgactcgctggcccacatgtcgccgtggaaaaccgacttccggaccgctgcgccgatgaaggtcaagccggccgtgtcgatgacttcggtggtggtgattcagaaggagaacctgccttcgcgcgtgaccgtgatcgacaataactcgctgcgtcttgggtcgcacttcaacctttcgaacggtcaggcgtggaactggagtccgttccccgatgcgttcctcgacgcacggacgctctccttcccgatgccccgataagtggggtatgcggatatgcttaggacgccttcttgaccgcctttccggcggttttgcaggggtatctatccgaatacgggcgtgaagccgcgcggctgccggtgttgccgtcggacgccgcgatccgtcataggggcgcatgatatggatgcacaacgttcggaccgatgcccgaaccgtcgggcttggcggtgaaggacggcgtgtcgtgaagaacggcctgaagatattttcgtattgcggcggggattgccccgccgttgtcgtttgttgcggtcgcggcgttctcttcggcagcgatgcgcgagatgatttcgatgcccgcaccgacctcgatacccgcgatgcccgcatcaactttgatgcgcgaaacgacctcgatgcccgcgcagtatctggcgcaccgcctcgcgcgcattttcgtgcaggttcacgaccgactgccccgcgagcgtccgctcctcttttttcgggtgtttgccgcagaccttctgcccctccctatttgcctcgcaaacggcccttcttgtccgttttcagtccggtcgctgccgcgttcggatgcctttcggacccggttttgttctttttaggtattttcgcgtattgatcggttgcgccgaatttgcgacttttgcagacccaaacgattctgtttatgagattgattttaccagttttgctgtcgttcgggctgttttgcgcttcctatgcccaacagcccgatacgctctgcacggttacggtcggggagctttccgcagaggtcgcggcgctcaaggccaaaacgtccgcatgggacaaggtgctggccgccctgcctacgatttcgggatacctccagaccggctacgaatggagcgataactcgtcctccttctttatcaagcgcgtgcgcctgagcctgtcgggcaacatcgctcccaaactcgactaccgcgttcagatcgaattcgcgtcgccgaagatcgtggacgcatatttgtgttaccgaccgttcgacgagctgaatctccagctgggcgaatacaaactgcccttctcgatcgagaataccgaatacgtgccgctcaggtacgagtttatcgagtatccgctgtcgttgtgcaagctgatgggcttcaacgatctctgcggactttcggccacggggcgcgacatgggagcgcagcttttcggcggatttttccgccgcgacggatacagcattctgaattacaacatcggcgtcttcaacggcgaggggctgaacgtcagggacaagaacaagagcaaggacgtcgtggcacgtctgacgctgaaacccgccgccggattgcagctggccgggtcgtattattggggcgaatacggcgcagattacctcaagcgcgtccgctacggggccggagcctgctacgaccgcggtccggtcgtcgtgcgcggcgaatatatctgcggcacgacgggagaccttgacagcgagggttggtacgccgtggccgggtggcgcgtgacgaagacgctgctgcctgccgtgcgctacgataccttcctcgaaaacagcgcccgcagttcgagccgccagaccaactacacggcggcccttacgtggcagccggtgaagtacctgcgctgccagctgaactatacctacgaagattacgctgcccgcgacgtctccggccgcaatgtggttgcgctgatgctttccggcatattctaatactgaaaaaccgaacgccttatgaaaaaatggatggaacaattccgggtcgaggactgggtggtagtctgggtgagcatacccctgctggcgcttgcggcgatcgtgcccgccggacttcccaaggttcccgcgacgctgctcggcggtgccgcatggagcaatatcgcctacctcttcgccgtcgtgctggcggtgctttacgccgggtgtcttctgctgcgccgcccgctcaggggcctgctgccgtcgctcgcggtggttttcgccgtctccctgctggcgcagatcgtggccaagattcccgccgtctcctattacggcttcgagtcggttttcttctcggtgctcttcggtctgctgatccgcaacgtgtggcgggtcccggagtggatgaaaccggcgattcagggcgaattctacatcaagatcggcgtcgtatgtctcggtgccacgatccttttcagcgacgtgatgaagtcgggcgtcttcggtctggtgcaggcctgtctggtggtcgccgtcgtgtggttcttcgcctattgggtgtcgcgccgcatgaaggtcgacgagcatacggcgatgatcctttcgagcggcgtctcgatctgcggcgtctcggcgtgtatcacggcagcccgcgtggcgggcggcgacgaccggaaactctcctacatcgtttcgctggtgctgatcgtcgtggtgccgatgatctacctgatgccgtggctcgcaaatacgattctgcccctgattttcgacgatccccatgtcgtgcaggaggtcgccggcgcatggatcggcggcacgatcgacaccacgtcgggcgtggcggcgtcgagtacgatcgtcggcgaggtcgccaaccagcatgccgtcatcatcaaggcggcgcagaacgtgctgatcggcgtcgtggctttcttcattgcgctttacctctcgacccgccgcggcgaaaagggcgctcaggctccgtcgctgggcatcgtgtgggagaagttcccgaaattcatcatcggcttcgtcgcggcctcgctggttttcagcatcctgcagagcaacggcctgtttacggccgatgcgaagggcaaactcgccgaaccgggcgtcgccaagatgttctcgacggtctttttctcgctggccttcgtctgcgtggggcttgacacccgcctgaaagagatcgtttcgaaggaaaaccgcaacgctctatgggcgttccttgcggcgcagaccttcaatatcgtcgttacgctggtcatcgcgctcgtgctgttcggcgtcctgaaaccgatgctggcatagcgcagtcttcatgataccgtcaacgccccggcttcctgccgtgtgggaaaaagatgtaacgattcggtttgtcaaatatttttgtccctttcgatgagttttcccattcctttccgggcggcttctcgcttggcggcttcgaaagcccgttctttcaggtcgaagtttccgctttcgcgcacctccgtttggaagaaggtcagcggcgtctggggatggctttcgcggatgcgccggacaagccttttcagccgctcttcgagctgccgggccgacggattctaaaaaacgtcgaattcgggaacaatattcgtttcatcagaacgggttgttgggttctgcaaagtcgtagaacgttccgtaatcgccccgccgcggagctccgggcatgtcgggacggaaatcggggcattcgtcgacccggtctttcagcttgtggtagattgccttcacctcgtcgctgcacgaggcgacgtcgatcgggtgctcttccatgaagtcctccttggtattgtagaagcggccgtcccaatagtatttgtactcggcggtacgggcagcccgcgaagcgtacggtgccggcgctgtcggccagagcggattatagtgcatcagtgaaatctccttctccaacggtttctgccctgcgatttccgggtagaggcttacgccgtcgagtttccattctgcgggaatcccgatccgcatggcgtcggcgaacgtggggaagaaatccgtaaagtcggccagccgttcgctgacccgcggcgcgatgcggtcgccccagcacacgatcagcggaaccgaagtccccacgccccgcggatcgcctttaccgccgcggcgcagcgtgccgtcggccatctgcgagacgatacgcgtcgaggtgccgttatccgacgtgaagatgaagatcgtattgtcccactgcccgttctctttgagccgccgcaccatgcgtccgactttcttgtccagataggccaccatgtcgcggaaattggaggtgtccttcccgaaccgcccaaggaaatccatatcccagctctcggaatcgggagtcggcgtatggggcgtatgcacgagcggcgtggagcagtagagcaggaagggctttccggactccttctgccggtcgaggaattcgaatgccgcgccttcgaacccgtcgggaccgtaggtcgaatattcgtaatgaccgtggttgtccatcatgcagttggcgtagcggtcggtgccggtcggaccgttgaactccttgtacacatcgagctggaaaaggcaccactcgtcccatcccaagcgcgtgggcatcccgcggtcgcgtccgagctgccacttgccgaacatcccggtcgtatagccggcctgccgggccagttgggcgaagttgggttcgtcgtcattcatatagccgaagcagacgtagttgcggtcgttgtactgaccggtcatcagctgcacgcgcgagggcgaactcagcggttgggcgtgcatattggggaagaacaggccgttgcgggccagcgaatcgatcgtgtgcgtgtcgtaggagacgccgcccatgcagccgaaacattcggcgccgatgtcgtccgccagaaacagcacgatgttgggacgcggatcgttctgtaccgatccgtccgtacaggcaccggccgcaagcgacaatgccgaaagaccggtaagacgaagtgtggaagtgttcatgatttcactatttgttggtttgggtttaggtaaaaaacgcgattgctgtcagataaaaaacagcagggcgggcatgagttttcggagccgcgacaacgcctccgaaatatggaattgcacggtatggggactgatgccgagccgttcggcgatctcgttgtaggagagatgttcgtaacggctcattttgaacacccgtcggcattgttccgggaggttctcgatcgccagttcgatcatttccagcaggtcttccgtcgttatgcgcctgccgggatcgaccgacagctccgcttcacgggtttcggactgccgaatgtattgcaggtgcattttggagcgcttgaaccggttgaagatcgtattgcgcgtcatccggaacagatatgcacgaatcgacaccacctgccccatcagggagcggttgtcccatacttgcaggaagatatcctgtgtaacgtcctccgcctcggcttcatttttcagaaaccgcagcgaaaagtcgtaaaccttcggggcgtagcgtacatagagcgtgtcgagggcgtcgacatcgccccggccaagtttatccaacaatagttgctcttcgtccatttatctgcaaagttaccgttaaattgtatgatcccgcgtcatccgaaataaattcatgccgcacctagccgtctgcgccgcaggattgtcctatcagtgaattacaccaaacaaaatccattatgcattcgaaactactgatcgcagggttgctgctgttcggaaccctgtcctgcaactccgaccatcccgtccatgaaaaccgggcgtcgggcatcgtcgccgagattcacgatcccgcctcgaaaaaggtcctcgtcgcctcgcaccgcggcgactggcgcaactaccccgaaaattcgcttcctgcgcttcgcagcgccatcgaccggggcgtcgatatcgtggagatcgacctgaaaatgacctccgacagcgtgctcgtcctgatgcacgacgcacgcatcgaccgcacgacgaccggtcgcggccgcgtctgcgacatcacgttcgactcgatctgcaaagtcagcctgcgggccggacagggtgtcgccacgcactggaaggtcccgacgctcgaagaggcgctcctgatttgcaagggccgcgccgtcgtgaacatcgatcagggcttccagttctacgaccgcatccatccgctgctcgaacgtacgggaatgctgggccaaacgcttatcaaaggccgcctgacagcttccgaggtcgaacccgtattctcggcgtattccgagaactgccttttcatgcccatcgtcaatttcagcaaaaagcatcacgacgaaattctccgaagctacggggagcagccggcacctcccctcgcctacgaggtctgctggtcggaatacacccccgaagtcgaggcctgcatgcgtgaggttctcgccagcggttcgaagctctgggtgaactccctttggccttcgctctgcggaggtctctgcgacgatgccgcactcgaaggcgatccctccgccgtctacggcaaactcgtcgacatgggagcgaccatgatccagaccgaccgccccgaactgctgatctcctacctccgctcgcgcggactgcacgactgacgccatgagccgtatcaccgaattctaccgcatcagcgcccccgcccccggacgcgaaatggacgacgcctcccgctcgaaatattaccggcgtctgcgtttgcaggcattcgtctccgcgacgctcggctacagcctctactacgtctgccgcaccagtctcaacgtcatgaagaagcctgttctcgacagcggatcgctcgacgcttcccagttgggcgttatcggctcggcgctgctcttcgcctacgccgtcggcaagttcgtaaacggattcatcgccgactactgcaacatcaagcgcttcatggcgacgggactcatcgtctcggccgcggcgaacgccctgatgggactgttggggttggcccattccgtagttcccacgaccgtgatattcgtagcattcgccgtcatgtggggactcaacggatgggcgcagtccatgggcgctcccccggccatcatatccctctcgcgctggtatcccctcaacgagcgcggaacctattacgggttcttctccgcaagccacaaccttggggagttcttctcgttcctcttcgttggctcgatcgtgacattcgccggctggcaggccgggttcttcggctcggcgctcgcaggagccatcggcgttctcgtcgtcctctgctggctccacgacacccccgaatccaagggtctgccgcccgtagaggctcttgcccacgagaaacccgtgcccggcgccgaaaagtccgtccgggagattcagaagcaggtcctccggaccccggccgtctgggtgcttgccgcggcaagcgcattcatgtacatatcccgttatgcaatcaacggatggggcgtactgttcctgcaggaggccaagggattctcggacgtcgaggcaatctccatcgtctcgataaacgccctcttgggaattctcggaacggtgctttcgggatggttttcggacaagcttttcaggggcgaccgcaagattcccgcactgatattcggcgtattgaactccgtggcgctggcgctgttcctttacggcggtaatgccatgtgggtgaacgtcctctcgatggtgctgttcggaatagccatcggcgtactgatctgcttcctcggagggttgatggccgtggacatcgtgccccggaaggctaccggcgctgcgctgggggtcgtgggaatagcctcctactgcgcagcgggaattcaggatgtggcgtccggatggcttatagacaagcacattaccgtcgccgcggacggcgtcaagcattatgatttcggacccgtcgcattcttctggattgccgcgtcagtaatttcgttcatactgccgctgttgaaccgcagacgctccgaatagagcgtctgcagtcacagagccgtcacctaccacctcaacacccgaaccttatacacgctcagatcggggatgcggattaaaaggtccgcctccccgttttttacattcgacgtgtggcgcagcgtctgcgtggtccagtcctgatccccttcgggtacggtagcgtccgtataccacgcttcgccggtatcctcgttatagttcaccgatttaagcgccgtgcaggccgaaaagtgggtcagctcggaaaaggttcccgatgccgtattataaacataagcgcttttgcctgcgatgcaaagactgtgggaattgaccgcagtcaggtcgtgcaccgagtttttgggagtttcgaccgtccgctcctcttcgagttcgggggtgtctgattcccagtttttcaatttgtatattttcaggctcttgcctccgatggcataaagacgctgcgtagactcgttccagaccacgccgtgcgccgattccagatcgtactggcacagcaccttgttgttttggccgaggtcgtagacctgcaccttgttgcagttggcgtccgctcccgacgagcaggccagcaccacccggtcattgggcagcagatcggacgagtgcacctgcgggcaggaggtcgaccaccagagaatgccgtcggtttgccggtcgtaaagcacacaccagcccgtagctcctgacaacagcagtttgcggttgttgtccacgggcttgccctcgccgacacggcactgcgactcggaaatccccagaaccggagcgaccgagcgggaatcccagcgccatacgacggcgttgcgataatcggcgggcggctcgctgccgacttcgatcacgcaggcggtgttgttgccgcagaacagcagctgcgtcgggagtttttccgcctcggcggtatcgaccttgcctccctgcgccagtcgcaccggcgtattgtcgaccagtttatcaacctccgtatcgccatcgtacaaggtcaccgtgtagcccgacgaaagatccacaggcgccagcagcgcgacgagcgtctgacctcctgccgcgcagtcgaccggaacggcgggcgtcacggtcacctgcggcgctgaagccgtgacattccagtccgtcatgcggaccgacacttcgccgccgatcatttcgccgccgttggcttcgatcacggcgcgtgtgaccttgtaactgttctggatgagccggatgtacatcgtgcatccgagctgggaaagttccatgtcgaccccttcataggagttcacgaccccggtcgtatggcctacgagcagaatcggggagaccgtcccgtcctgcgcggcggggatcgaggttttcagcaccccgtcctcacaggtcacctgcgcatcggcaggccaccatgcggctacggccacggggtcccgcggcgccgtgacgttgaaaaggaaaagcgaacgctccgtgccgggaagaatcggttcggcaaagaccggttccgtccgtccgggtccttcgacgaccagagccgcctgttcgccctttttccagacgaccgaagtgaggccgtcttcggcattgcggtatttcgcaagcgtcagatttgtttttgcggcgagcagcgtgcgtccggattcgtcgtcgctgcaccctgtgccgagaagcaatgtcccggccagcagggccaaaagtccgtatagtctgtttttcatgtcgtaagtctgttgaatgattgattgttattttttacgcagcacctgtccgtaggccttcacgaggtcgcggcacgtggcttcgccgtggtgcacctcgaagatatagactccccggtaacccgtccgccgcagcctgcggcagaggtccggccagtcgatcacacccctgccgggcagccagtggcgttcgtcgcggccgtcgtaatcggacagatggaccgtggcgatccggtcgccgagcgccccgataaaatcggcgtggctctccagaagcaggtgattcgtgtcgaagcagaccatggcctcggtgcatcctccgatcaggcggagcatctcggccgaggtgcggccgatactgtgaggcatattctccacacacagcaccgcgccgatctctttcgccgcgagcgacagccggcagatggagttggcggcacagcgttcgcgttcgctgcgctcctcctccggaacgggccgcgatccgggatgcagcaccagccgttggggacggaagatggcggacagccggatcatccgctcgatataggccacattccgctcacgctgttcgggatcgacgaccgaaatgtcgcaattccggccgaaaggcaggtggcacgaccagaccttcagtccggctttatcgagcctgtctcgcagcgcgaaagccgccgcgtaacactcggcatccggggttttatgggtgaatgcgtggaacgtcacctcgacatacccgatcccggcgtcgcggacctcggccagtttctccgttgtcggccctccgagaatgccgagcgaggttcccatcggccgggcggcgtacagcacgccgcccagcatcaggaacaaacctaaaaatagccctttcatctttctcatccgaattaccattcgatcagcggcgactggatgcaacccgaaccgcagtggtcgcctccgtgcgacgaccagcccctgccgcgtgccgccccgatgtatttaccgataaaaagaccgtttccgccgtctccggaaccttggtttacggtatataatacaccgtccgcgagattgcagccgttctggcagttgttctgtgtgtagctccagtcggagatcttgtttccggacgtatcgtattcgagcacgaggctgtcctccgtactgttgccggacgccataatatagaaacggttgttcgcatcgaccagcgggcgcgtgaagttgaaggtgtttttctttacgctgctcggctgctcttcatgaatcatcgtctgtaaatcgggcgagaagaaccgcacatatccgtctttcgttccggcgaagaccgttccgtcgccggctacgatgggctggtaatagttgtcccctccggctgcactccgggcatacagcgtgtgcgagtccagatcgacggccgccagagttgtggcgtaagcgaaataagccttcttccggtcgggactcacggcaaaaccgatggagttgacgatcgaaaccgagactgcttcgatcttcgtgccgtcggcggcgtttacgaaatgaatcgccgttttggccgctaggaccacctcgccgccgttgaccagcaaaccgtaaccgcagctgccggccgcgtagggtgcactccaccgctccgtgccggtttcggcgtcgagcgcatagagagcgccttttgcatcggcgatgtagaccaccgtgccgtcggcgctgacagcgggaggcgctgagttcatcgatccgcatttgctgaatttccagtgcagcgtaccgtccggcttcacggcatagaactgcccgccggcgctggttccgtagtagatgtcgcccgataccggattgacggccaccatcgatttcgattcggcctgcatatcgccgttatcggtcggcctgaacgtccatttgtttttaccggtacgcacatcgaaagcatagagattgctgaccttgttgcccgtattgacatagaccgttccggcatcgggcgaaagcaccggacaagtgtaggtgggactttcgtatttggcgccgtcggcctgctcccaatccatgaaattgacgacgtaaggacggatttcgaccgtgattttccactcgcgcgaggatccgtcgatcttcgccgacagcatgacggtctggttgcccgtggtcttgaatcccgaaaggaccttgtcgcccgtgaggaccgcaccgtcggggaaagtccacgtcacgtcactcgcgtcggcataggccgtccggttgaattcgaacgtgacgggctggtcgacagccgccgtttccgaggagatgaaataggggatggccttggtcggcatggcacggaccacgtccgcttcggccggtccctttgcatattcggccgccagcaagaaaaaccatgtcttgtcgttggtgagcccttcgcaccggtaggccgtctgctccttgccgatctcctgcgtccggatatcgcccggcatatcctcgatgtaataggagagcgtatatttctccacgagggtcgagggtgcggaccacgcgagtgccacatagccgtcgcccgtatccgtaaccgtgaggtctgtgaccggaagacgcgacgtggaaggccggcccgccaccgtcacggcgttggagatcagtttgccgtaaacggcctgcacattgaaattataggagatgccgttggtcagtttgtctacgacataccggcttgcaccgccggtgcgcagcgtcacggtctgcgactcctcgtcggtatagaagacgatgtaatcggtcgggttccacccgtcgggaatctcccatgcgagggtcacctcttcgtcgccgggcgtggccgtgagcgcctcgacctgatgtcgtgcggcgccggcttcggggatatcttctgtccagcacgacgcggcaagcgccgcgaggcccgacaggatgcatatatgaatcagatttttcatgattgaaacagctttgaatttttacgatcagtaaccgggattctgccagagtatcgtcttgtcgttcacgatctcgatctggttttgcggaatgggaaacagcagattgtgcgcatcgagcttgtaacccatttcgtggaagcggtctaacgccagccccagtcgcacgaggtcgaaccaacggtggccttcgagtgcgaactcacggccgcgttcatcggcgagcgcttcgatgaaagcacccttcgagggaatgtcttcaggcttgagcgcgtccagcccggcccgcgtgcgggtcttgttgagccacaccagcgcatcgcccagactgctgcccgattcggccagcgcctcggcgtacatcagcaccacgtcggcatagcgcaggtgcgggaagtcgttctccaccacgttgcctttcagggcgtcgttccggttgtcgaaccatttgttcagcagataggttccctttttgtcctccgtgtactcggagatcagcggcagacggttgtcccgcgcgtcgtaaagcgcccggaataccggagcgggctgcgtcagctgcgcttcttcgggtttggtggtcgaataccagtaaccgtggcccgtatcgtttgccttgttgtagtagagcgcgaaaatgatctccttgttgaacttgtttttcacattgaaagcgtccgccgtggtgttcaccagtccgtagttgggattcttcatcgcctcttcgagggctgtcttggcctcgccgggcttgccgaacgtaaggtagactttcgcgaggagcgtccacgccgcaatatcggtgacacgggctttctctgcgcccttcgacgccggcagcagccgggccgcctcagccagatcgcccgtcagcagggcgtacatctcgtcgtccgtgcagcgacggatggtcttggcatcggccggggacacgactttgtgtgcaatgggtacgccgccgaaagccctgtaaaggttgaaataccaccacgaccgcatgaacaggacttcgccgcggtatttgtcgtaattgggcagttcctcacggccttcgaggtgatcgagcacatcgttgcagcggtagatgccgttgtaccatgcgttccagatgtcgctcatgatggcgttgctggagttctcctcgaaatggtcgaaatagtaggtcgatgcatcggaaacggtcatggcctgtttgcagcactcgtcgctgcgataggccagttcgttgaggtggtagcccatctgggtcttgagcttgtggtagcaggccgccacaccttggtcgaagtcgtcgtcggtaatgtagtaattgttctccgtgacgctgttgcttgggtactgttcgaagaagctgtcactgcaggaaaccgtcccaagggccgcgacgcccagtaaaagataatatgttgatttcatgattccggtcgattagaggttgaaattgatgccgacgctgaacgtgcgtgccagcggataagaacagtagtcctcgcccggacgcagggcgtcgctcgcgtggttgctgacttcgggattgtaacccgaatagtcggtccacgtgaagaggttcgacccctgcacgtagatgcgcagcttcgagatgccggccttgcgggtccacttgtcggggaaggtgtagcccagcgagaggttctgcaggcgcaggtaggagccgtcctcgacgtggaaagtcgaggtgcaggcggcggtattgcccgtcagcttgcggttcggacggttcatctcgccgtaggggaagcgctgcaacgcgtcccgtgtcatgttctggctcatggaattgctcatcaggtagcggcgttcgaggttcaggatctcgttgccatagacgccctgaaaattggccgccatgtcgaagcccttccatgagagattgaccgagaagccgtagtaaaagtcgggcatgtagttgcccacgatcacacggtcggcatcctcttcgagaataccgttgccgttggcgtcgacgaagcggaaatcgcccacctgcgtggtgctgaaatgggggtaggagttcaactcctccttgttgtggaaaatgccgtcctgcacgagcaggtagtagcagcccacgggctggcccacgcgtgtgatgtaataggccccgttgaacgacgcctctttgatgatgtcggcattcccttcgccgaggctcagcaccttgttgcggttgagcgaccagttggccgaaaacgaataggaaaaatctccgaagcgtcgccgcgaggttagcgccagctctacgccctgattctccatcgaaccgatgttcatgttggatgacgtgagtcccgacacggacgaaaccggaacgtcgaacaacatatcggtagtcttcgaatagtagtagtcggcggtcaggcccagcgtccctttccaaaagctgaggtccagacccacgtcatattgcgtattacgctcccagcctaaatcgggattggcgatctgcgagggatagacctgcggcctgagtccgttgccgaggtctatgttcgttgaaccgtagagctgcagatattccgagttgccgatctgggcattgcccgtcacgccgacgctgagacgcagcttgaggtcgtcgatccatttcacgtcgcgcaggaagctctcgtcgctcacgcgccagccgacggaagccgccgggaaataaccccaccgggtgttgggggcgaagcgcgatgaaccgtcgccgcggatcgacgccgaaaccatgtaacggcccttgtaggagtactgcgcacgcacgagccacgaggcgaacgtgtaggcatactcgttgttgtaggtctccgccgggtcgatggtcttgcccttcgtggtgcggatcttgtcgtcgcccttgactcccgtgccgacgatctgcgacgttttgacatgctccttttccgcctcccagacagccacggcgttgagcgaatggtcgccgaaacggcgcgaaaaagagagctggttcgagagcgtccaatggaaataggagttggtgatgctcttcgccgtgggattcgacgggtccttgtaattggccttgttcttcagcggaatatacgacggccggtagtagttgcgcgaatagttgtagtagtctccgccggcggtgatcttgtattccagcccgtcgatgaattcgtaggaggcgtagacgctgccctgcatattgagccgttcgcgcacgtcgtcgatttcgagcgccagcgccacggggttcagcgtctcgttgaactgcgtgtcgcccacgccgttctcttcgaggcgcagatagccgttgttgtcccagttgtaggagccgtcggcgttgtagaccgggaagatcggagccgccatcagcgccgaggcgatcacaccgtcgtttccgtactgggcgtccgcatccacgaaattgtatttcgagtaggagggcgagaagctggcgccgtatttcagccgcttgcgcttgccgtcgatattggcccgcattccataacgctcgaaatccgatccgatgatcgttccttcgcggtagaggtagttggcgcctacgtaatagctcagcgtcttggtgcggcccgaaaccgaaagactgtgcttgtgcgccagagccgtgcggaagatggcgtcctgccaatcggtgtcggtcagcgtaccgctcttgtcttcgagataggcggtgatgatgggcggaaccttgtaatagcccgttgccccgcgttcattgtagggatcgtcgatcgaccccgacggcacctccgtcagataggcgttgtcgcgcgactccttgtagagctgcgcgaactcgtaggcattgagcatatcataggttttcgacacgcccgatacgctgaactggccgtcgtaacggatcacgggatgttcgttctggccgcgcttggtcgtgatgaggataacgccgcacgaaccgcgcgaaccgtagatcgccgccgccgaagcgtccttgagcacttcgagactctcgatgtcgttgctgtcgaggttcgagaaggcacgggcgtcgcacggaacgccgtcgatgacgtagagcgggtcgttgcccgacgtggcggactggatgccgcggatgcggatcgagacgttgccgttgggctggccgcccagctggagcacctgcacgcccggcatcttggcggccatggcgtcgcggaaatcggtcgtcgcaagccctttgaaatcctcggccttgatcgacgcgatcgacgtcgtcacgtcgcgcttgttctgcacgccgtagcctacgaccaccacgttgtccatggcgatcgcctcgcttttcagcgtgacgtcggcttgcgtctgggtgtccgaaagtgcgacggataccttgttataaccgatcagcgatatttcgagcaccgcgtttttctggcggatcggcagcacatattcgccgtctagccccgtcgccgtacccgtcgtggtgcctttcaggatgacggtggcgccgatcacgggcgcgccgttttcatcggtcacgcggcccttcaccgtgcgggcggcgtcggctgcggctttcggtgtctctttcggcttggcggtgaggatgatcttgcggcctttgatctcgatgctcacattgggaaggacttccgcaagaatggattcgatactccggttttcggcgttcaccgtaaccttccgatgaggaggcgtatcgatctcggcattcacataagcgaacgtgtaaggactcgccgcctcgatccgctgcaggagttccttgatggtgacgttccgggcgtcgagcgtgacgaccggcgtctgggcctgcgccggaatggcgaagcaggcacacaggacgacggccagcactccctgccacatcgttttcaggtaaaaattcggttcattcataattacttggtttgttattaggtttttcgctgtaagtttatctggatttgccccggttcgtgacgaacacccggtcgccgtcgatctggcagcggaccggcatcagtctcgaaataacctccatgatgtcttccaacggttcgtgctgaacgaccagcgacagacgcttgttggcgggaagcgaggacgaaagcacgatctcgacatggtatttgcgttcaaggttgaccatgatgtccgtcagcggcatattgtagaataccagacgctcctcgaaccactggcagtaattccgtgcatcgacctgctcaatggagaattcgccctgaagtacattctgtgtgaatttctggtcgggacaaagccggacaggacgcgaaagcccttcgccggagatgctgacggagccgcttttgaggatgacctgccgggcagggtcggccgtatatccgatcgcgtcgaacgaagtgcccagcacctcgatctccagccctcccatgtcgacgcggaacggccgcagcgaatccttttcgacttcgaaaaaggcttctcctgagagcgtcacctcgcggaccctgccggaaaaatcggcatcgtatgcgagccggctctcttcgttgagccatacgcgcgagccgtcgggcagggtgaattcccccatgtggcctttcgccgtcaccagcgtaatccgctcgacaggcttttcggaacgggtggcggaaaaatagccccccgcaaacatcaggacagcggcggccgccgctccggcataccggagcacacgccgcaagtggctcctgcgaatcttcgcatgcagtcgatccaatcccttccggatcttttccggcgaagcttccgcatcgttggtctcccacagctcttccatcagcctgtcaacctccggattccgctcctgatccgccatccattgcctgaaagcatgcctgacggaggtcggaatatcgggctgtgcatagatgaaattcaggattcggcgttgtcgttctctttcgtccataacagtcgccgttattcggctttctgggtgaatgtataggtttctttgcaggagccggcggtaaaggtcaccgtgccggtccttgggctgcccgtgccattggccccgaagctcaggcggacggcgaaaataccccgcgatccgccggccggctcgaccgtaatccactcatcgcccgctgcagtccagtcgcaggtcgtgtagagcgtgatcgacttctcgacgtcgcccgcattgacgcttccttcggccgtgtagacgacggcgctgtcagtggtttcgggattgttgtcgtcgcaagctgccaacggcatacatatcaacactccaatgatccaaaataatcgtttcataatattcggtttttaatttgttgttcgtaatcggtcggaagcacccagttcgagtgttcccacggaatgatctctccggtgacagtccgttcgtaaattcgctcctttcccggcttgtcgtagggatagcggtcgaatacgtcgccgtcgcccgtcatccgcggatccccctgctcacgcagtgtccggaaaagttcggcccgcagggaatctgccagaacccggcatgaaatctccccgatgcggtttgtgaggcattcacggtccgtttcgacatgatacagttcttctgccggacgttgtcccatcgacaatgcgtagtaacgatcgtcctgtccgctgcgtttcagttgcagaatcgcggttttggtcggcgaactgtcgatgtcgcggtagcccgtttccgggttgccgccgggcagcagccacggtttgatgttgcacaagtagagccagccgttccgtacaataccccggatcggatacccctgatcgccgggccgtccgttgtcatgccgctcgcgccccagcaacgcccgttcgtgtaacgcggcataagggtccggctcattctgcaacagcggcacgaggctcccgcccggcagcggcgacatgccggccgccgaaggggatgttcctgcaatctccaaaacggtcggtgcgatgtcgacaaatgaaacacaggccgcttcccggcgtcccggcgcactcactccccgcagccacatcacggccaacggcatgtgatgcgcatactcgtactgggttcctttggcgcgcggaaaaggcatcccgttgtccgacgtaacgatgacaaccgtgttgtccagttcccccagttcctccaaccgggccagcatcagtcccagttggcggtcatagtgttcgatctcgaacccgtagtccagcatatcgttacgcaccgtttcgttgtcgggccagaaggccggaacacggtcgatctctccggtcgtccggccgccttttgccactccgctgccgtattcataacggcggtgcggctcgcggcagccgaaccagaagaaccacggccgcgacgcatcctcacgcgaggagaggaagtcggaaaaattcgccgcataatccgtagcgagtatctcaggtgtcggaggcgtcagtttccgattctgccacgctttacccgtcaactgccgtctgcggccgtccttcactccggggtcgcccggcgcccagccctttccggtaaaggccacgtcgtaaccggcctcttcgagcgcctcggtgaaaaccttgatattttccggaaaacggcagatgtgatttccggcctcgcccagctgccacgagtagcgtcccgtgagcagcgacgcccgcgaaggggccgatttggcattcggagtgtagcaattctcgaacagtacaccccgtgcggccacactgtcgaaaaccggtgtcgagacccatttgcagccataggccccgaaatgaagccatgcggcatcgtcggcgatgcagaacagaatattcggacggcgcgaaacgccgtcctgcgcttcggcacccgccaaatccccgaatgccgccgcaccgacaaacaggatgccctgaggtatgtgtgatgtagtcacaacagtcaaaaatgaaatttatcggcaaccggatcaatgatcggagatgtccgggaagatagtaacctcggcagtcgccctctcactgcgaaacgcctcgcaaaacgggaatggcccttattttcgtccgcttttcacggcattaagttttgttgcgagttcttcgacgatttcgggatactgttccgccacgtcgtgccgctcgcacggatctttcgagatgcagaaaagctgcggacggggcgaattgcccagttcgaccgacttgcggtattcgtagctctgcctgtcgctcggttcgaggtatttccattcgccgcagcggattgccagcgtattctggcggttctgctcgatgacatattcgcggtctgagtgccccattccgagcaactcaggcaggtggttgcggctgtcgggggcagctccttcgggaagggcgacgccggtcagcgctgcgagcgagcggtaaacgtcgatctgcgagaagacggcggactgctcgcccggtttcacacaagagggccaccgcacgatgaaaggaacgcgcgttccggcttcgtaaaggctgtacttgccgccgcggtagatgcctgagggcgtatgcccgccaagccgcatggccgcctcgtcctgatagccgtcgtcgattgcgggaccgttgtcggaggtgaaaaccaacagcgtattgtcggcgatgccgaggctgtccaacgtgcgcatcacctcgccgatcgtccagtcgagctgcaggatcacgtcgccgcgggtcccaaggccgctcttgcccgcaaagcggggatgaggaacacgcggcacatgcacgtcgttggttcccatatagaggaaaaacggctcgtccttgtgccgggcgatgaactgcgtggctttcagggcgatcgtgtcggcgatgccttcgtcgacccacagcgccgaacggcctccggtcatccatccgatgcgcgaaatgccgttgacgatcgtgttgtcatggccgtggctcggacgcagcttcagcagttcgggattctcggaccccgtcggccagtcgccgaccttgtggtcataattcaccgtgatcggatcggaggggtccagtcccacgacacggccgttttccacgaagacgcacggcacgcggtcgaccgtggccgggatgaggtattcgtaatcgaaacctatatcgcgggcatcgggacggatctcgacgttgaaatccgtgccgccgacgggacccagacccagatgccatttgccaacggcgcccgtgacataaccggcatcgtgcatggcgtcggcgagcgtatggcactccgggtcgatgatgagttcggaatttcccggagcgatctgcgtattggggagacgccatggatacatgcccgtcagcaggccgaaacgcgatggcgtactggtggcggaggtggcataggcattggtgaaacgctgcccctgagccgcaagacggtcgatatggggcgtagcgacccgcgtcgctccgtaacagctcaggtcgccgataccgaggtcgtcggagaagatgaagatgatattcggacgggcattttccgggacggggaccgccggatctcccgcacaactccctgcaagcaagggaactatagacgcagcactaagagggatacgtttgttcatgggtcagtaaaaagtttaaaggttttattcaaggacaaacggcaggtaaatcccgctaggtcggaactgtattttttatatttttctccgaccgagataaaagctctcctattgaagcgtctacatccaatcgtccgtgtttgttgaacggttcgagcatcttctgccggaagagcacctcggcttcatctttatcgaccttttccttgttgtaacgtaacgcccctccatgcgagggacctgaccttgtcttcgcaaccgttccacagcacgttttgcaaggttctgaatctcgatactgaggggtttccaactccctagtgcgctgttccaatgcgggattgcgacgttggaaaagtgcggattgacgatcttcacgacctgactgtagttgttggcgagttgctgaaattggaaataaaagtcgtttcgtcgcccgacgaactgcgtcttcgaaagatcgcggttggggctgtgaattcctcgcagaagcttcttttgacgataaaacggctgcggttatgctccgatccggctttgcagagcagttcgttgaaacggatgaagaccgaacggagactttgcagctgaactgcggcattgtgcacattcgggcgaaacgtcttttgttgtccgtatggcatatttttcagcctttttatccgatctgataattagttttgtcggacgatcctgcgaatagagatgactcctgaagtttcccggcgccggaagaaggttccggagcctaaaatatgaacaactaaaaaactgaatgtatggtaaaagtaaaagtcaaacttcggaaatcgacggtcgaagggaaagcgggtgtaatctattaccaactctgccataaacgtcaatcccggcagataaccaccggcatccggctttttcccgaccagtgggacgcccggcgggagcgggtgatggtttcccttgcggggcgtgacgccgcgacggcggtcgtccagcggcagatcgacggcgatttgtgcctgcttcgtgcgattgtcggggatttcgaggcccgccgggaggaatacggccttccggatgtcgtcggacggtttcgttcgtccgaaaggttcaccgttttcgcctttgtcgaaaagcagatcgcttgcctgcgtgcggacgggaagttgggaacggcgcggaattaccgccgtacgctcaacagcttctccggttttctgaacggcgccgacattccgttctcactgctggacgaacgactcgtaggccggtataacgactggctgcagcggagacggattgtacgcaataccgtctctttttatatgcgggtgctgcgtgccgttttcaacaaggcggttcgtgagggcatcgtgccgcagagttctcctttccgaaatgtctacaccggcgtggaccgcacccgcaagcgcgccgtcggcgaagagaccgtcatacggctccggcgtttgaatctggaacactccccctccttggcgctggcacgggatatctttattttcagctattgcgcgcggggtatggcgttcgtcgatatcgccttcctgcgcaagcaggacatcgccggagggacgatccgctatgtccgccgcaaaacgggacagcacctgacaatccgtatcgaaccctgcatgggcgatattatcgaacgttattcgcagggtacccgcacgtcggactatgtctttccgctgctgaacgcgaaggacccggtccgggtgttctcccagtatcagaccgctctgggctactacaaccgccggctgaaacgactggccgacctgctggagctggagatgccgctgtcgtcctatacttcgcggcatacttgggcgaccacggcccggaatcacaatgttccgttgtcggtcatcagtgcgggaatgggacatgcttcggagaaaacgacccagatctatctggcttcgctcgaaagctccgtcatcgatcaggcgaaccggagcataatagcgtcattgtatgtgtaatatctcttggtaagagatgtgcgtgaattataa

SEQ ID NO: 12087 - DNA, 3055 bp, Unknown
  gut microbiota DNA sequence
caacccttttttaacgcagaaaaactcgccgcatacgaaaataaagaacaaaagatttgtgcatatattttatttttaatacttttgcccctgacattgaggtctcttaccaagagactgtactgtaaaatgtgaaagtgttcttatgggaggcgcgtaattgattgaaaatcatcatgataaatggttttcaatgtccccgtggaacgctttttttacaaccatacctctctttccgaccttttttagtctgaagaacagcatgacgaacagtacggatacaactgccgaatggtatgtgctgcgggttacctatcagcgggaactttcgacgaaggagtatcttgacaaactgaacatcgagaatttcgtaccgatacgggtggtgcgccgccggaactccaaaggtcagtttttccgggcttgcgaagccgccgtgcacaactatattttcatccgttcgacacgcggggtcatcgacgagctgaaaacctataagctgccgatgcttcgctatgtgatgcacccgcaaaacggtgagaatcagattatggtcgtgcccgaagagcagatgcggagctttatcgccgttgcgggcaatgaagacgaacaggtgcttttcatgtcgcccgaagaggtcgccttgtcgaaaggggacaaggtgcggatcacgggcggcgtattcgaaggggtcgagggccagctcatgcgggtgaagaattcccgcgggaaacgggtcgtggtcaagatcgacggcatcacggcggtggctaccgcctccattccctcggtactggtcgaaaagatttgatggccgggttcggtttttcctgaattacagagattgattttttggtcgttatgacgccggaatatttgaaagaactgctgccttccctgctgaatgccgattttgcgggggtgacgaatgtccgcctgctttcgttggcgcggacgtacgccgcattgtgcgatctggcgacgttcgacttcccctccggtgagtacggaacccggaaaatctggctgcaaaggatcgatacgctgttcggtgtgctgcgggaacgctgccgccgcgagtcggatgctgcgctgcgctgccggatggtccatgccatgtatacgctcgtttgcgggaccgtgtccggcgacgtctcgaaaaggaaagggggctgtttcgcaatggccgacgaactcgtccgggattgtctcggtggtaacgaaaagcgctcttctctccggccggacgaatcggaattgttgatccggacaggtgtttgtcattgtctgatcgacctgctttaccccggtccggacgccggcgacgaatatctgctgctcctgaaacgacagatttccggctggatcgccgaaatgaaccgggacggcagctggagcggcgtgtcgccggatgttgcgctggagcgtatcggcgtgatgaaccgttactcgtatgcgttcctcgacaaaacgaatgacagtgcggtaaaacggtcgttcgaatatttccggaactctttgccggttcccgaagacgccggcaacttcgacgaaaattacctctatactttagcccggttgtacgatacggcggttctgggcaatgcgtatgatccggaccgccgccttgcacggcgaatcgcccgcttcatgtacgattacagtcggactccgttctgctccgacgacgatcggttctgctgcgtctgctgtgtggttcgttatgtcgccgaacgaatcgacatttggcaatctgctgctacagagcgatatattgcataatgacagtcttgaatctttatcttgtttatactctctgcatattctacatattctacctgctgtcacggaaaataaataattggtatggcaacgcctctttgctacacaatcattattcctttcttcacggctcttctgttggtcggttggatacatccccgtctggtgaagatcgctctgctgaaaaacatcgtcgataatccggatgcccgtaaattgcagcgtacgccggttcctgtcctcggcggggtcgctgtctttttcggagtcgtgattgcgatcggatgtatgagctccgtcgttgattgctccggtctgccggtcgtaattatggccatgatggcgatgctctataccggcacgatggacgacattctgagtctttcaccgggtttgcgattcgtgatcgagatcgtcgtcgttttattgctgattttcgtcggcggttactgtatagacgattttcatggattgtggaacatcggccggttttcttattggtatgcagtgcctttgacggtcgttgcggcggtaggtattatcaatgccatcaacttggtagatggtgtcaacggtctctcgtccggctattgcattatggcatgtctgatcttcggcacgctcttctttcttgccggcgaagcgccgatgactatcttggccgcagtctcggtcggcgccctgattcccttttttctgcataatgttttcggcaaaacgtcgaaaatgttcatcggtgacggcggaacgcttgtcatgggcgttgtcatgtcggtttttgtaatcgcgatcctgcagaacgggtcgcgggtcgctgcctatgtgaatccgaacgtaggactggtgcctttcacgctggcggtattgtcggttcccgtattcgatacgctgcgggtgatgtcgacgcgcatattgaaagggacctccccgttccgtcccgataagacacacctgcatcatatgtttatcgacctcggatgctcccatgtggcgacgacactggctattctgggggtgaatatgtttgtcgtgttgtgctggtgggcgctggaagcttcgggcttttcgatcgccgtccagctgtatgcggttattgccgtaagcctgctggtcacttccggtctctaccatttcatgcagtggcatatctgccgcgatacgcgattcatgagggcgatgcggcggctgggctacaaaacccatatcagccgtacgggaattttcttctggttgcagcaggtaatggatagagtataaacatagtaataaattt

SEQ ID NO: 12088 - DNA, 664 bp, Unknown
  gut microbiota DNA sequence
actcatagcccaattcgcctatgagttccacttctttgagccaatcgaaatcggcatatacatacaactttttcatagattattctttcttggatgcacgttctcttgttttcaaactcaaatcttgcaaagcttttcccattttatcttctttggcaagcaatagaatatcatcgtcaagttgcaatgcgtacaaaacacgtagatagatccctattgcaactgtaggaatccctttttctattcgggacacagtaagcggtgaacaggtggcacgttcagcaacctgagccacactcagattccgacgtaagcgagccaacttaatctgctcgcccacaatctgcatcttctgctccaattttcgaggaagcttggttcccattgtattctttgccattactacatcaatttaaagtgcaaagcaactatgttaatgactttgctataatcaacctaccatataatatgcaaaggtaatactttttatttatttaatgatgtattacacatagaaaaatgcacgtcttggcataattaaccatatacataatctattttgagcaaaaacttccaaaaactaaatgccataatgctgtttgtaagcaccatatacacctacaaacaatatgttattcgttacaaatgatgcaaattgttcatc

SEQ ID NO: 12089 - DNA, 5768 bp, Unknown
  gut microbiota DNA sequence
gtcggagaggaagaagatccggcagacgcccacggcgatcagcagattcgccagccgccgtttccatgtgggttcgagacagatccatgccgtcagcaggtagagcgtcagcccggccagataccacggcagcgccgtcagcagaatccgcgcgaccagttcgggcgccagcagggcgtggaagtacccccacagcacggcggtttgcacgatgaacagcaatgccagcgctcccagcccgatgcctgacatcagcagaatcatcttccactgtggaaagggcaggtgaagcgtcagcttcagccgtttctgggccatttcggggacgaactgaaccactgcgagcaatacgcccagcagggccggcaggtattggagaatgtcgatgaagacaacttccttttcgagcatcacctcccagacgtgcgccgcacccttgaaggttatcacccgttggacgcgcagcagcgcataggcggtggctccgaagaggaacaatgcgctcagcggatagaagcagcgcattttgatccactctttgtagaatatggctttgatcataattcgggtttagtattttccggtcagtccgatgaaagcgtcttcgaggttcagcgtttcgccgcgcaggtcgctgcagacaatgcccgcgcgctccagcacgccctgtaccgtcgcaggggagtcgaacgaatagagttcggcgcgcccgttcacgacgctcgggtggtagaggccgtcgccggcggggatcgtgacgtcggcgcccggcgtgaaggtgtatcgccggaacgtgccgagcagttcgccgacgggcatctgtaccagaatgcttccgtaatccatgatgatacagtcgtccacgagcttttccatgtcctgaatgatgtgcgaggtaaggaaaacggtcttctcctcgctctgcgcatagtcgcgcaggtattccacgaacaggcggcggtaaccggagtccagtcccatcgagaagtcgtcgagcacgagcagatcggcgttctgggcgagaatcagccctaaggccacctgcgaacgctgtccgcacgacatgcgcgagatgcgctgccggggcgccaccttcagcatttccatcagtccgtaataggcgtcgcggttccagcggggataaaaccgcgcatagaaccgttcgatctgctcgatggtcatgaaggcgtactgcacgtgtccctcgatcagcagggcgatccgggcgcgggtttcgggccgcatcgtgcggatatcctcgccgaagatcagacactgtccggcgcgcggttggagatagccgctcagaatgttgatggtcgtggtttttccggtgccgtttttacccaaaagtccgaggatccgcccgcgcggaacctcgaaactcaggtctttgtatatcagccgctccccgtaacaatgggtgaggttgcggcattcgatgacagaatcggtcataaagaatggtcgttcttccggcttacttgatcagcgacgccttcgtattggactcgaagtcgttggtcgagttgttcgagtcgatgagtttgccgtcggaaccggtcttgcggatcaccgacttgccgaagcggtcggcatctccgtcggccgtaccgcaccatgcgtaacctgcgtcgagcgaagcgtcccacggggcgatgtagtattcgtcgcggcagcccgtgttcacggcgtcgagcacccattcgttaggcacgcggtagcagttgcgcagcggcatcgtgtagtccgagccgttcggggagtggaagatatactgggcgtcttcgagcgggtattcggcgaggaactgctctgcagtcaggccgacgggcggcatggcgatagccacggcgttgaagccgcggttgtggagcgcttggaccgtcaatgtcgaagcgtaccatttgtcgaggttgggcacgtcggggttgtcgatatccagatagttctcgttcgacgaaacgtcgtaccactcgaaatcggctttcgtggcgtcccacgagttcgggttgccgatggtgtggttctgggcgttgttgacgacgatcagcgactcgccggctttgaccagcacatcctgtccgttgccgggaatgcagtagaacgcattgcccgcacaacactccttgcggaagtccttgccttcgatcatctcgctgttcatgcccgaattgagtccgctcgaaaggatcagcatcatgccgtcggcatagaggtcttcgtcggagttgttacggatcttgatgtactggtcgcccagccacctgtcaggctctcccgtttcgggaagcgccgtgcctgtgaagtagatctcctcgatcacgaattcgccggcttgcagcgtgatgtcgctctgtttgatggttacggtcgccagaacggtgctcttgccgctccgcgtcacgttcacgacggtcgaacgttccgtccccgtttcgttctcatcgacggacagcaccagcgctttgcccgaagattcggcttcattgatctgaacccacgacgcagcatcggcgggaatattcacgtcgaaattttcctcgggcacgtttaccagcacattgccgccgagcgcgcgcaagatttcggatacgacgacgggattgaccgtttcttcgggatcgtcggtgcaggatgcgaagcccgctgcgaagagggccgtggtgagaattaagaaaagctttttcataattggtttttattattggtttgacaaatattggttcgatcgtttagaacaggatgccgaacgtcgccgtcagaacgtgttcggacaatcctccgctgtaaaaccggggcgtccaccccgcctcggcgaagcaggccagattccggctcaggcggcgttcggcccgcagggacacctcgggggcgacggcccggccgctcagccgcgccgccgtgtaagtcaggtattccgaaatgttgttcagcacgttgctgagcgaaacctcctcgtcgggcgagacgtaacagccgattcctgccgtcgctttcacgcgccactgcggacggagccattctgcgctgccgcgtaccgctccgcagaactgcgcgagccgcatccgccgtgccggataggcgtacgtggccgtggactgccgccattccgcgcggggactgagcatgtaattcaccgtgccgcgccgccattcgacggtcgcttcggcgtcggcgtgccagatacggttcttatacatcgcctgttcatcgacgatgacgctgtgtcccgtacggtcggctatcatttcgatactgcggcgcagttcatagccgcctccggcgcgcaggctccagcggccgctgcggtaggctgcggagagggtcgcctgacgggttttgagccgggttatggggaccgtgttgttggatttgttgagccgctccgtcgtaaggctttcgaatgcggcacgggcataccagcctttcgcgtgccgcggcatgagctgtgccgccagcagacaaccctttccgtcatagccgatgttgaaactctcgctgttcagtgaatagcgggtgtaataactgcccagtccggtcatatacagctcggaagagctggcgccgggcggatagaaaaagtctatgtcctgatcctgtttatagagccgcccctgcaggtccagccccaaaacgtactgagggaactgcatgcctacgccgagtttgatcgtgaaatccgacacgacgttgtggggccgcggatcgacctgacggtattcctgtccggcgcggtagtcgccccggatcgcaaggtcgaagcgtcccacccggtggacatagccgccgccgaaagcatattcctcggtcgagaggtttcctccggcggaatccgccgtgatgcagggatagagcagcaggtagtcggccgtggagttccagcagacgttgcggcggttgccgcggacgtaccgggcgtctgcccacgctgccgaccgctcgctgagccgccggtagctttcggcataaaatcccccatcgaaggctccgtcgcccagcggctgcagcagcgcctcctgctcacggcgcaggtcgatgcggagcgagatctgcgaaagcgactgttcgctgcggtagagcatcatcgcgggcgactccgtatgaaatccggctacggcccgttcgtcctccgcgctgaaaacggaagaacgctccaatacgccgagcgtatcgcgctgggcggaagcggcggcgggcagcagcgccagtatcgacaggaaaaaggccttcatcatcgtcagatcgattttagtaacaacacgatcgattcgctgtcctctacccaagtcattgctgctggaatctgattgtaatccgtgcagcgcagaatcttcttttctccggtcgaataggtcgcgtcggcttcgacgatgaacgtgtaaacccctttgcggagccgtattgtcgcgctgttctgttcggcggcgggaaatggcacccgctctccggagttgatattgtcgaagtaggagatgtccgtgcgtatttccagcttttcgacggggcggctgtccggcatcacgaaccggatggacagttcggtgaaaatcgaatcgtctttttcgcaggccgaaaacagcagtgcggagagcagaaacaggatccgtatggtagatttcatcatcatcgcattacagtttgaagttgagttccatgccgaaataggggctggaatagcggcgtaccagtgcgttggtctcgtttctgtacgaaggactgtatgtgaacagccggtttacgaaaatcgcaatgttgagccggtcgcggtaaagccgtttcgagattttgagattgacgttcatactgaaaggcgtgagacggtagagataggcttctttcgatgcgttgtcgtggatcatatgctgcaaaataccgtcggctgccgactcggccgtaaacggatgttcctgtaactgcaggtcgaggtagctggtcggcgcaggattgcaccattcggccttcatgccggaaaaccactggcattggaacgacgtggagaaaatcagccccagtttgggaatctgggtgtcgagcaggaaattggtgttgcatacttcgtgaaacgtgttgtcgtcctgatcgtaaagcccgatgtaaggatagggcgtcccttctgcgagctgtacggtcgtcaggacgtactggggttcgctgttctcatagcgggttttgaaataggcgcccgagacgatgagtttcgtggccagcgcccggatgcgccgcgtggagagcgagaattcgatgccctgcttgaacgtgcggcttccgttggtcttgacgccgacggtctggaataccgttttgtccttgtagggaagccattcgagctgcggcggtccggtgaactccatatccttgagcgatccggtgtcgtattcgcggtaggtccgggtgagtacgtcggtcgaggtgcggaatcccgaggtcatattctcccggaaataggttaccgacagtccgtatccgttccactccgcattgccgcgcacctcccatttgaagttccgcgccgctttcaggtcgtaattggtggggtcgtgcttgaagacttccacattgatacggcgtttcgattcgtcgtctgccgggaaatagttgagccgcgtgtaataggagtagtccggttcggggaagagctggtcgagcgtaggcgttttggtgtgccatcccgcgccgcccgcgaatgtgatgcgcatcgggtcgcctgccatgtcgaacgccggaagcgtcaccgagaggttggcacgcggatcgaaatggaattt

SEQ ID NO: 12090 - DNA, 35965 bp, Unknown
  gut microbiota DNA sequence
acgcagtccggccattatctcgatccgccactcgccggccgtaatcgtcgtattgtcctccagaaacgccgagagccggtgcagcgccggcagggcgtcgtaacgccgcggatgggaactcatcaggtcggtaaatgggcgcgtcacgtcgtaaagcagaccgccgccgtaatttttcgacatgttccattcggctccgatgcggatcgtgttgcggctcagcggggtgtcggctcccagcagggctaccgccttggcgttggcgtagaacggtttgttgtccacctgcagggtcgcttcatagcggaccggcagcacttccatatcgaagacgccctcttcgactgccgtgcgtatagggacgttgccgctgttcgctcggtaacgccagcggtcgatcaggtcgaattcggaagagacggaagcggaaaaatcgaagctgcggaaaaaattcgcacccttggattcggcggtgaaattcaccgccgcgacgacgttgttgtaactcgatttgtagcgttcgagggggatgcccgccgggccttcgtcgatatcccggtcgcttttttggcggtcgaaagagccggtgtagtcgagcgatccgcccaacgtgtaacggtaggccgaggtgctttcccagcgtttcttcatgcgccacgatccggtcgcacgctggtagttctggcgcgtattgcgcgggtcgtcgtgggagttgagccatgtcgcgccgacgttcatcgtcagcaggtcggccggagcgccccattcgaatcctttgccgacatagagcagctggctgcccagatccgctttgaagcgggcttcgaggttgcggcctccctccttgcgcttgatcttgatcagtccgctggtcagatcgccgtattcgaccgacggaatgccctgctgaatctctaccgaagctatttcatcggtcggcatcgtgcgcatgtcgacgcctctgttcaatgaaatattattgccgacggtcgttcccgaattgtatgtcatgcccgcgtcgttcgacatcggaattccgtccatgacgaacgaaacgccgagcgatgtagtctggtaatcgctgttcgaggtgccgatctcgcgcagatgaatgtggttcgaggaggaaaacgaggggtcggaggcccgtccgccgggcagcagttcgagcaagtccccgaaactcgacggctggatgtggttcatcgcgtcccggccgatatgcacgcccgagaccggtccccgcacttgggtcgccgtgattacgacctcgcggatctgcgtgtcgcttgtccggagccagacgatccgcagcatgtcgctgccgctgacggtccgtacctccatccgttgggagacatatccgatatatgagatatccgcattgtaggtattcgcgggcagggtgaaacgtgcccggccctcctcatcggtcgtcgtcgcgtaggcctttcccccccccgacataggagtcagcgccaccgtagcatacgccagcggattgtgcagggaatcggtaacttcgaacgtgatcccggcgtcgggccggccggactgcccgtacgtgtacgcaggcagcaggataaatagcaaatatttcaggagtagccgcatagttctgttttcacgggacaaaaatatagcgccccggcatatgcggcaatcgccatatcttggtaaattgcattgcaatcatcaccaataataatgagttgcgttcgtgcggcatcccatcataatgctatccggccgcgccaaaacccctaaaatccggtattgacggtccggtgggaatgctgtttctttgccgtaaaccaaaaacgacgaaattatgactggtatctttttcggcagtacgatgggcacgaccgaggccgtggctgcggatattgccaaacaattgggcgtcgcggacgccgatgtacacaatgtggccgatacgccggccggcgaagtgcagaaatacgacctgctcgtgctgggttcttcgacgtggggcgcaggcgaactgcaggacgactggtacggctttttggatcagctgaaggcgcaggatctgagcggtaaaaaggtggcgcttttcggctgcggcgacagcggttcctatcccgatacgttctgcgatgccgtcgggctgatttacgacggtttgcagcaaagcggctgcacgttcgtcggagcctatgcgcccgaagggtatgacgaaacaggttcgctggtctgccgcggcggaaagttcgtgggacttgccgtcgatgaaagcgcgcccgacaagaccgaccggcgggttgccgcatggtgcaaacagattaaaaacgagtaacgatgagcgccgaggagttcagccgttacgattcgatgaagctgttcctgcaccagatttacgagttccagaaaggtgtacggagtctggtgctctgcacgatgtgccgcacctgcgcttctctgctctccgagcggctggaaaggctgggtatcgcttaccggattcagtcggtgaccgacagcaaggtgaatctttacttcggcaaccgcatgtgtctggagaccgtggcgacattcatccacaagccgctcaacgaactctccgccgaggaggatttcatgctcggcgcgatgctcggctacgacatcgccgggcagtgcgaacgttattgcaaacgaaagtctccgggtgtttcatcagaacaggcggcggtcaactgaccgccgcctgttccttcctgatctgcgccgtgaacgaatcccccgcgccgacaccgtcggccacttcgacgtgcggcgtggcgacgtacgacatgccgtccggagtgaatacatggcttccgacggcgccgcaggtgagtatcacggtacggagtccgtatttttcgagcagggcgcggcactgcgcctgcggctcctgcgcctgtatgccgaacatccggcttacgacggtcaactcctcgtcgtttgttttcagaatattgctgcggcagagcgagtcgtggaccacctccggcgaatagaaatgctgccgcaggttgatgtcgaagatcttataatgtcccgctgcgcaaaaaacggaaccgcggaaaagccacagtcccgattctttgccgttgctctccgttattctgtttcgaaatcatgcgacagcttatgtccgttctcatcgacacgcaacgataccagatggagatgctctctggaaatgtcattatgcttgaaaacaatataaggttgatctccatatcccatacgttccatatactccttggcggtttcccgtaactgttcgcctgtcagtttgtcttcgggcgaaggattcagtaaaacatggaataccgtattggtcgttctgcggttggcttcgaggtatggccggaaactatccatacaagcgtcgatatccattcgcccgtgtttatcgaacggttcgagcatcttctgccagaggagcacttcggcttcatccttatccactttctccttgttataatacaacgctccaccgggcgatgctccggatctcatattcgcaaccactccttagcttgttttgcaaggttcagaatctcgatactgagggctttcagctcgcgggttcgctgctccagcatagcgatctgatacgggattgcgacgttggaaaagtgcgcattgacgacctttacgacctgattatgtaggctaagtacccggcgccttgtcttatttccaagataggtttcccaatactcgcctccgaaccggacgtacatcttccagcgtatccggctctccgctaatattgtcagtctaaaacgttccatgatgtatcttttgatgacagcttccacaaacggccatagtcttacgccgtctggcaatcatcagtttttcccaattctccttgcctttcagttctccaagtttacgcacatggtgcataaccagattatccgtagcaccgcacaactcacatttctgagctttcagcctgtctataaggcttgtggtgctgacgccgggcattggattcgggcatctgtcaaccgaccgatcataggaaggtctttttcttttgaacccttcattgtataggcgacgttcttttgctttgccgttttttaccgtatacccgactgtaaagactccgttgcgtttgtatttccggcaaatttgtcttactgtggttcggtatttcccggcaaaggttttgtacatactgtactgcatgatgtagtgaaaagtgttcagttcggaagcgttgttagctatcgagtaatagttgtaaaaccctctgatctcggcattgtaactgtcaaggatttcaaggtcgtcattattgataagttccgaccggtgcttgggaatccattgctcgtgcccgttatgatagctgaatttcagcaccccgagttccagcaattttttctttatcacttcggtcgttacctttaatctgaccttgtttccatacacacgggacaggcttccccgtttgttccgtttttgcaggttcgacttgcggacagtcacctcgtatccgaggaattttgcaggcttttcagtatgagtgacgagcgttttctcatccgatagttccaatgccagtctgtctgcaaggaaacgctttatatcgtccttgatctttacggcatcttctttacttacgataattccaatgaggaagtcgtcggcatacctcacatatttaagcctcttgaagtttccgtccatagggtcgaagcacggcatcgcggatcgggttttgtctatctctttgagccgtttgacgagcacttttctttctacattatttgtcgctgttttgagttcacgcataaccagcctcttttggtaagtgagaacttcgtattcacggtacgctcttaccctgttacccctgccgaatccggcggcatattctttcatgtacttatccagcttgtccaagtaaatgttcgccagtaccggactgataattccgccttgcggcatgtcgctgtacgttccatgaaatcgccattgttccagataacccgccctgaggaacttccggataagccgtatgaatcgttcgtcggagatacgttccttcaagatgtcgatcagaatatcatgattgacattgtcgaagaaaccttttatatctccttcgatgaaccacttcttacccgtaaaagtcttctgtacggcattcaatgcggtgtggcagctgcgatgcggacggaagccgtgcgaagtatcttcaaagtgaccttcgtaaatagcttccagtaccattcgtactacctcctgcaccagtttgtcgtcgaaagagggtacgccgagaggtcgtgtctttccgtttttcttcgggatgtgcactcttctcgatggctggggagagtagctttcgtctttcaacgaaaggatcagtttctcaatgcggggaaggctcatacggtcgatggtttctccgtctgcaccttgtgtcatattacccggcttggcatatattcgttgataagccagataatacatttcctcattgaaaagaatacgataaagcctctcaaacctgtattccgtggtttgactatgctttgtcagactgtttaatactcttgcgggacttctcataatgcctctcgcattttccgttaatcgtattaatgaatattagctgccgcccttcgtcatgtgcgaggttttccctcgcgcagactactacggaggctccgttaccatgccggatattcatagaccttcgtccaatagccttacggcattccggtttaggtaatccccgtttacgatataataactatggcacgacagattgtcggatatgacgtccgccttttactgtttattacagttgcgtcgtgataagttcttgctctctctgtccaactactacaatgagagtatcacgatatgacgagtatagttaccttaacgtcacagtttcgctaggtaccgctcaggctgtcattcaatcaatccggattttatcctcatatctgtctttcatcaccccattcagtcgcagtccggtaactgactgacttatggtttaccccgacatgctacactccctgtccggtttccctttcagataagtcggttgatgataggttatttgcaaagaacacttacctaatagcttgccatcgctatatttattatatcgccttgacgggcacacagttattccccagcttttgaaattggaaataaaagtcattcagccgggcaataaactgcactttcgaagggtcgcgtctgacgacgacgaactcttcgccgaagattcttttgacgataaaccggctgcggttatgctccgatccggctttacaaagcagttcgttgaagcggatattctgctcttcattaagccgaaacgagtatttataactcggcgttcgggggttcctgtcggtcatgtctgtcagttttcggtcggtatccatatatggcttaaaaaagagtcgcgactagggagcggccccggcctcgcagagcgagcacctttgtcggacaaatggcaatttgtcggacaaaggtacagctcgctcgcctcaagtgaggcgaaaaatccgtggcggaaaaattttcgaaaaatctttgcaaaacctccgctacggcttccgagagcgggtctttccccgttgcaatattacaaccgtgcgggcgccaaaacaaaccctcggtgcggactggagcggacatcgaaaccgaagcgttttaccctgttgcatattgcggcagaaaggaatttttcattattcggatacttgaatttatagctctctgacaacttctccgactttatcctcagcgataaatccgggaatgtacagaaatagaaaaatatagatttccagaaatctgaattaaaatataaatggctataaatatggaaattctcctttctgcaaaacaataaaaatctctaaatatcaaaaaatgatggaatcggcaagtatttcaatctgcaattagaaaggcggcgtgggaaaatcaactttcacagtactgctcgccagttacctgcatcacactttggggcaagacgttcttgttgtgaattatggctatcgggagggacatttgtaaagcagtcgcgtccggggcgcagaaagccgcctattccgacggtagcgaccagcacaacgccggggatggaaatacgcaaggctcgcccctcgggcgatttgcatggccttgcggattttcatctccggcgataaattccctgccggcggaaaaacttacatcgaaaattaccctgccattgacgaagcaagatcggaaaccgaattagctgtaagatcgtaggctattactgtgcgaccttgaagataccgttcagtttctcgctcaatgccgccatatcctgtccgatcttgtcgttggtgattttggcatagatttgagtcgtagtgatccgtttatgtcccagcatcttgctgacggtttccagaggtacgccctgcgagagcgtgaccgtcgtggcgaaggtatgccgcgccatgtggatcgtcgggttgaacgacagtccggcatgtctggcaacatgccgcaaggacatgttcagtgttttataagtgcctttaagcggaaaaacccggtcgcccgagaggtgcatctccttataacgctcgtagagcatttcggctataggaaggagtttgacccggaactgcgtacccgtcttctggcgtctgtcgataatccaccgctctccgctgtcgtctgtatggatgtccgcatgggtgagtttcaccacgtcggcatggctcaggcccgtaaaggcacaaaagacgaaggcgtcacggttgatgcccgtccggtaattgggaagttctgcgtccatgacggcctgtaattccgaagccgagaggtagcgacgttccgagtactccggcctcacgtagaatcctgtgaaagggtcggcaggaatccacccgttcttatacgccgtataggtcatcagcttcagtttcttgagcgtagaatggatcgtaccggaacgcattccttgtaccgaggagaggtagaccacgaacttttcgatgaaatcccgcttcagctctttgaaaggaatatcttttacacggtattcgtattcgaggaaagaggcaagccggttacggcgtttgcggtagtcgttatagctcgaataagtacggtctttgcccacacgtttgagaaagtctgcaaggtattcgtcgaaggtctgcaacagcaggcggcagtcgtcgcccataccgaggaaggcgttgcggactttttcggccgtgacatacgaatcccggtcgcagagacgttggtactgcttgccgatattggtcttgatattttccagcttttcattgatgcgctgcgattcgaggctcttaccggaagccttgttcgctttggcatcccagagtgaagaacgaacggtaagtttgcagctgaactgcgacatcgtgccgttaatggtgatacggcccatgacgggaacctgacccgatttctcggactgccttttcacatagaaaaggactttgaaagtactgcgttgcatgataacctgaactttgtggttttgttaaacgttaagtcaagttatttggtatgcggtaattcgatgcaacgaactgaaaacgaatgttttgatgcaaatcaaagcatttcgggcaggtaacggataagtaacgaaactcaccgttaaacctgcccgattctgcttttttattgctcggagcatatgcagaacagagaattaaatacttgtaaacaagatatttactctttcctgcgcttctctttacctacaaataccgaaccggtaacggatcggtacgaagatttgttctacggccgcaaagcgcaggagatttcccgcctgtgggcgacagagtacattgccggttgtgccgattgcgcttttcagtcgatttgcggggccgatcccgtgcggaactactccacgcagggcgatatgtacggattccggccgacctcgaccttctgccgaaaacacaaagcgattatcgaacacatcttcggcctgctggcggatcgtagggaagaggtgttgccgattttcaaaagttggatcacgggaacacggggataatgagagatacgatcgacataaattccaacgacaacgcgctgttcattacttcacagtgcaacaaccgctgcgtcatgtgctgccagccgcctttgctgcgaaacgatcttgacggctattttcagaaaaacatggctctgatcgactctgctccgcgggaactgcgttcgctcggaattacgggaggcgaaccgaccctgctcggggaccggctgttcgagctgcttcgccatattcgtttgaaactgccggaaaccgaaattcacctgctgacgaacggacgggcattcgccgacaaggagtatgcccgaaaactcgccgaatgcgatacggaaaagatacttctcggcattccgctccatgccgattatgcgggcgaccacgatgctatcacgcaggtgaaaggctctttcgaggagacaatgctcggcttgtataaccttggacgctatgatatcggaatcgaattgcgggtagtcattaccaagatgaactatctccggttaccgaagttgccggattttatctaccgcaatctgccgttcgtcgaattcatatcgctgatgggactggaatacacgggatatacgatcaaaaaccgggaagctgtctggattgatccgatggattatcaggcagaactcacgcaggcggttttggagctgcgggactggcgtatggacgtctcaatcttcaacctgccgcggtgcattctcccaggagcgctatggccctttgcccgcaaatccatatccgactggaaaacccaatacctcgatatttgtcgggaatgtgctgagcaatcggaatgttgcggattattcgcaacatcacgaatacaaagtaggggaattaaagtaataaaatgaaataaacgggcgaccgacatcctatgtgtctatgcaattagtcccatagtcccaagtataatgaattatacacgataaatataccgtcgaatagctttaatccagacgatatatccagcaccggacaagtggattccatcaacagttcgttctgccggaagttctccgttttgttgcatatcactccaaatgtcgatgaaagtcaatccgcggcgtccagccatttcgcgcaacaaggcattatatctgatgatccgctcattctgtcccccaaacattttttcattataggactcattcacgggcagaaggctctggatgtagattttcgtatgcggactttcacttgcaatgatatccagaagtcgctcatactgcttcagaagtttctcatatgatattttggaaaaaagcaggtcgttgatgccacccataatgaaaacggctttcggtttgccttgcagaatcgacggcaaacggttaatcatgcccgatatacagtctccgccgataccgcggttcattacgcgtattccccgaaagtattcgccccacaaaccacgctcggtcagactgttgcccagcatgactatatcgcttttcgtcacgggagtgatctctgagaatgcacgtctggagtgatagtattcattgtcgaaggtcagcgtgtcgcgctgagcttgaactgacgttgtcgctgctgcaagcagtgcgcacagaagaattatttttttcattgatccgttattttagaaattttccattgaaatcgaccggacgttcgaatgggtgcaatgccgattcgatcatccgggcagcctcgcgtcgggtaagcggttgggaactcttgcaaggggcaatatcgccgccggcattgcgcagtaattctgccgccaaagccgcagttagcggtgccggatcatccgaaacttcgacctgtggtgcatactcatgtaacccgcggctgaattctcccacagagagcgtccggtccggaaagaaccatgagcgattctcccacccgaacggctcaccgatcatccgcaatatacccgttacagcaatgcgttgtaacagttcgaaatcgggatcgttgggtgatacatcgtaaagcggcgccaaataaaccttttgagagagcagggcttcctgcaatctgcgtacagggacctcgcgtggtgtgcactccgcctttacggctaaagccgccaatattccggcagcctgtcctgtcaacagaacgaccggctgaagacgtgtcgaaccgttgatgagattcgagacagaaatcgccttatcggcaacaatcagattttcggtttcggagggaatcatcgcccccattggcactgcaaacgaaggaatcggagggaaagggattttcccaatctccggacgacaatcgtgatgatgatctacgggataatcacctacggaaattccggtacggtatagttgagaactgccatagcgatccgtaacgtcatttagtgtcaacattaccactccctccagtcggcggccttcgcggtgatagggaagatatgctaatccgtcggtagtgtcgaattcgtcatctgcaatgcccagatgccggaagcctaattcattctgaatgtaataaatgaaccgcaaagtcttttcgcgggcgggacgcaacgcctcggaacgttgcttgtaaggcatttcaacgatattcatgtagtaatcgttaccattgacaggccaattgatcataaatttgccattgggcagacggccgtaatcgagcatggttcccgcagagatctcctgacctgccgcagtgcggcaggcataagcaaattcggcagggtcataaccttcgggctgcataatggttctatccattcctttgccgtaatctttgagaatcgctacgaaggtcagatcctgaacgatatcattcgcccgctccggtgccaattcctcgcctgtcaggtcacatgcgtccattcccagccgataaggagtaccgctcatgggaagcgcatcgcccagatcagtcgcatcgattgcaacacgtgcagaaacggagagctgtttaccctgtccgtcgatgaacaaagcacccgttaccgtgtcgccggatttgaaaatttccacaagatggtagccgtgaaacacttcgagcaatggttccgcaccggccatggatttgaaaatactgtcggcaacatgcggttcgaaaagcgtattgcttacccagcctgtcgccagggcctttgtacctccgtaatggctgcggagtttttcacggaattcataccatagtccggatggtaagtgatgattgccgtcaatggctgatacgccttgtgccgtgagcattcctcccagcatcggagtcggctccgctacaagtgttgaaacaccctgccgggcagcagagagggccgcagtcgtacccgatgtcgtaccgccgataaccagcacatcaaccgtccggcgtatggttttgccgcatatcggctgtacttgtagcaggaagaatgccgccgcaactgccgtgatgaatccgaatcgtatgttattcatttcctcgtccgatcgatattattagcacttttcaagaatctgccaaatctggtacaatccgcgcggaacgtggaaacagcccttccatttgccgcctttcaacggcaacagaatttctccgcggcgattcagatagccgaaccattccggatatttcgggtccttgaaatgctcccacatataggcatcgagtttctcgaaccagttcaaagcctttttattacctgtcagccaatagcctttcaacatggctattgccgattcgagatgtacccaccataatttttggtcccattccaattgctgttggggatgccccagccgatccatgaaatagaaaatgccaccgaactcccggtcccagccgtattctatggtatgcaatgctatttcaagcgctcggtcaatcaagtcgcggcgattctgtcttattcccatatccatgacaaaccacattgcctccagcgaatgccccggattgatcgtgcggccctcgaatgaatcgacgagcgaattatccttcgcagaaacgttctccacaatcagtccaaggtctttttggtagaacacatccataatttcgtgcagacagttgtcgatcgtttcgtcgataagtccgggggcaatcagatgctcgatttcgagcatcaggttgcataagatcatcggtaatgcaaaatccttgattggacgtgttccggcatgtgccttgcaccatctacctttcggattctggcgcttttccagtatgcggtcgaatgttttcttagcgatgtaggcatattcttcgttgccggaggctttcgctaactgggcgaaagccattgttgcaaatgtatatgaaaaaatattatagggttcaacaaggggccgtccgtcacgagtcagcgagaaataccagttgtaattaccgtcatgtccgtattttttgagaaattcaccgccctgaactgcgcagtcgagccattcactgcgtttctcgaccttattgtaaagcattgagaaaagccacacctcgcgtccttgaagccaaatgaatttgtccgtatcgtatatgcttccgtcacggttcagacaactgaaatatccaccatattccttgtcctgtgaatgattcaaccaaaagggcaatacgctgtccaagagttccgatctgtacttgcctgctaactcctgaggattcataattatttgggattttgatttttgcatgattatttatgtcttttcattgttatttggattccagccagtacttctcaatgtcttcgagcgaacgtcccgtcgtttcgggtaccgctcgccacatgatcaggatataaggcacgcacattcctgcgaataagaagaacgtaccggccggggtcaggttttcgagcatccacggtgtaagttgcccgatcagataagtgcctatccataacgagaaaccggcgatggacatagccagtccgcgaatacgcgtgggatacatctccgacagcagtacgaatatcacagcgctgatcgacacggcgcaacagaagacataagccagaaagaagatgagcaggaattcagatgcgagttccctgcttgcaccgtacaaaaaatatgttccgatgcatagcagagaaaggatcatgcccgaaacgccccaatatactaatttcttgcggcctacgcgatcgataattaccagtgccaacaccgtagtcagcatattgaccagccccactaatacctgtgaaaggagtgaatcgctgccagacaagccggcgctttcgaatattgcaggaccgtagtacaatactgcatttacgcccatgaactgtcccagcatagcgatagagactcctataaaaacagcctttcggatacccggcttgagcagcagacgccattccgactgtgggtttgacggtgctgtttcccggatgacggtagtttgctccgaggcggcttctgatgagccgtaaatgcgctgcaatactatgtgcgcatgaacttcacaaccgcgcaacaagagccagcggggactttcgggaataaagaagagcacagcaaagaatagcaatgccggaatcatattgctaccgagcataccgcgccacatttccgtagccatgatctgctgtatccacggcgaactgtaatttacggtttcggcagccttcataatttgaaaattcacaaggtaggcactcaaaaatccaatggtgatggctaattggtagagagaaacgagcgttccgcgccatcgggagatggcgacctccgaaatgtatatcggagaaacgaccgacacgatgccgatgccgatacctccgacaatacggtaagcgaccagttgtgtgaaatcggagcatatcgcacagccgacagccgatacgataaagaatatggctgacagtatcattgttggtttacgtccaaagcggtcgctcaggattcctgcgacagctactccgcagattgaaccaatgagcgcacagccaacaaaccatccctgctgtatcgcgttgagcgtgaattgggcggcaacgctggagatggtgcccgagatgaccgccgtatcgtagccgaacaaaattccgccaatggctgcgatcagcgacaagaaaaccacatacttcgtgtttgtctgtgattccatgagttatccgatattaaaatactctttgtagcgctcgtagaggtgcccggcttgcaaataggccgactgtggcgacatgaagtgtgagaattcaaaggtgatcgccttgtcatagccggcacgctgcgcagcttcgagcttcatccgcaatttatcgaatttgataggcaggaatcggatcggcatgtcacggtcaaacgattcagcgtttgtccagcactgcatgccgtatttatcggcgagccgcttattgacggcgaagaatgcgtccagttcatcgtagtcgacgtgtccgtcctgaaacgcacaagcatccaccacatcgtgtatgcctgcgaatatctcgtcccactctttctcgtgctgttcgaccgatactgcttcttcctttgtcaatttcccgccgcccatgatcgcttttttcccgtctatccatggtgaaatgaaagtaggaagaccattggaaacatccttgcactgtttgcccagcgtgtggaaagcgccgatagctcctttggtagcccggcttatttcaccgctgatataccaccctccgaaatttctatacttgcggccatacatattccaaatctcttcgatcacaaacttgttgtgttcaacctcgtgcgacatgtcgcccgtatcccaatagcgccccgaatcataaaggccgaaatagaatgtcatgccgtattttgccgccagacgcaggaagagatcgaccaaatcgacggatggcatatagcatccctgcttaagcagataaggagacggataagtgatgaatttgcgataacccgaacggatcaggatgaccgtgtcaataccgatggccttcatatagcgaaaatcccggtcccactccttttcaccccagttctgatgagggatgtcgtgtgatatttcgtcgaggaaagtgcctgttatatgcaagccgttgttgtgcgtaatgaacttgtcgcctatgatgtccgaggattcgttcagcaacggttcggatgcccgtagaatgtgcggggacaggacggctgcggttcccgctgcggcaattttcttaataaaatttctacgtgtaatcatgatatattctgttattgggttcagcgaatgaaatcatctgaattcgtaatccgcgtaattatatccacgtgcttcgtaaattggcagcagactgttacgtaaccgagcccggaaagcaaaaaaatcggttttatgctgactccatgcaatctcggcggtggcagccaaacgcggcaacagcatatgttgtacgcgggcaaaatcggcaatgtattctgtccatgtattagcctgcaaccctttgaggtgtgtcagttggatatcttcgatatccgttgcgggatcgaatgaatagcatttctccaacgtaatactaccaccgatcgcaaggggttcgccggtcaattcgggattatccgtctggtaataatcaagataaaaatattcgcacggtgtcatgatgacatcattgccctgtctcgccgctgctatacctccctgcacacctcgccacgacatgattgtcgcggtttgggaaacccctccttcaagaatttcatcccatccgataatcttcttgtttttcgaattgagatatgcttcgatccggcttaccaaatagctttgcagctgggcttcaccgccgaggctcagttcctgaattctctgttggcaatatgggcattctttccacctgttgcgcggggcttcatcgccaccgatatggatgtattctcccggaaacaggtcgcacacttctgcgagtacgttttcgagaaactcgaatgtagattccttgccgacgcaaaatatctcttcacttatcccccagcgagtccaaaccttataattctcacccttacatccgagttggggatagctggccaaagcggcttgggcatgtccgggcatttcgatttccggaatgattgttacttggcgtgctgcggcataagcaacaacgtcacgaacttgctcttgtgtataaaatcccccatggggaataccgtcatactcttgactatgatagtgatgtccgacgacgctttcctgtcgctgcgagccgatgcgggtgagttcgggataacggcgaatttcgattctccagccttgatcgtcggtcaaatgccagtggaaattattaattttatgcatgcagataagatcgataaacgattttatctcttcaacggtgaaaaagtgacggcaacaatccaaatgtgcacctcgataagcgaaacggggccaatcttctatgcgaagggcagggaatgatatttttttcggagatgtgcgtgcttggaataaaagctgttcaagggtctgcaatccccaccatacgccctttacagaacctcctttgatgaggattttatcgttggttgaactatcgagcaggtaagcctcttctgccagcgacgaatcaatctgcaactttacgagagcattttgttccgacgatgtcgtactgaagccggtaaatccgtcttgaattatgcggtcgatgaaaatctcggcaagttgccgtagctcagtactggttccgtaaacggtttgtttctccggcaacgtgaacgtgcaaccggtttcccggttgcttataggatacggaacaatatcggctcgcgcaatggcatgtatctgagtgaacaggttcagtacgagaaccgctgttacgataaatttgtaattcatagaatagataccattattttatttcctgaaacgagattgcaaatcccccgcccggagcaagtgtcaaagcgagctccgaactgcagtctacctttttccgcacgaccgtataagcctgaggattcgtccggtagtcggcatccgctgcatcggcataaatcgtagcttcgtattttttacccctgtcgaggaacgcgagcggtacggagagtgttcttcggttttcgtccgttacgcctccggcaaaccactgtccggttttcttggcctgccgtgccacgacgatgtaatcgccgggttcagccatcagataccgactctgctgccaatccaccgcaacatctttgatgaactggaacgcatcgcagaaccgcatataatgttccggaaagtctgcggccatttgcagcggagagtacatcgtgagatacaacgcaagctgattagcaatcgtggcattgacacgggaagggttggatgggcagaactcactgagattcataacgaaaatccccggcgtataatccatagggcctccattcaggcgggtaaacggcagaatagtgacatgctggggatgaataccaccgaaagcctgatattcggtgcctttggcagactcgtttccgatcatattcggataggtgcggcaaagtcccgtgggtctgacggcctcatgtgcattgaccatgatatgatgtcgggccgcttgtttgacagcgtggagataatggttgttcatccattgcccgtagtgatgttctccccgtggataaatacttccaacatatccgctcttaacagcatcgtatccgtatttttccataagttcataggccgcagccatttgtctttcgtaactgcggacggccgacgaggtttcatggtgcatcatcagtttaactcccttggagcgggcataatcgttcaatgtcgcgatgtcgaaatcgggatagggagtgacgaaatcgaaaacatcctctttcgagaatttctcccaatcttcccaaccgatattccatccttctaccagcacttcgtcgaatccgttttcagctgcgaaatcgatgtatttgcgaatattggcattgtgggccgaatgtcggagggaaggtttgcatgaagtgtaatccgccgtcgcgattttcacggatgagcatttatcggtgtaggcccaactgccaataccgctgatcatctcccaccatacaccgacgtattttatcggccgaatccatgaaacatcgtcgtatgcacaaggctcgttcaggttgagcaccagtctggatgccagaattccgcatgcattgtccgcgacttgaatggttcgccacggcgtttgacacggtgtctgcattgttcctttccatccttgcgcatcaggagtcagtgacgcagtgaatgtcaggttgcgtggatttatttcgaggtgcatgcaggggtagtttaccaatgctgcttcgtggatgtttacataaacgccctcgtcggaacgcatttgcagggatgtttggaccgcgttgatcgaataaggggtgtggtgcggattcgatgtaagtgccgcaggcaacagtgccggtatttcggaaagacgcgattgcgtatattcatactcctgagtatcgtagtcgcccggtatccagaatgccgtataatctccggccatagcgaactgcgtcaattcatccttgattatgaaataatccaattcgggctgggcaggaaattcataacgaaatccgaggccatcattataaagtctgaagcggaggttcattttccgtccggaagaaacctgtcgaagatcgactttcagttcgttgtaatgattgcgaatacgggactcctcgccccagatcggttcccatgtttcatcgcagcagttacgttcggtattctgcaattcgaagccgtcgtggaacgatacgcacggatgaatgtcctttttgcggatagcaccgtcggcgatctcgatttttgaaacgtgtagatcgccgcgaagctcgaatccgagatcgctgtcgaggatgacaggacgctgtttgaagttgagtgaatagcggggagttcctgtatcggagaggtagaactccatccggaggtttttgtcaggagattcaagaatccgagactgagaaccgaccgctaatacgggcagcgcggctgcgtacaagtatattgcaaatcttaacatggcatcagaggacaggtgaaattatgaaatcgaatcgatattcgtttgccggaatccggtattcaggccgaggcagtgctccgaacgaattgacgcatccgagtcccatctgcatcagatcgaaattgacacaagtgtggccattcgtccgatcgaatggatgtgccagcggtttcagttccagcgagtgattgtacggagactgatgtgtttgccattcgactgggttataaggcgttgcgtaggcattaagttcccggcgcgagaaaggaagtgctgacgccgagaaattctccggggatgttatttccagcccgcggccgctgtcgtcgcatatcctgaaccatttcaaaccgatatgtgttccggattcctgcggatgtacataaccgtaatggtactggtcggcaacagattgcaaatagtgtcccacacgggcggaactttgccggtcgatataggtttcataagggcctttaccgtaaaaatcaagttttgaaaactgtcccggcatggtcatttccatacctacacgaaaaaactcaggcgcttcgatcagttttccggcattgcgcgtctccaatcttccggccaacttcccgtcgctgtaaatacgatacgtcatgatcactttcaggaactctccaatgggcttgtaggcgactgtaacaacggcgcaatcctcagttgtctctacagagaaatcggcaacctgccaatcgggccatgcccagagatccacgcgctgacggaataccttgcctccggcttcgaaaatttgcacgccgacatcgttgtcggtcacggcgcgcccaaaacaaggcatcagcggggtggaaaccattgctgttcccgcaacctcatagccagacaaggcccccgtcgtacggttgaaggtagccgaccatggtgcgcctgtcgtcattttgcctgagaatactacggaggatccgttttctgcaattgctggtatgccgtggataatctccggcgcggattgcagtccgtcggaaatcaatatctgttcatgtgccagttctgttccggccggaaggattccgtctctgcgtttgagcgtatagcggacattgagatagatgtcggtcgcgttcagattttcgaagccggatgcttcgaatatatctttctcggtatagcctagtgtcagtgttttctttgactgtggctgcacgtcgagttccccgatacttccagacagaataggtttaccgttgcatgtgatttcccattccattgcatagcgggatagatcgataaaggaatattcgttgtaaatgtggattttgccgttcagcgcctcttcgggagtggcgaatgtgtgaatcgaacgaagctgataggcgacttcgtgggcgtgcggatgcagtgtccggtctgcagccacgagtccgttacagttgaatgatccgtctgaagggtcatagtcgttgtaatcgcctccgaaggtgaacagatgatccgtccctcgagtttttggatcgacggaccggtagagagcctgatccgcaaaatcccaaatgcagccgccctgaaaagaggggtatttgcgtatgagatcccagtactcccgaaatccgcccatggagttgcccatggcatgggcgtactcgcacaaaatcagtggtcgcaccggattggcggcggcgtactgctcgcacatttcgtaactgctgtacatcggacagaaaatatccgtattccggtccagaaccgcacgctcgtattgcaccggccgggtcgggtcattggacttgacccagtcgtaggccttttcaaaattgattccgttgcctgcttcgttaccgagactccaaacgatgatactcggatgattacggtctctgaggaccattcgggatacccggtcgagatgggctgcttcgtatgcagggtctttggcaagcgttgtctcttcgtaacccataccgtgagattcgatattcgcctcgtcgatgacgtacagaccatatcggtcgcagagttcataccagcgcgaatcgttcggatagtgactggttcgtacagtgttaatgttcagctgcttcatgatctctatatcgcgaatcatctcctcttctgaaacgacatagccacggtgtggattcatttcatggcggtttacgcccttgaccagaataggatgaccattcacgagaagctgtcccgatgtgatgttcacatcccgaaagccgatgtacagcgaatcgatttcagtaaaggattttccgttgaaaggatttactgtcataagatacagctccggagtttccgcagtccacggtttgaccgcaggcagcgaagcagttttgctgaacagtcttagtccctctgatgaggtataaacggcggcttcagtcgtatagtccaatgcgggaatgctcacccgaacgtattttacaccacaggttgtaaggattttccacgataactcgccggatgcagaggcctctacctgaatatcctccacgcgatctgtggggcgggcataaatatacgtatcacgggcaattcctgtcattcgccagaaatcctgatcctccagatatgtgccgtcgcaccagcggaagatttcgaacgcgacctcatttccggttccggttcggacgaatttcgtaatgtcgaattcggcttcgagtttactgtcctcgctgtatccgacttcatgaccattgatccatacgcggacgttggaagttgccgaaccgatatgcaggaaaatatctttgccattccaagatcgatcgacagaaaatgtacgcttgtactgaccgacatggttccgatcggtagggacgaaagggggattgttgtcgtaatgtcccctccacgcataaccgatatttagatatacaggatcgccgtatccgttcagttcccacatccccggtacaggcatctcgtcccatccggaaacatctgtcctaacagaaaagaaatcgcgggaacgttcctccggtgttgcgtaccatttgaatttccatagtccattgagcgatagcgtcgggctgtcggttttgaaggaggagcgcatttgaagccggtttcgctcgaatatggcaggattctgccaatcctcgattcgtccggaagctttgcctgccgccgatacttgcagcgaatgcagaagcgcgatgctcccgatacaaacggtcagaatatatgtgcatgtcatgttcatgaagatctcggagtgttattttatttttatttcgtcgatgccaatacgcctgagaacatctcgtgccagcatgggtttatccgtcgtcaactggtctactcccattctgaaaagatgctccatatcttcggctccatctacggtccagacatttacgctcatcgcgttgttgcgggctttggtataccattcgggattttcaagcatagtcctgaaccatgtatcgatacctttgatgccatgttctgcgatctggtcgggatcgcggtcgtcacccaaatactgaacaatgaatccgggggctgcggcagttatggtcttgcatgctccaaggctgaacgagatgaagatcacacgttctggagaaaacaattcatgggctttcagccgttcgatacagccatgaaccgctctggtttccaattcccatgaagaatgccatttgatttcgagaaccagcacggtcttaggatatttttcagcttgctcaaggtattggtcaagtgtcgggataggttcgccgttttttaatcggacatccttgaattccgagtaaggatgctgatcgatcttctttccattgatttccccatcgtggaatacgagaatctcaccgtcggaggtcatgttgatgtcgaattcgctgccccagaatcctgctttttgggcgcacttcaatgctgcaacagaattcggagtgtagcctgcttttttgcagttccagtagccccggtgtgcaactattgccgtgcctctgggttgggccgcgcaaaatgtcgttgccaaaacggtcagtatggcggtaagtattgtttttcccatggtatttattttttcgatcatgattattggttattcaggtttttgatccggcaaacggcatggacgggttaccacgaaattgcagaaatcatggtagagcgcttgatctttctcattatcggaatatttcagcgccctaagagctttttgcccttgataatatgccaaccttgattcggcccaatgtccggattcccggaaaaccgtcatataatcacggagccgggaccctcggccgaagttctccaaagcggcttcgtcgaactctacctccatatccattccggcggccgcagcttcggcacaggcggtacggagtcgttcatacggaatcttgatcgagaagaagtagttcggctggtaataagcgtagctgaaccctttctctttccatgatgtgtagccgggagcatgaaaataaggtatccagcagaggctgtacctcttttctgccaaataggatgaaacccgattcaaaagccgactgctggttttgctctcctccgttacccaatagaatcctgccaattccacatatttgtaccgctttcccgcatatcgttccaaaacccggtctatataccatttgcacgcgagaaactgatcctcttcgtcggaaaagtccatcacccgaccgttgactactccccagtaggttgttccacccgtttcggcgatcggatttttatagacgatcggattaggaatcgagataataacttggcgtttagtcgccggggccccgagtgttcgtgcgacctcttccacggattgctcgatagcatcaatcgcatgcccctcggaaaaatagtagttaataagtttgagccagtccgcttgtgcggcagcctgcaggtaggaaccgtccgtatccttatgccccggatcgaacgccacttcagcgctgcccgttccgaaatcccgaatttcgagaagcaaaaatccgtcgaaaagccaatgcgaatttccggagcggtccgtatagctcacatagtccctgacgtattctgtatcccagtaagaactctgggtggttccggaatagagcaataccatgtcagttgccgtgaatgcgaccttgccggtctcttttcgggactttgccgagagcgactgtgcgaatagcagagcggcaaatattatggtgcatatatgtccgaatcgtttcattgcgcattcgtttattttttgaaaaagccgattgtggatttgactttccggttgccgcccgtctggtcgttcacgtgtttcgaaccgaccatcatgccggtcgaaccgccgccgtcgaggttcagcgcatcgacgcatccaagacctttcaggatcatggccaattcggtcagggttgcaccgccactggccggaatccttccgtcacaaatgaaaaggatcaccctgccgtcagctgtccggcctacggccgttctgtcaggagtaactgcaggaccgaatatgtcgtacggtatgatctcataattgttgagataatactcagttccttttcccgtttccgtgaaatcgaacggacacttgccgtttttcagcaggatgggacctgcaccgatagcataacggggattccataccgaatgaaccgtcggattgacggaagagactacgctgtacttcgcttcacctttgacggagggaagcggacgttcgaagaaatagtgtgctccgtttgccgatccggcccagtaaacggccggtttttccgaagcgtcgacgccgaagatacctcgtgtcacgtgataaagcaccttgttttccgcatcgttgcgaagcgaaccttggacatcgggaacgtatcctacgggggaggagttgacataagcaaggcctacatgatttgtgctgtaaaaatatccgccgttggtcatgacatagcagtcgccgttaaaagaggcggcctgctgatcgatagtcgtcaaagcagagggaatattcacgcgcagcccaacagtccctttcgaaaggtcggcaatggcataccaagcgtggaaatttccgccgttgagtttgtcggttgtttcgtaaacggaaatctctgccggcagtgtagtggttgccagttttgtccagctcaatacgatcggttttggctccgcacctaacgaggctgtcagaacatcgctgtaataggtttctccgcccgatttgagataaactctgaaattgtaacttttaccgtaatccagcagaacattggagacgacctgttgaatcgtcgtgccttcggacacgattgcgggaccgtcttgatgagcttcttttccgtccgaactccaacagatgccgcatatggcattgcttgtcttgtcgaggttctgtaatgaatattcgaatgcaatgcacgatgcggttgaaacgggatttccgacaaatgtcgcacttggaagtgtaaggtcccggaacgtaaactgcggcgaataggcgatctctgaatcttcgtttcgggttcggccgtcggcgcggactccgaaatagtaggatttacccgattccaagccagtggaaatcatatattcttccgcattttgagctgtgaagccgatgcgtaccgggtagtcgcctgcgttctctttcaaccacacggagaagccgctttctccttcgctgttgtcttgccaactgatttttacccggcagtcatctatctgttcagcaatgatttccgagggggctgaaagtgcataactctgcgaaaccgttttttccgagccggagcaccccgtcgccgtcaggaggacgactattatccagtaaccgatatccgattttattaaatacttcatcaaatgaaaacttgtttctgaacagcgggaataacctgagcgcatgtgctcaggttattccgctatgaatcatgttattcgtatttgtaaagcgaaacttcgctcagcgtcagccagtggattcgtcccgtccaccattgattcagttcggtttttccgatcgcatagccgttcgacagcatcctgaaacggtagtaacgtgcctccaccgtctgatcttcgggtatttccagcgtatcgccgttggcgatgtattcagagtactctttggcagcaatcggtttcaatacttggtataaatgcgaaacgtcaactttacccaacagtttccagttggtccagtcggcttccggttcgttggctgagccgacgtaggcatagatttcatagaccatcgggtccatttccgaatagttgtaatagtgatagctgacgaattttgcaaggcgcatcggctcgccggcatcgatcgtgaaggaatccttgtgaccagcattgaactgatcgaccgaggtattaagttcccagtgcttgtaggccatgtctgctccttctatattgcaggtgtgatagtcggacttatttaccatccatttcccgtcgaaaagatactcgcttcctacgttgttatttgccggaacgacaccgtcattttctagcacgaacgcccgcattttcgatttgtccgctagaatgacgagcggttcgtcggaaatgggctgaatctccagtatcaaggcaagcgtagcataggtcggcgacgagaacgtgattttggcgttgacgtcagaggcagtgattttaccggggtcgaggtcgaatacgagctgtgtcgaggttttggaggcttctgacatccacgctccgtccataaccatgtaggtccagtcttctacattggaagagatgtcaacggtaagtttcatccccttctttacctctacggattcgggtgctgttgccgagaacttaacgaaatcgaccggaagaatctctactgatttggtgaatacaggatcggacggtgaagtgaagattatcgacgctggttttgtcacatcgaacttaacggaaggatcgaggtcgaaggtgagcgacttttcatctttggaggcctctttcaaccagtcgccgtcagtgagcgtataggtccagtcgtcggtattcgacgaaattttcagcgtcaattgtttgcctttctcgacgactgcacttgtcggtgcttcgatatgcatttcggccgtataagcagcctgagaaaccggaacacggacggtagcgccgtcggcatagacgaattccaaagtcgaaatgcgttctgctccggtagtgttgcgttcaacgccgattttcagcgtcgtttttccgctcccatgcttcggtgtaattttgaaccacgggtcggataccgtcatcttccaagctacgttcgaagagacttcgaatgtcgtgattgtggcatccactcccaaagagatggattccgggacggtgatctgcgggtcggggtctttctcacaggctacgaacgataacgcccaaacagccaacagaatgagtttatagattttcatggattgataatattactgtttgtaaatttttttttgtctttcggagatgatcgtcgcgatgcgtttgaaaaacgcccgttccgaagcgatcccttgttgccaatattcgagtgaggttgcaccgtaataggtgaggtcctgtgtgttgaaaattcccgattcttcgtaagcatcgacatagtcggcatttcgttgaagcggataatttgaatcgaactccacttctacgcccattccaagggcggcagcctcttttatgcagtcgaaaagacgttgtgtagtgagttccggatggaaaagataattaggctgataccaagccctgtcgaacccgtaatccttccagtccgcatatccgaatgcttcgtaataaggaatccagtagaaatacagattcttggaatggatatagtccgccacctgcttcatgtgcttcggaatgaaccctccgttttccgtcagccaatagaaacctgcaagctggatgttctcgaactctttgcatgcgaatttctctaagacacgatcaacataccatttgcagcttgtgatacggtctgagaagttgttaaaatccatttcttgtccatcgatttcaccccaatcagtttggccttgctgcggatcgggcatgaagatgacgaccttacgccggtgaaaggatcccggcatttcgacctttatctctccgatggcatcgttcaaagccggtatcgcttgtttgtcggtcagaaaataatccagaatatcgagccagtcttgcttgacggtgggagcatggcctgcagcagtcatgaacgaacggcccttgtaatagcttcccgtgaagacaaaaccgtcgaaaagccatacgggcgtatcattttcttcccagacgacgagtttccgaaaacgttccttattatagatcctactgttgcccacgtcgccgtcgtagatcaacagcatgtcatggatcggagcagctccgatagtcttaccgaaatgttgttcgattggaatttcaaccgaacatccgccatcttcaacagagaagacgattcgggcatttcgtactttttgttctgtgttgacggaaacatgcaggacggcggttgctgacgaagttgcagatatggagagccagtcgacattgtttccttccacacaaacactccattttgtattggaacggattacaaatgtttcggtaaaagccccgaaagcgagcaatagggactttatcgcaccaccggtttgcgtagtaaccgaaatatagttcggttcagggacgggttcgggcacaggtgcgggagacggcacaccgtcgtcttgtccgcatgcacaaaatgcgcatgcgaacaaaaacgacagaaggattcgatatcccggtttcattattcgttgtcgatattataacgccaaagctctatttcggagatcgccatccagtatttccgtcccgaccaatattgatgcatggccgtgccaaatgcttcatagaaatttttgaccatcttgaagcgataataacgggcttcgggaacatcaccgtacttgaattcgaggggggtgccatactgtgtcaaatcgttttccgatccggcttcagcatttttcgtgatttcccatttcgccgaatcgtcagcctctccgatcttcacccaattcgtccagtcccccgacggggtgcccgccagtggccatgcgtaaatttcaaacacggccggagagttgttttcatagggccaataaggccatacgagcatcttcgaaagacggacttgcgctccgacatcaaatgtgaacgaattgccgtgtccttccggagcaggggtcgccatatcccatccgaaatatttgtaccccacttcggaataagcggcttttttggacatccatttgccgtcaaaaagatagacgtggttttcaggcttgatgactgcatcaccgggcagatccgccactacactgcattgtgtacggtcgatttgtgccgtagcagcctttatggcagaaaccgaataggcgaagtcttcaacttggttgttgagtgtaaaagtataggggttggcaaggtcgatcgtagtcgggcccttgggggcggcatttccgagaatcgtccgttcgtgatagaggatgtcgatgcttacctgtttgaaatcgttcgccttgatgaagatgaacttgatttcatgcgccgagttatccactgtgccaacaacggtttcgctaccgcatgtggccgtcgctgactgaaccatctcctgcagggcgtgcgttgggatgaattccgagaattccgcatcctgatcgcaggaggcgaaaaagccggccgcagtcaggatgactcctgaaaatatcgaatataatatgtgtttcattttgttaaatttgttatgctaccaccaaggattctgaaccagagccggactcttttcgatctcgttctgaggaatggggaacaggtagtactctttccggaatacgcgtgtttcgaaagccgttcgggtgtagaattccgtcgatttgaagttattggtcgatggattacctgcacgtatcgaaagtccccacatgcggcctccgtcgccgtatttccgcttgtccttcgcgtcgcccgtatcctcggtcgaggagagccagcgtcgccgagtcgtataatagcggtctccttcgaaattgagttcgatctgacgttcgcgaagaatgtactcgcgctgctgcttcttatcccctctaatttcgggataggtctcgaaaatactgggcagaccggcacgagttcggatctgatcccaatatttttcgatatccgtattattgggatcatattcgttgagagcctcgatatagtcgagcagtatctgagcgtaacgaatgtagatcgagacatatttgccgggcatcgtgtactcgtaaaagttggcatttacgatccgtttctggggcaggaatcccgtcatcgagaagttttgtcccgaacctgagttgcttgttccgccataatagagctctacacgcccccatccatcctgctggctggcatttacagcattatacctgtttcggagcgatgcgtcggtagagatcgaaagcactgctcggtgattgtagttgatcgaagcgtagaaacgagcttcacggttgcagaacatgttccagtcacccgacgaatggccccatgcatcaagattcataaggtcttcaagccattttttacgtccgttattcgtatcttccgtatttacgcggccattggggttgtaatgagggccgtccttggttgcaaaaccttcttcgacataattcgacagggggtcatcgatcgttcgtccgttttccatgtagaaagcatccaccagacgcaaggtgggccccacgccgcccatgttattgttaacgcccgtcgggaggcagtgcaccatccaaccatagcgctctcctcgatcattccaagcaacggttccctgatcgattgatccgaagatgatctcggaattccaaccgttattgaaaagatcgtaataagatttgtacgggttgaatgcggaggagttaatgtcggcattcgtatagagtttgagtccggatgtcgaagcataggtctcggcgcagtcgatgacggctttggctgcgtcggcagccatttcccatttttttggatcgtaaacagtatttacgagcggtgtcccgtccttgttgacaaaatctgcatattcctgattgccgttccattgaggagaggcagccagtaacagcatggaggatttcacggcacgacaagctggaatagtagcacgccccaattcgtccgctcccgaagcatatcccatggggaggagcgtttccgcccgatccatcaattcgcagacataggagacgcattcttcaaaaggcgtacgcggcatattcccgaaatccgtactgttggacatctcctgtttgagaagaactaccgggccgtactggcgcagcaacagaaaataataatagccgcgcaggaaaagggcctcgccaagatagcggtttcgcagatcaggggcgagttcactgcatttatccacattgttctcaaatacgaacgttgcgcggatagctttataataggtcgcccatttgttgtaaaaattggtggagggattccagttcccttggttgatgccgtaggttggataagccgaccatgtaatgtcgcactcgtccgagcatcccagccacggatcgtcctgatgcagacggtccatcggaagcgcagcataacagttggtcagatacttgagcacctcgtttcggttggaccagaccattgtatcggtcttcatgtcatcgggttccttgtccagaaattcacaccctatgaataacaaggcaaccagtaggattatagtatgtttcatcattaatctcaattaaaaagtaagtctaacgccgatattgaacttgcgtgaaagcggatatctgctaccatcgctcgatccggtttccggatcccacatcttccatggcgagaagagcgcgaggttgctgccaacgaaatagacgcggataccttgacatccccatgacttcagagctttgccgcggaaagtgtagcccagctccagatcggaaaggcgcaacagactgccatcgtaaatgttccgggtggatgcatattggttgttggtcgatttggtcgccgacagccttgggtagaaagcgcggggattgggattgtcgacggtccagcgatccagtgccttttcgaacagattgccttgcaggcccgtgttgaacgggaagaacgatccaccaagcgcataggagacgtgagcctgtccgcggaagaatacgccaaaatccagtcctttccaattaagctgaaggccaaagccgtagttaatttcgggtatcgacgaatagccaatggcgacttcgtcgtggtagtctaccactccgtctttattatagtccagatacttgacatcgccgggacgtaccgtgccgaatttttgttcgggactgagatcgatttcatcctgatcttcgaacagtcctagtgcaatcaggccaaactgctggttgactggatgtcccgttcgcatgcgccatgcatccgtcggcgcttcgtccttctccgtgattttattgcgagcaaacgagaagttaccgtatactcggtattttacggggcctatgtggtgtgaaaattcagccgtggtttcgaaaccgtggttagacattttacccatgttggccagcggttgattgttcaaaccagcgatgccggaaacggtgttgcgctgaatgagaatatcccatcggtcttcttggaagtagtcgaaatcgagtgagattgcagatttgaacagcttgatctccagacctacatctttcttaaatcctttttcccatgtcagatcgccgacccccaattgatcttcgccaatgccgtagtagagcgtggcgcttgggccgaagcgatgtcctccgagaccgtttccccaagtgctcaggtagccgaaacgggatgcgctgagcctgtcggcacctaatgcgtcagagccgaccagaccgaacgaggcacgtactttgaggtgattgatccagtctattttccagaatttttcgttggaaatcagataacctacggctcctgcagggaatacgccgaaacgataaccttttttgaaattctccgatccgttgtatcccatgttgaactcgacgaaatacttgtcggcatacgaataagtagcccggaaagcgagaccctgccagcgatacggaagtgccttgatggaagttgctgcttcgaggttattgaaactacgctgatagtacatggccatagctcctacacgatgtttgtcgaaagccctgtcgtagttgagttgcgctttgatctcatctgcccgatcgccgccgtttatatgggcatagttgagatattcgtctccagtacggatctgtaccagattatataagcccgtgtcgtcattgattccattcactgcataaagcgatgatagtttaccgcgcgcctgaatggaagtcgtgttgacatcgtaagagaaggaagctgtgaaattcaatcccggagtgatgaacttaagatcctgcttgagcgatatttggctcatgatctgcgtccggtaggtcttgttatatcccgaaccgaacaggcgttctgcaggattacccacgccagtcgagagcggtgcgccccagccccattccattttgccgaactcatcgtaaccgagcggtacgcgtacgggggtcgagatcgggtcctgcttataactcatcgtgaagagttccgtagcctgggactgataattgttgtttgctgtaacggttcgcggctgatgggcgtccgtcatgttggcgccgatttcaagtgcgagcgtggtcgtcttggtcagcgtcatgtcaatattcgaacggaaattgtaacgcgtgagatgaatattggtactgtaatccgtgtcgggattgttatacaggttgccattatcgcgcagatagcttgccgttacatagtaacgtgcccgctcgccaccgccccgcacattgaccgatacctgagaattcgaactgtatttcgtgaaaagttcgtcgaaccagttgacattgggataaagatagggatcggcgccagaggcggtcatccggatctgttccggagtatagagctctgtgccattggcttcgttagcaagccgcatgtagttggcaccatcgagcagtttgggcatattcaccaaattggagataccgctctcaattttgacatcgatagcaggcttttgtgcaataccgcggcgggtagttaccagaacgactccatttgcggctcgcactccgtaaacggctgttgcggatgcatccttcagaattgagatattttcgatttcctcgatggagaggtcggacatggaacgttccacgccgtctaccagcaccagcggagcgctcgaattaagcgatgagataccacgaatccagaaatcggcattatccatgccaggttcgccggttcgttgtacaacgacggctcctgccacttttccggcaagggcattggtaaggttacgctgtggaatctgaagattgtctttggctactgatgagatggccccgatgacactagcttttcgctgatggcccatgccgacgacaacggcagcctccatttcgagtgcgtcgtcctgcaggaaaacatctaaagccagagatttaggaacggcaactttctgtgatttgtagccgagactggaaaattcgagaatagcgccgattttgggaacttcgatgacataataaccgtttgcatcggtagtggcgccccggctggtcccggaaagaattacggccacacctgcgaccggctgaccattgctgtcaagaactttgccttttgcgatgagtttttcttgtccggccggaaccgtggtcagggattccgaacttgagatgccgccggtttcagcagcaagtgagggaaacgataataaagccgctaataataaggttacagatcgtaaaattccccccccc

SEQ ID NO: 12091 - DNA, 6457 bp, Unknown
  gut microbiota DNA sequence
gtgatttggttgttttcttgttcgatttggtcgcgttttccggaacaaaaataaaaagtattcttccaaagtgtttggtaatttgaaggtcaaaataattaaaaaaagacacttttttatttcttaaaaagcaaggggtgttagtataatagtatattatactgaaaacaatatatttatgtgtctttttttaggattgactgtttataaagtttcttttttaataatgcggattatttatgcaattaggttttttatttcttttcgatttattatttttgccaagcgtaataatagtaaagtaatgtcacatcctttcatgtctgcatcccatgatggcgatctgggttattttgtgcgaaatatcattctgaattctgtttttcagaaggggcaattcatcattcccgatattgccgaccaaaccggttttagcgttacgacaatagccaaatatgtctccgaactctatgcaaaggatattttggaaaaaaaagattgtctgaagacaaataaacggggaagaaatccgattctgtatcaagtaaaatctgaaagatattattttttaggtgttgatctcaagcctttcgaattgataatcgggcttatgaaccttacgggagaaatggtatgcatagaacgtatcacggacttccgttttgaaaatacgcataatatattggatgaaatatgtacgcatatttcacagttcatattaaagtttcaaggacggaatgtcggcaaaatagtgggtatcaacttcaacattggagggcgggtcaattcgcatttaggaacgagtgccacgatttttaatttcgaggaaacgcgtgaagtgccactgacttttctgctcaacgaacgtctgggcattccggttttcattgagaacgatactaaagcgatggcctacggagagtatgtgtctgaaaacaattcatcacaggagaatgtgatttatgtcaacgtcggatggggattgggactctgcattatcatagacggagaaatatattacggaaaagatggttattcgggagaattcgggcatatccatatgtatgaaaataatgtgatgtgccattgtggaaaaaagggatgcattgaaacggaaatatcgggaagtgctgtttgccgtaaaatcgtagagagaatccataatcacgaagcgtcggtcctttcgaaaaaggtgtggagtggaaatgttataacgatagaggatattattgaagctgcaaaactggaagatccgctttgcatcgagctggtgactcaggctgggagtgaacttggacatcagttagccggcctaattaaccttttgaatcccgatcgtatcattatcggcggtaggatgtccgaaatcgcatcttactattttttgcagccggtaaaacttgccgtgcacaaatattcccttcggttgatgactcagcatctttccatcgtcccctctcggttgggtgtcgatgccggagttataggggcctgtttgatagcacgaaaaaagatgatatggaacaaattgtcgatatttgagggataaaagatatcgaatatagtatccacaaacagtcttttatttgtatcatattcgtctttggctcgaaagaagcagcatgtcaattccatactttcggttaattttcctctggcgaaaggtttagagaaacacggaagggcttattaatcattcttcgtgagcccaaccttatattcgcaaccattccttagcttgtttggcaaggttcagtatctcgatactaagggctttcaattccctcgtacgctgttccaatgcggcgatctgatgcgggattgcaatgttggcgaagtgcgcattgatgacctttacgacctgattgtagttgttggcgagtttctgaaattggaaataaaagtcgttcaaacgggcgacgaattgtgtcttcgagggatcacgtttaatgactacgaactcctcgccgaagatttttttgacgataaaccagctgcgattatgttccagtcctgccttacaaagcaacttattgaaacgaatattctgcccttcattgagccggaaagaatacttgtaactcggtgttcagggcttcccatcggttacgtctgtcagttttcggtgggtatccataatatcggttcaaaaggcgttcgactcgggagaacgcccggcctcgcagagcgagcgtttttgtccgacaaaccaaaggttgtcggacaaaaacacagctcgctaccctctggcgagggtaaaggtccgccgcagtaaatttttaccgatggtttcggaagttctccgttacgggtcttgtggccgggtcggttcccgatgtaatattacaaccgtctggagatgaaaaaaaagcccgctgaacggactggagcgggcaccggaatcgaagtatttcggtcggttgtatatgccattgaaacaaatattcggataaagaaacagacggttggacaaatatttatcggaataatcacccggacatgcggatgattcgatgcagaaacagagaaatatataattcaagaaataaatatctaaacaaatctgcatttatacggcagtttatcgaagcaggccgcgaaagaaatctctgttgcaactatttggtttctgatatgcgtgtgttgtgaagcggctgccgtccggtccgcagagtgtgcgacggtagcgaccagcaaaacgctggggatggaaatccacaaggctcgcccttcgagcgattcgcatggccttgcgtatttccatctccggtgtttaattccctgccggtggaaatagatgacggggatattagatatatacggtattccggagtcgcgccggattactgcgtgaccttgaagacgctgttgagttttttgctcaatgccgtcatatcctgtccgatcttgtcgttggtgatgcgggcatagatttggggcgtggttggcaaccggcattttgcctgtcgtttctatgcaggttgttcgggctatacccgtcaggcctattataaacatttatggcgtaataagcaagtagccttgtccgatacctttcttttgaagcggatgggttactaccgaaaactgattctccggctcggcggctgcaaactgtgacatttgctgcaataagatggattgccgatcagccgggatcggttatttacgctgctttcggaaaacaattttccagtcaaacgtcggaagaaatagcttacgacctgctcgcggcgctggatgcgaatattcgaacctgatccgaggcttcgacctcgaacggccgcatcgtttatgggccggagatattacgtatatttctttgaaagagggatttgcatatctggttctgataagagatgcctattggctatgatctgaatacgactttggaacgggacggagcgctctgtgttctgaggatggccatagaccacactccgtagcaaaaacggcaagggttaatccatcactcggacagaggatgccaatattgttcgaaagaatatgtgaaattgttgaccgataatgggattcgcatcaacatgactgaaaagggcgatctgtatgagaatgctgttgccgaacgggtgaacggtattctgaaaagcgaatggatctacgaagaatgttttgaaagttttcaggcaccaaaagagcgcatcgatgagatcgttatcctttacaattcactcagacctcatgccagttgcgattggcctatgccctttgaagcggaacatagaaccgggaagttcaaacatcattggagccgaaaaacggttattcggaagtcatatgtaaacttatatcaggacaatattttttggaccaaaatgctcatatttaattatcaatcactgtaaaccttttcaggatgggacagttgtaatattccatcaggaaccgtttcattttcggaagccgtaacgaggaattctgaaacctttgggtaggaattttccggtgcggatttttcgctcatttgaagcgagcgagtccggagccgctttcaaatcgcgtttttttagatatatgaataccaaccgcaaatcgacagtcggaaatgaccaaaatattgaaaaatgtggtttgtaaatattcttaccggcttaatgaattccaatgaactgctctgcgaagccggattggagcatgacttcaactgtcttatcgttaaatgtattttcggcaaggggcgttgtcagacacgattcgtcgaagatgcggctttcttcgggagtgatgatttttcatacttcaaatggcagaagtctttgtgtgtagtgtgtgcttcatgtgtcctaatatatagacatgatggatgaacctgctaattcaagacacaatgactcccgaacaaacgaagaaattcaagtactggcagacccgcacaatcgtcgtgacgatggtcggttatgcgctctattattttgtccgcaagaatttcaataccgccatgccgagcatcgaggttacattcggcataaccaaggcccaactggggctgtttctgaccttgaacggtattatttacggtctgtcccgctttattaacggattcatcgccgaccgtgtaagcgcccggaaggtcatgtctctgggacttgcgctcagtgcgctggtcaatatcggattcggattcagtgataaaatggcgatgctcgtcgccggaacggccggcgggcaggagtacattacggcgctgacgatcatcatgggttcgattttgctgttgaacggttattttcaaggcatgggagttccacccgtcccgcccctcatgactcactgggtgccggccaacgaactggcccgcaaaatgtcgatctggaacatgtcgcactcgatcggggccgggttgatctttgtaatgggcgccgtgctggtacaccatttcgacaacagcgcatggcggctttgttttctcattcctgcggcgttttcgcttttgggagcggtcgctttgtaccttgcactgcgcgacaaaccttcttcggtggggctgcccgaacttgagcagatgaaggttccgggcgaagagcagaaacctgtccggaaatcggacaaggcctatcatgcggccttcctgcgccgtatggtattcgggaatccgatcgtctgggtgctttcagtctccaatttttttgtttacatcgtccggttctcattgctcgactgggggatgatgcttctgcctcataccaaagggatatcggtcgctgtagccggaatcatggtggcggcattcgaatttatcggcggaaatctgggcatggtgatcgcaggatgggcgactgaccggctgttcggcagccgtgcacaccgcacatgtgttttctgtatgcttgggaccatcgtcatgacgatcgtattctggtgcattcccgataccgtctctccgtgggtaatggccgttcctttcatgctgattgctttttttatctacggaccgcaggcgctgctcggtatcgccatgtcgaatcaggcgaccaaagaggcgtcggccactgccaacgggatactcggcgtattcggttacgccagtacgctgatctccggcgtcgggctggggtttatcgccgaccgttacgggtggaattccatctacgccgtaattcttgttttcgccgttttggggttgctgacgttgacgactatctggaaagccgctcccgacggttacggtgcggcaaaaaaattcacagccgaatacgaaaggaattcgagtcgataattttttttatatttgtttgccttcacaccattatcccggaaaacagatgccgttggattccgaatacgaactgatgcaacgattgtccgcaggcaacgaggatgctttcggagagttgttcgggagatattatccccgtgtctgcgcgttcgtcggctgtatcgtcaaggaagagagcactgcggaagacattgcgcaggacatttttctgaagatttgggaacggcgcgacatctttcaggggcgggtcgcttcgttcaacggatatgtttatcgcatggcgcgtaacgccgctctcaatgctattcgccagatgaccaatattgattgggaacaatatattcagatcgaggaaacgctgccggacgaatcgttcgaaagggaatactattcccgtgaaaaagagcttttcatccggcttgtcgtctgccggatgcccgaacaacgccgccggatattcgaaatgagccgttatgcggggatggacaatcaggccattgccgacgaactcaagatatcgaaacgaacggtcgaaaaccacctgacgctcgcattgaaaaaactacgcgaggcattagccgttttctcgcttcttttctttatgcactgatctcattcgccgggtaatcccgaaaaaaagtgtttgtcgttgtgtgtcgaaccgttccggtgtgtcttataaacagagacggggaccgggcttttccgctcccccccccc

SEQ ID NO: 12092 - DNA, 13525 bp, Unknown
  gut microbiota DNA sequence
aataccactatgtcgagaatccgaaaaatcatcagtatttatctgagttatcgccagccccgcagtacgcgtaaagagtttgccgagtggttcgcagctccgttcgacggagagacgaaacaacggctgatgcgggagtactgggatgcgctgtctcccgaaatgtctcaggaccgggtgcagaaagcatatgcccgcgtacgggaacgcatcgggttccggagtgtctcgctgccgtcgccgcagggtgtccgtccggtgttcagaagagcggcagtcatggtggcaatgatagctattcccgttttggccgttgcgctctatgcgctgatcgggcatatgaactccgctcccaagtggcaggaaatctacgccccttacggtcagacccggagcgtggttctggccgacggttcgcagatcgtcatcaattccgggagcaggctgatctatcccgaccggttcgccggaaaggagcggcgggtgtttctctgcggagaagcttatgccgatatcgccaaaaatcccaagcgcagtttcgtgctctcggccgacgacgtcgatattctggtgcacggcacctcgttccgggtcagttcctatgtgaatgacagcgaagtggaagtcgccttgctttcgggtgcgatagacatgcagaccaagaatctgcagcagaactgcaagatccagatgactccgggcgacatggtcaaggtcgacaaacggtcggggcgcgtcacgtcgatgcggttccccggcgggacgttcgccaacggcatagacgacggtcacctgacgttcatcaattcgcggctctcggatatagcccgacagctcgaacgcacgtttgacgtgaagatcgttatcgacagccagcagctggccgacgaacgctattattctgttttcataaatcacgaaacgctggacgagattctctccattctggaacagaacggcgatatgaaacaccgccgcgaaggggagatcatccacctttataagaaatgaccatccgaaaaacacaacctataaacctaaaacttcatctatgaaaaaaacatttacttttcacacccggagccggttatggattctttgcgccgcggtgtgcatggtatgggccgttccgctgcatgcccaaacgcggaggatcagcctgaacctgaagaacgcaacgattcagcaggcggtgatcgccctgcagcagcagggatattcactctcggtcaaggccgacgatgtggacatgaaggctccggtggacatccatgcccggaacgaagagctgcaggcggttgtggaccgtatttttgcagggcaggacgtgaactgcatcatcaacgataaaagtattctgattacgaaagtcccgtctcagccttcgtccgaagactcgccgcaggaatcatccgtaaccggacaggtgaaaggcccgaacggactgccgctcgtcggtgtcaccgtgctgatcgacggtacgatggtcgggacgacgaccgatgcctccggaaatttccggatcagggcgaagttcggggatacgctggtcttctcgtatatcggttacgacgagcgccgggaaaaggtaggagtccggacggagatcgacgtgacgctggccgaaagctcgacgctggtgaatgaagtggtggtgatcggttacggcacgcagtcgcgccgtacgctctcgacagccatctctaaagtcagtggcgaggtcctcgacaatgcaccggccgcgaccgtgggcgatgcgctgaaaggccgggttgcgggactgcacgtacagacgagcaacgctatagccggagagtctccccgcatgatgattcgcggcggatcgtccatcacgatgggcaacgatccgatctacatcgtggacggggctttgcgcgaggacctgaccggtatcaatacgaacgacatcgagtcgatggaggtgctcaaggacgccgcctcggccagtatctacggcgctagggcatccaacggcgtaattctggtcacgaccaaaaaaggttcgttggcaaagggtccccagatcgtgttcgacctccagctgggctgttcgtctccttcgcgcaaatgggatttcatgaatgcccgcgaatacattagttttcttcgtcccgttatcagcaaagcctatgcgaacggcattgagcacaatgcgaagaccatgctttcgggtcccaatgcctacggtacgggaaacacggcgccgaatgccaactattcgacccgttatctcgattacgggcatccggtcccggcaggttatcaatggatgtacgatccgctggatgctaacaaggtgattatcttcaccgataccgactggcagtcgcagtggttcaccgacgcattctggcacaaggagtacatcggtgtaaacggaggaaccgacaaactgaaatatgccgcgtcggtcagttatcacggcgacgacggcatggttgcgatgagcagctacaaggtcttcaccttgcacggcagcacgtcgttcaagattacgaagaatctggaggcgtcgactacgttcgacttgtcgcgccagaaaaagcatccgctcatcgacaactactatcaggccatcggccggggcatcatagccgcacccacggcgcgcgaattcgacgacaacggcgactggtgtcagctgagttccaacggcaacgcccatagtgcgggatggtacgagtcgttctacgaccgcgagcaggccatcaaccgggcttcggggacgttcggactcaaatggaacatcaccgacggattgacggctttcgcgcagtacaactatttcgacaactcctaccggggaagttattatgcctacggagagcgcaacggcactcccaataacgtctcgctggagcgcaacaccaccgaaacccgcgaacaaaccatccgggacatctttacggctcatctcaattacaacaagacgttccgcgacgtgcatacgctgaacgttaccggcggttatgagtatatgtcccagaattactggaaggtgaaagccaatgcgaaaggggcttcgtcggacgatgtgcctgtgctcggctccggttcgatcttcacggcgagcaatcaggacgagaagcaggcgatgatctcctatttcgcgcgggcatcgtacaattatgacgaccgttacatcgtttcgggaacgtttcgtgccgacgggtcctccaaatttgccgtcggcaatcaatggggctatttcccggccggttcggtggcatgggtcatttcggaggaaccgttctggcgcaatgccaagaagacggccaacaccttcaagttgcgcgcctcctacggacagaccggtaacaacggcatcgggctttacgatgcatacggcgcattcgcgaccggcacgtaccacgggcacactacattgctgccgtccgccatggcgaattcggccctgaagtgggagactaccacacagcttgatctcggtatggatttgggatttttcggcgaccggctgcggtttgtgttcgactactacaacaaacatacggacaatatgctgttttccatctccgtacccgatacgggaccctattcgtcggtcaaggcgaacgtgggcagcgcccggttctacggcatggaagtcgagcttagttcggtgaatatccgcagggagcatttcagctggacgaccgacattacgtattcgtttacccgcaacaaggtgttgtcgctgcccggagaatatgcctatgacgagatcgatgcggacggccgtgcgacggggcggcgtgcataccgtatcggcggatacaaagcttccgagagcggttaccgcttcggcggtactgccgtgggcgaaccgctgggacgcatatacggctataagatcgaccacatcatccagacggaggccgaggctgacgcggctctttacgacgaacagtcgaacggttaccgcgtaggcgacggacgtatggtcaaggggcgcaaagatgccggcgactatgaatggcgcaaccgcaaaggctccgcgcgcagggacggcgaggagatcatcaacgacgaggaccaattctatctgggcaatgtcatgccgcactcgacgggaggtatcaacaatacgttccgctacaaacggctttcgttgaacgtctactgcgactttgcgctgggacattcgatcatcaacggcatgaaggcgcatctgctgcgcaacaccatgggcaactgcaattcgacgatcggccgtatcgcgtacgactgctggcagcatcccggcgatacggatgccaagtacgcccgctttttccctaacgattccgactggggcaaccgcaactggcgccaatcgaatttcatggttgaaaaagccgactatttgtgtctgcgcgacgtttcgctctactacgacctgcccgaacactggctgcgcaaaatcggcatccggaaagtgacggtgggcgtaaccgggaatacgctttgttattggacgggagttacgggggccatcagccccgaaagcggtatcggatccaatgcgggtgcaggcatgtatacgcccgtgtcgaccagcaattccaactccgacatcaccgccaatatgatgccggttccgcgcaagatcatcttcagcctcaaactggttttctaacgtttcagaccttaaaacaaccaaccatgaactataaaaacataagatcgctcctgctcgtatggattgctgcgggagttgtctcctgtcacggcgatttggacatcatgcaggacaacaaactctccgtgagcaatatgtggaagacgtccattcaggtcgagaactccacttacggcatctactccgccatgcgggacaactttgttcaggatcaggtcaacgtcctgacttggggagagctgcgcgtgggcgagtacatgtggcggaacagccgcacggagacgatctggctcgcggacctgcggagcgtggtgcagaataccatgtcctccacgacgaacgccgtcagctggtcgaaactttatacggcgatcgatcaggccaatgccgtgctcaaatacgcgcctgcggtcgccatgaccgatacgaaaccaagctgggcgatcggacaggcgtcgttcgcccgtgcctatctctatttctgggccgtgcggttgtggggcgacgttcctttgaacctgaatcccatcgagtcggtcgcacagcccgaagcctatccgattcgtgcacccaaagcctcggtatacgcccagatcgggaccgacatcgaccgggctgtcgaaaatgcgggcagtctcggtacggataaatacttggcgaccgcggatgccgtcaacatgctcaaggccgaatacgcgctatggatgtatgcggtgcagaagggcggcgacgactatctgacaatggccgaagaggcgcttgctgccgtcggagtcaaggccggcgacaaccggctgctgactgattatgccaagatcttcgatggctacggttcgaacaataagaattcgaacgaggtagtattcgcgctctacaacagccgcgatgaaaacaagaccgggggattctcgacctacttcgccttctccgacggtgcgatcgatcccaatgcccaagcgaccgtgccgacgaatacgactgtgcaatatctggactatggcgacgagtaccttgaattgctgcacaaaagtcagacggaaaacaacgactcgcgtgtgaggaccaatctcggcgagggaccctacggaagggaaaaccgggcggtggttacgtggccgaacaagttcatcggcaatgcggacagcagtccgatgattcgggattgcgacatcctctactatcgttatgcccttgccgtgatgctggatgccgagttgaaatattaccgcagggactatgcgggggcgctggcttcgctgaatatcatcgccaaacgggcgtacgggaaggagaacttctatacttccgccacgcaaggcgatgtcttgaaggcgttgtgcaacgaatacttgctggagtttccttgtgaaggcgttgtctggtgggcattgatccgcctcgatcggatttgggagtacaacgcggacctgaaggcgcgcaaggatgccgccaacatcctgttgtggcccatcagcaagagtgcccgcgacaaaaattcgaaccttgcccaaacggagggatggtattgatcgaaaacctaaaattacggaacatgagactgaatttcaagaaatatatggcggggctggcgactgcggcgacgctgcttctgacagcctgctacgaggatcatacagatttggaggaccggacgacgcggattcgcatcagtcctgaaatcgaagcgttcgaagcggacggaactgcgtccgtgtcgggcaacagcaatgtcacgtcggtggtgctggtcaaggtcggcacccgcgtatcccgcatggagtgggaggcggaactcgtcgactggatgccctcggtcgatgagaccgggccgtgggcgacgatccagcgtgtacccgtcgtttcgcagtatacggagattgccggaccgaataccgtcgccgtgacgcaatccggtttcgagttgactgcattgcccaatacgggatatggacgccggtgtacggtgcgcattacggccgaggacggtacggtgcaggattacgaactgttccagtacggcgagctggccgatgctgaggtggtgccggcgctcgaatcggtagagatatcttttcagggcgatcctgtcgatctggcctataccacgaatatgggcgacaagtatgcctatgcgatcgcttacgaggagggcggcgccgagggctggttgacggccgagcaccgcggcgaaggtttgctgacgctgaccgccgagccgtgggacgacatggaacgggatcgccgggcgacgctgacgatcaccgtgggcgacgacgaaacgagcaaagcggcggtggacattcccgtcgtgcagcttaggaaggcggaatactattatgtttacggctctgcgctgggcgaggaggctgccacggcgttgcagatgaagcgcgagtcggacgactcctatcgtgtcagcggattcttcttcgccacggaggacaatctgatctgcatcaacaaggattcacgggccggcgatccgagttggtatctcggtgccgacggcgagctgaagaactgggcccggaatgttacggcttcggatttgaagatcgaagcgaacggttatcgtacgctgacggtggatttcgctgcgggtacgtggaactggatacgtcagaacagtacgcccaattgcatgcccgacgaagaacttgcgaactatcctacgaaggattacccgacggcgtccggcggagtcaagacatggatgaccgtcagcctgcattggaacggcggacccggcatcggagccgtcaagctcggatcgggactcgtcggtggctccaaaaccggcggatacggcaagcccagcgatacgactgtgccctacgacgttcgcaatccggcttatgatacggccgaaaacggcggaggcatcgaggaacttcgggcgaatgacggaaccccgctggcttccaaatacggccggttgtattcctctttcgaggctgttacggggcagcccaacggtgcattgaacaaggcctatcagatcgcttcgccttacggcgagccgggtgccgtgctggtcgatgcgaccggaaccgccgtcacgatcgaaaacatcctcatggcgacgctcgctgcggcggacgacgatgcgaaggccgaggccgagcatcccgtgttgaagatgcagatacaggggatttgtccctatggctggcatatcgccaaccttcaggactggaaagatctgatctgggccgcagcgcaggcttcgaagggttcgcggtacgaaatcgccgagtcgtcggccagctataaggccatcggcggaggttcgattgccaatctgtctacgattctgttcgacgcttcatggaatacctattcctccggatcgcccatatcgccgctggcgcccgatttcgggttcaacatgttcattcagggatggcgcctctacgataccggatataattacggcgctacctccggcgatccccggttttatgcgtggattccgcttctggggcagtatacctccaagaaaacttcgttctggcgcatatacatcagcggacacaccaaaaccgacatgacgctgaacgacgggttcgatctgggcaacggttcgggcgctgcgatacgctgcgtgaagaattataaataaggaacaaatcaaaaaaagaatcatgatacgaaaaatcatatgcatgttgacattggccgccgccttcgtcggttgtacgaaggacgaatggcccgatcagcccgactggagcaggattcccgatccgagcattccggtcgacgacggattcatgaagccggcggcgtgttccaatacggtcgttgcccatcgcggaggagctgccgaatgcggtgcgccggacaactcgatggcggcgttggagtacgctatgagtctgggatgctacggtatggaatgcgacatttactggactaaggacaacgacatcatcgtggcgcatgccaacggcgactgcaaggtcaataacctgcagccgtggacggctaccgtggcagagttgcgcgctgcagggcggttgtcgaacggtgaggaactgcccaccctcgaagagtttatccgccgggtgatggtcgagggcaactgtacgcgtctggtgctcgacgtcaagcgtgtggacaaaccctatgcccagcccgaatatgtgatcaatgcggcgcgccgtgcgtgcgagatcgtcactgaaatgaaggcgaagcatttcgtcgaactgatctgcacgggattcaacctcgatgcgatgaaggctgcgcacaattgcgccgtaatcgccgaagtgcctatcggcatgaactcgtcgcgctccgggaaggagtacggcacgctcggcttcgggtgggccaacctttcggcggcaagcggaatggatgcggcggcgggcggaaaggggtcccgctcgctcgaagagtacgagaaggcgggtgtggctctgtcggtctacaatgttgaccagcgggcgggagacggcaatgccgtttattcgaccgctgccgtgaattattacattgcgaattacaaacgtttccgcacgttatgttcgaattatcccaagtggctgatcgggaagatcgaccatgcttacaaggtgtacgacggcattcgcagcgaggcggatttcgagtctttcgcggaatcgctcgccagcgatccgacggggcgccgttttctcgacggcaacggcgaggtggtgctccattgcgatctgacgctgaacgggttcgtgcctttgtcgaatttttcgggcacgttcaacggaaacggcaagacgctcacgatcggttatcgcggcgacgcgcagcagatcggtctgttcaaacgtctcagcggcacggtacggaacctgaccgtcgccggacgcttcgaatcggtacgcagcgacgacagcgaaattcatctgggggcgttcgcggccgaaaccgacaatgcggcgatcgagaattgtacgaacagggcggaaatcgttgtcgcagacgctgccgatgctacgccgcgcaccatgatcctgagcggattcgtcggaaaggctttcaacggcgtgacgcttcgcaactgccggaacaccggaaatatctcgttttcatcgcctgctctttatatgatcggaggctttgtcggagctgttcaggaagacgacgggctgtacacgatcgccgactgccacaacacggccgactttgacaatgcgggcagtaattcgggctggaatttcatgggcggcattgcgggcaaaacgatcagccggcagctcgttccgggcgagacgtcgaattaccggcttatcgtcgaagaatgctccagtacgggtacgatcagcattgccgggccgtcgaaagtgcgcgcttcgggcatcgtggcccaaacgcagggcgcttaccggatcagcggatgcacgttttccggagcgatcgagagtacggacgtcaccaaacgcgacgtcgtgataggcggtatcatggccatggccgacaaggagtgtgtcgggctggtcgaaggatgcactttcagcggacggatttcggctgcgcaggccggtgccaacaactttttcggcggcatatacggtaacaacggaggtgccgcgagcgttgtgaacgattgccggaccacggcttctgcctatgtcggctgtcccatcggcaagtcggtggggatgcttgccgggcgtcccaacaagaagggctttacggtcagcaattgccggatcgccggaaccgtaacgaacaaacagggcgcggcagtggtgatcacggccgataaccttgaagattggatgtttgccggatatggtacctccgtagcggtgactctgaaaaacaacggttacaacgacggaaaatagcacggaaagatactaactctaaattattcgaaaaatgaaaaaactattgttgacgggcatcgcgctcgtcggagcggcgctcgtgtttgcacaaccccggctggtcgcgcaccgcggcttttacacgacgccgggatcagacgaaaatacgatatcgagtctgatcaatgcgcagcagctgggcgtatacggcgtggaattcgatgtcaaccggacctctgacggggagttgatagtcgtccacggtcccaaagtcggcgatcggctcgacgcgcaaagggacacgtatgcggagatcagccgggtcgtattgccgggcggcaatcggatacctacgctccgcgaatttctggagcagggccggaaggaccccggaacgaagttgattctggaattgaagaaacacaagacgcctgagatcgaaacccggatcgtcgaagagatcgtgtcgctctgtaagaaactgaacatgctggatcaaatggagttcacgtccttcagcgagcacgcctgcagggagtttcggcgcttggctccgcagaacaaaacactgtatatttccaattcgctttggacgcccatcaatgccgatgtcgctaagaaggagggttttcaactctcttacagcatgtatgtgtttatgaaccggcccgaactgatcgaccgcatgaatgaaatcggcgtagaatcgacactctggatcgtagacaatccggaggtcgtggactgggccgtcaaacataatgtgggttttatttcgagtaattttcccgaccggatcaaagcgtatctcgatgcgctccggacagtggaaactgcccgtaatggcgcctgcagtctgatcagataagacacaatctcataactcaaatttatcatgaaaaaagtaatcgcaattatcggttccggcatgatgggttccgctctggcgtttcccgccgccgaaaacggtcatgaagtgcgtttggtaggcacgcacctcgaccgtgacatcatcgacgaatgccgccgcagcaacaagcatcccaaattcgacagagcgttccccgtcggagtaaaatattatcagatcgaggaatacagagaggcagtcgccggagccgatttcgttatcggcggtgtttcgtcgttcggtgtggattggttcctgaacgagatactggtaaatctcgatccccggttgccggtgttgtctgtcaccaaagggcttatcaatctcgaagacggaacgttgatttcctatcccgattattggcggtcggagctgaagaaaaggggcgtcgaccgagaggtctgcgcggtcggcggcccctgcacctcttatgaactggtattccacgaccagaccgaggtggctttctgcggcagggacaccgcttccctccgactgttcaaagagacgctttcgacctcttactatcacatttcgctgacccatgacgtgatcggtcttgagagcgccgtagcgttgaaaaacgcgtatgcgctggccgtcgccatgaccatcggtttggtcaaccgccatcatggcgcggatgccgggttgcattacaactcgcaggccggagcattctatcaggcggtcaaggagatgcgccggctgcttaagatacagcaggcgaccgaagactgcgagaacatcggtatcggagatctttacgtgacggtttacggcggtcggacccgcagaatcggtattctgctcggtgaagggaagagttattccgaagcgatggatattctggccggtgtgaccctcgaatcgctggtcgtggcgcgccgggttgcaaaggcgatttaccgcaaggcggaattgggtcaggtctccctgcaggacttcccgatgctggtacatgccaacgatgtcctcgacaacgggaaggatgccgaacttccatgggagacgttcacgttcgatcatacggcaaactgaacggagcggttacagcaatgaaaacaacaatcaaagcggccgcagccgccggcctgttcatcctgatcctgtttccgggatgcgcgcaacggcaaacgaataaagcgaatctgcgcctgctctactggaatatccagaacggcatgtggtcgggacagggtgacaactatacgcgttttgtcaattgggtgagcgcccagaaccccgacgtctgcgtgtggtgtgaatcggtaaccaactacaaaacggcttcagatgagaagataagacccgaagaggcctatctgccggaacattggggcgaactggcccggcgctacggacatgaatattggtataagggcggacaccgcgacaatttcccgcaggtcattacgtcgaaatacccgatcgagaacgtggctcgtctgatcggagccgttcccgacagcattgtctcccacggtgcgggatgggcgcagattcggaaaaacggtcatacggtcaatatcgtttcgctgcatacatggccgcaggtctacggtttcggtctggccgacaagcaggaacgcaaggccagcgccgcggcgcgcgagggcgacaggtttcgccgtatggagatcgaatacgtgtgcaaccatacgatcggatcggttgccggtgcggaaaagcaactatggatgatgatgggagatttcaactccaaatcgcgtgtcgataattacgagtacggatttccggaggatacgaccgcctttctggtccatgattacatacgtcagcacacgccgtatgtggatgtgatcgcagcgaaataccccggcgaattccagacgacgaccggccggcgtttccggatagattatgtttactgcacccgtccgctttacgatcggatcgtcagtgcgcgggtcgtaagcgacgagtacactacgcctgtccgcgatccgcaggaactgcgcaatttctggcatccttcggatcaccgcccgatcatcatagatttcgacatgcgttgatgcggattttgatgactaaagactttgcaatatgtcgatgaccaattccaaactaacgcgtgtagcggacaatatccgaattttgtcggcctctatggtcgagaaggcgaaa

SEQ ID NO: 12093 - DNA, 635 bp, Unknown
  gut microbiota DNA sequence
cctcgacttgcatgtgttaagcctgccgctagcgttcatcctgagccaggatcaaactctccattgtataaataatgttttgttttaaatctttcgctctaatctcaaaggtattgtttgaaatcactctcttgcgagagtggaaaaaacttttagctgctcaaatacttcaaagaacgctgttcgattatattgctataaagaacaatttctttctttttgccgggtttcgcctttcggctttccccgttgttctgaccgcgatttttcagcggaaagtggtgcaaagataagtcatattttttgaaccaccaaatctttttgaaagaattttttcagaaattttcagaaccttttcttttatcgtttcgaaccgtatttcttattcgaagcgggtgcaaaggtaagtcatttttctgaatctccaaaagatttcggaacttttttcaaaatttttcagaacctgtttttgtgtttcggagtagtgtttctctctcgaagcgggtgcaaagataagggcatttgatcgctatttccaaatatttcggagactttttttcaacattttcgaagccattttcacaccccgctatccgtcagcgagttagttgtgaaaaattttccgtaattctgga

SEQ ID NO: 12094 - DNA, 86672 bp, Unknown
  gut microbiota DNA sequence
gcgggagcggaccgaggaacggggaattggggtgggggtgggggcggagatgtcggaccgtgggaggtcagccggagggggcagggaggacggcggagcggggacaggacagtggagcaggggcaggacggcggagcgggagaaagctgcggtaggcaagaaaaatccggaacgcatcgtgcgctccggatttgtgtctgggggggcgctgcggttagagttgggcgatgacgtcggtgatgcgggcgaagacgtcgtccatcgtgcccgtgccgtttaccgatgcgtatttgccttgtgcggcgtagtagtccgacacgacggccgtctgctggcggtagacgtcgagacggccgcggatgacctcctcggaggcgtcgtccgcgcggcccgaatccttgccgcggagcaggatgcgctggatcagctcctcttcgggaacgtggatgtcgatcatgatgtcgacctgaagaccgtgtccggcgaggattttgtcgaactcctcggcctgaaccgtggtgcggggaaaaccgtcgaaaatgcagcccttggcgtgcttgtgttcggcgacgtagttggcgatcatgccgatgacgatctggtccggggccagtttgcccgctttgatgtaggattccatactgcgtccgagttccgtgccgcggcggatctcgtcgcggataacctcgcccgtcgagacgtgctcgatgccgtagtgtgctttcagccgttgcgcctgcgtgcctttcccgcagcccggcgcaccgaataagacgatgtttatcattatagaaaccgtttttgggatttaccggacaaaaatacgttaaatttttgggaaagagcaaagattccctaattttgtaaaaaaatttataatatggaaaagaaacgacgtaccgaaatcgccgaattgggagagttcggcctgatagacctgctgaccagcgggttcgagccgacgaacgactcgacgctgcgggccgcgggcgacgacgcggccgtcatactgcctcctgcgggcgaagccgtgctctgttcgacggacctgctgacggaaggcgtcgatttcgacctgacctatttcccgctcaagcatctgggttacaaggccgtgacggtggccggaagcgatattctggcgatgaacgcccggccttcgcagctgatggtgtcgctgggcgtgtcggccaagatgtcggtcgaggcgttgcaggagctttacgaagggatcgctttcgcctgcagggagcaggggatcgatctggtcggaggagacacgaaggcttcggtgacggggctggtgctgagcctgacggcggcagggcatgcccccaaggagcggatcgtgtcgcgcggcggagcgcagcagaacgacctgatctgcatttcgggcaacctcggagcggcctacatggggctgcggctgctggagcgcgagaagcgcgtgttggcggacgtggagaatcccgaaccgaagttcgggggatatgagtacctgctcgaaaaatacctcaaaccccgtctgcgcagggacattgtggatgcgttggcggaggagggcatcgttccgacgtcgatgatcgacctgtcggacggactggccagcgacctgctgcagatttgcaaggcctcgaagtgcggggcgcggatttatctggaccggattccgatcgccaagcagacgtatgcgctggccgaggagctgcacgccgatcccgtggtggcggcgctgaacggcggggaggatcacgaactgctcttcacggtgccgctggcgatgcaggagcaggtgatgaagatgggatgcgtcgacgtcatcggccatatcacgcccgaatcgaccggggcctatctggtgacgcccgacgggtcggatatccggctgcgggcgcaggggtttgccgagaaagagtaactcgtgcggggatttcccgatacgcttggagaacgggccgtccgcaggtgtgcggacggctttttttgacggtgtatgtcgggatgtcggacagcggcggtgcggcggctggactgcggcgaggaggcggtgcggggtgtttccggaagcggtgatgcgaaagagcgggcggggagatgaaaatgaaaaagccgccttcgtcgggcggctttaaattcaggcgaagcggcttagagcgcgttcacgtgcagctggatggcgcttttgaggttggcggccttgttcttgtgcacgatgttgtgctttgcaagtttgtccagcatggcggttaccttgggaagcagggcctcggcggcgctcttctccgtggtgctgcggagcgctttcacggcattgcgtgccgtcttgtggtaaagacggttgtgggcgcgcttggtcagcgtctgacgaattcgctttttcgatgacttatggtttgccataattcctgttttttattttttactttttcagttgctaaatcggtaaacagccgtggctgcgtgtggatagacgctcggtccgctcctcgaaaagtatcacccgtagagatccgcatgccgccgtccgctttgcggccttccgaagttccgggattcgcttcccctcccctctctggtttcgtgccggcccccaggtctcctcgttagtagcccataggagagtcgaactcctctttcaagaatgaaaatcttgcgtcctaaccgatagacgaatgggcctttaccactattgctgccccttgtaagggaaactttagcggtgcaaaggtaaacaaaaaagtgagtcgaacaaaaaaaaagccgaaaaatattgaattcgttacttttttgtgagccggatcgtcagcgtcgcggggtcgaacgagatgccggcaccggcgaaaagccgctcgatatggccgctggaggccatgtcggaggcgggaaggcagtgcaggtcgggcgtgtcgatcagtgcgacggcgtcgcacaatcccagtgcgacgtcgaggtcgtgcgtcgagaagaggatgcatttgccctcgtcgtgggccagacggcgcagcagcgtcgccagttcgtaacggttcggcaggtcgaggaaggcggtgggttcgtcgagcaggatcacgggggtgtcctgcgccagcgcacgggcgatcaggatgcgctggcattcgccgtcggacatgcggtccatcgttttgcgggcgaaagcctccatgccgaccagccggagcgaacgggccacgatgtcgcggtcggtctcctgcatgcgtccgatccagttggtgtagggggcgcggccgagggccacgacgtcttcgcaggcgaggttggcgatgcgcaccttgtcggtggtgacgaagctgacggtcgaagcccgctggagcggggtgagcgccgcgaggggtttgccgcagagttcgatcccgccggacgcggcggcgcccagaccggcgacggcccgcagcagggtgctcttgccggtgccgttgcggccgatcagggccgtgagcgatcccggagggaccgaggccgagacgtcgcgcagcaggatgcgccggccgtaggcgagggtgatatggcgaagggcgatgctcatttcagaagagattgcggttgcggacgaccacgacgatcaccacagggatgcccatcagggccgtgacggtgttgatcgggagggccagcgatttggaaataaggtcgcagaccagcagcagggccgcgcccgaaagcatcgacgcgggcatcaggacgcggtggtcggcgctggcgaagagcatgcgcgcgaggtgcggcacggcaagtccgatgaatcccaccgggccgcagaaggccgtgacggtgcctgcaagcaggaccgtggagaggaacagcagcgtgcgggtgcgctggacgttgagacccatcgtgcgggcgtagttctcgcccagcagcagcaggttcagcggcttgatgacggcgacggagagcacgagacccgcggtgatgaccgggagcatcagggcgaggttgccgcccgtgacgtcgcccagagagcccatggtccagacgacgaacgatttgagcgccgcttcgctcgaaaggtactggaggatttcgaccacggagctgacgcccgaaccgaacatcatgccgaggatcaggatcaccatgatgtctttgatgcggcggctgacggccatgacgatcagcagcacgagggccgcgccgagccacgccgcgcccgcgatgccgagcgattggacgaacgagtgcgccgagacgcccagcaggggcgcgcccaagaggaacagcgccacgcccagaccggcgcccgaactgatgcccagcacgtagggaccggcgagcggattgcggaagagggtctgcatctgcaggccgctggcggcgagggctgcgccggcgaagagcgccgtgacggctttgagcaggcggattttgaggatgatgtcgcgcacggccgggtcgcacgaaccgcccgtaagcgctgcccagatgtcgcgcagggccactgcgaccgagccgaccagcaggtcggccgtgaaaagcgcggcggtcagcagcgacagaacggtgaaaaggatggcggtgcggcgtccggacatttcgagcggggtgtttgttattccagacgtttgtagtagtggagttctccctcttcggcaggcttgccgccgaggatcaggctcaggtcgcgcagcaccagatcggggcgtatgacgcccgattcccagaagtcggagccgccggccggggtttggcggcggttgttgttgaagaccatgcggttgcggacggccgggatgccggcgaatttcgggttctgggtcgtcagttccgcaagggtgttgcacggacccacgttgagccagacgtcggccgagctggccagcaggtaggcctcttcgaggtctacggcgacggaggtgtccgagtcgttcttcgtgtagacgtattcacccccggcgtcctcgatcaggcggatcatgaaactgcgcgacgaaggcatgaaccaagtgtcgcggtaaggggtgttgagcatcactttggggcggacggcgggtgcggaaccggcgacggcggttttgatggctccgtagcgctcggcgatgccgccgaagatttcggcgccccggccgcggtcgatgcagagttcggcggcgaccatcagccattcggctttgcccagcggcgattcttccatgtagtcgcctacatatatatagggtatgcccagttcgcggagtttgcccgtgacgacggtgttttcgcccgtgacgccgtacagcagcatcaggtcgggctgcatggcggcgagccgttcgaagttgaggttcgtgtcgtagcccacgtcgaggacttcgccgcagcagcggtgttcgttgacataggcgttggaaatgtagtcgattccggagacgccgcagacgcggcgtatctgaccgatggcgtcgaacatggctacgtggctcgacgacatgcagaccacatggcgtacgggggctttcacgatctggccgtcgaaatcggcgggaggttcgatgccctcgcgcagaacgagcagatgctgttcgacgccgcttccgccctgccacggggtgcggacggtgacgagcgtcgccgcattgcgttccgtgccgcggatgtcgaaccccgaagcgtatgcaggggtatagacttcggtcgtgaaatcggccggagtgtagctcgcggagcctccgcaggcggtgccgagaagcgccagcaggagcggtatgaggggcgggaatcttttcatcgaggacaaaattagaaaaaaatcttgcagaaatgtgccggtttgtgaaaaatatactatatttgcactccgaaacgctacggggtgtagctcagcccggttagagtacgcgtctggggggcgcgtggtcgcaagttcgaatcttgtcaccccgactgatggaaaatccttgatattcaattgaatatcaaggatttttcttttctggtatatagtctgaaaagcggcggtggtacacaagtggtacataaatggtcgctatttggaattttattctttagggagcttaaagaaactaatgatcataaaatcatctaagtatcagagtacttctggcgtttataataatccaagatatactgggaaattattacagacaactgaaatagagtttgttcttttttctttggttttaattgacactcccatattgttataacattccaatgtttttgtttgaggtctttaatgtgttgtaagtcccgcttttgtgtacgctcaattttgttctgccaccattctgtttttgtctttggcaaaacgaaacaaggatacccttcatgaccatgccaaaaacagccattaataaagattgcaattttgtatttcccaatcacaatatcaggctttccgggtaattttgcgacatttaatcggtaatggtatcctaaactaaataaatattttcgaacaattaattcaggcttcgtgtttttactacgaatcctcgacatattataacttcggacttgtgatgtgtgtacatcagccattgttatcggaattatccgtaatggatgaatggagttttatatagtcataaatattatttgctaatgcttctgcagcaacaaaagggacaccgtttcctatagctttaaaagcgttcgatagggttatatctttagttggtaaaacaaaatctttaggaagcgattgtattgccaaggcctctgcgacggataatcttcgggctaaatagggatgtagatgtacttcattatttccgtaggcagctgttggggagtaacgccatctgtggagccttttatacgatttttttttgtcgtctccttctggaattgtttgaaaacgggatagaccgcctttaggtttgaagtattggtctttatttggatggtgtcggacgtcattttgattaaaccaatgttgaactgttagttcaatcggaatgtttttcggagctttagttattccgttttcaacaaaaggatgggtttccggccatggaagtttttttacagattcagtgttatatttctggaatttattccagttaaaatcttgtaaaacgccgttgttagctatcatatgcaatgaatcaatcatacattgatgaaatccgatcaaaattatgcgctcccggtcttgtggagcaccataatcgagtgcattgattaatctttctgtatatgcatatcctgctttgcggaattttgtttttaattcttcaaaaaatttgcggtgcttttttgtcctgtataaacctttgacattttcaaaaagaaaaaagtcaggtgttaacttacagattagctctgtataagtgtttgatagcttgccattttctcccgtttcccctttatttttacctgcaatagaaaaatcaggacaaggaggcccccctatgaatccaatataacggtaattctcttttgactgttgtagttttttctttaattcatttaaattgctttcttgaagaaatgaagtaatatcatttaccgaataaccgaattctggcttttcaattttcatctgcttacgtgcatgctgatatatctccataaacggctgatgaatttcattaacgaaaagggtctgaaaattttggttcatttcaaagcccaaatccaagaagcctgctcctgcaaaaaacgaaaatattcctattttatctttcatatttgatttgatatagatagctaactgtacgagttgatttttgatgtttaccgtttctttttagtcattggttccataaaggactcaataaattcgtttgttactccctgtaacttatatctcatacagatagaaaataaatcctccactttagaatatgaaaagtagaatagattcatatcagcaaattgctctgagtttgcttttgaaatgacattattacggtcttcgtccggagccacaataatatatcttgttaatatcgaaggaatcgcttcttttaatttgtgcatccgaactaaaccgctcgtggtgccggtcgtatgttctacctcaagaactgcgggtaaatttttttctccgtcaaaccaaatacaatcgataagtcgggcggagtcaatagcatcgttaaatccggaaagcacattcttatcatctctgatagattgtatgattcccggatattcacatagccgcttctcgttgtattgcacgttcatatcattttgggcaatccatgtacggtagcctaaactgtgtccaatatgatacaatgcaatttgtatctgcaaatgtcttctgatgacatttatatccagtcctttagtcgtaaattccagtagtttgtaagatacatcataaacagggatttctgaaatctggatatccgtttccgtgggggacataatcccttttttatgcggggcatctggtttccatatgacatgtttatggccagcctgaatcttaatattgccgtttttgtcttcgatacgacctggatagcaataataaaattccggagtatgaaccaagagcgtctcaagcacacttctggtattgtagctggcccctaatatcctgtcaaaattgattggagaatctggtttgaaagcattggctatacgccaaatcatatcagatgaaatggattttattgcagctgtagtttctgtttgatttttgcttggatcccactgtttgatgtgtattgggccttccgggagttttaccgtctcaattttaataactccgtggttgccgggatatatgtagttatatagaacttttttgtctaaactattaattgcacatataatattttctgctgttagctttttattatccatagcatttaattttttccaaaagtacaaattaaattatggatctgcaaaagcatagaagcagatttggttagttgtttataggttatgtggctgtcgaaataaagagataattaaattgaagtctatgttatggactgtataattgtgttatgatatctgctgttcatatttaataaatgaactgttatactgcatgacataccaagtgaaaataagtgagttatattattggggcgacgaaccgatcagcaacaaaatcgaatagtcggtttccgccagttttgcatccgtgccgcagccccagacgatgtttacctgcggggcaaattcatggatgacggttaagaggctgcataggtcgtcgaaactaatttccgatgcgggatgatagcttacttttacaatcacgtcgaggtcggcttcgatgtgcagggcttccaattcggtgcggagtcgctccgccaagacgggcattgcaccctcgaccgtaattagggcacaagatgccgcgctattcaaaatgcggtcgaaatcgttccggacgatttgcaccatgtcgtcttccgatgggctgaattgggtgtcgaggtagagcctgatttcttctttgtttttcatgttatcttgtttttgggtaatacattccggctgtgaatacgcaggtcgtttcagccgatatgtactggaaaatcgtcgttgcagcttgcttatttaagtcctatacactggcttgaaataggcgaataatgaattttatcgagtctccgactacatgagctgtaatcgcatcgcagtatcttctgtcgggatttaacaaagcgacctgccgggttgcggcaggtcgggacaactaagaacggtcgggataaagactcggaaaggatgtggataacaacttacaactatgtgctttatccgtgaccgggattatatacgagaaattaattttattcccaattgccaatatcattatcggcttcatctgtcgagccgaatttgatgccgggataacggtcgaaaacatttacttcttcatcaattagattgattatttcctgccggtatttaatcgtatcgaggaagagtttgtagggggcgcgaacttctatgaaagggccggtacgattagaagatgtcttggcgaatccggtttccatgataaactcgcggttggaattgggaatgcaacggagttgcttgatgtcgcatcttaattcggtcggattcctatggagaaaccgctccaattcgtcgaaatcttcagcataacgccggtatgcagccctgtacgtacgctgggcagttcggacatccttgatgcggtcgataacttgtgctttgcgttcgtttaattcgttttcaaaatggataggagttgatatctgggaacctatagtacttattacagcaaataaaatcggcaatagagagatgattaatcctgctattgctctgccttttgggttaatgcggaggcctatgatagaaaataacaatcccaataaccataagttacttattaagactggtaaaatgagtatgaaaaacagactcttattgtttgataaatttatgatatacccttcgaaggaaaataatatgaacgacataaggactaatacaagtccggctgttccaatacgattgttttgttgagtctgttcattattatctgagccaatagttgtattcatgggataagattataagttgaacgtaagaacgctgcggcataaactaaaagtgttgttcatattcttcgtgagagaggtaataatagaggaaacaagagccgattaaaaatactaacaacatgactgatgaaataattattcctgccgttgtttgtttcgtttgacgataagttgctccaatgcaggaaatgacaagggatgctggcgatatgacaccacttccaagaattgaaaaaagagatagtataaatcctaatctgcctatattatccatcgctttttctgtcgcttgggttgatgttaaacttgccgaaattttgtttgcaatctttttcatgtggtagatttttgataggttacaataaaatagagactatgctggcaagggttccgaccagtgcaactaaaataatcaggtcgattatcgaaatgataaagcccgtaatcgctaatcctcgcggacttttaaatatgccgatcaatgacagcaggaatcccagaaaccaaaccacccagcctactcccgggagccatgatagaatcagggcgataagagataaaacgaatccggcggttcctgtcccgttagattgacgaacgggctgctgaatgatgatcgtctggttatgatctgtcggtgatgtggttctcggattcgtggtcgggcagattggatgcccgcattttaggcacgacggggcgtaacgggatatttccgtcccgcaggctgggcaatgaatcaatagcggttctggttgtgaggtttcgactgtcggcaattcatccggtgcctgcggaacttgggacggagcagtgggcgaaataggctttttacgcaagtatcgaaacgtgaaaacgaataaaagaatgatgatgattgtaaatacaatgccgctcactccaccgaggtattcctgccatacaggtgagtaaaattcttccatagttttattattagatagtaaaggtagtgttacatggttgtttttctccaaagcgaagtcggggtttcttctccgttcatgtttgtagacgtaacttctccgatcttttcaatctgcaaatccctgctgttgtgaccgagatagatgcctatacggtttgcgatgattacattacgattccggatgtcgccttcgtccgcatgtgcgatcaacatacgttcgtaatagtctttgaaatcttgcggaaaaggattggtaacccggtgcgagtcaaagatagattcggcgatgttctcgtaaatgtacttgtacaacgcatcgttgcctaattctttgagaattgagtaggctgtaatttcctccatgacggtaagtgtttgcgccacccagccccgacttggcatgattacaaaaagaaagtgtggagctgcccgtttaattcgaatagaggttctggaatacctttgctgaaataaactgacacaagaccccacacctgtatagtatggggattataatctcgcataccaatacaagtgatgagtgccgtcgtttaccctcagcaaattgaattttccagattcctattcgaggttaaatcgaaacactttcaccaatatacgccgcttgcgcgacaagacaaaggtaaaaaatatttcgcaattgacgacacccatcggggccttgttgtgcaaatttcgccaaacatgctttcgggtattatctacgcagggatgcagatataataaaaaagctggagtcttgaaggactccggcttcactcgcggcacgatgaggttatttgaaagtgatgccatgcactcgacaatgataaaagaaagtcgctatatctacttcgctgtgcctcctcatgcaccattcgaacatgctttcacattcgttatgatagtaatcaggatgccactgactcactaagtggaatagccgtcgcccttctacatctccgaataagccggcaagcgcttgcccgataccaatccatattttacgcccccgggtgatgtctttcttcttctcgcaaataatatctatcaacaaatagcatcgttgtttagccttttcctctgcctttgctgtcataggtcgctttatcttgcgtggcgcagcgtacctgttgggtttgcagtgcagatatggtacggcattggggttgaaatagggtttgggatcatagcttgccactcgtaaccgcacgacatcgctgccgctttcatcgacgattagtcccgtccgttctcgtatttcgtctacgagggcataaaattgatctttatggcgttcggggtaggcaatcctgaagacgaggcacaatccgttgccgccgacggataatccggcataacataaactgctaaattgctttttcaatatcttcttagccaagccccatcttcttcgtacattgggattctgcttcccgtctatgtctatacagatacagcggctatgaatatgttgaagtcgtttcttggcgcgggtgtcgaaaatacctgctacggttacgcatggaaggtcgaatttcttaatccgctctcgttcttttttgtcatttgaccatcggtatacctcgacccaatcataataatcggccgtcaatagaaattcccacaagtttaccgtgtcgcatggattgacgcaggtcatgtttcgaaaaagtgatacagcgggtccctcggctccatcaggcatctgaacaacggtgtttgtcattgaaagagtgattttctgttccatatttgtaaaatttacattttttattacattgtatatgcgctttttgggcgctgattttcatagctctataattcgacttgttgtctgcttgttgttgactttcggatcagttgtttccgttaaaaataagacgggatgttttaagtcccgtcattatccgctttctcgtcatcatctttcccgccccaattactctcaacttttctatcatatttttgcgagctcacatccacctgcttccgccaactgacgaaagattgcataatacgtgctggtgtctttgtgggcggttccttccgatagaatgcataatccatcaatactctgaatgcccttaaatgaagccgctccggcattaatttaatagattcgtagaatgagatgaaacacacaaaagattctcggggtttctgtctccggtgcttcttggttacctccctttgttgctcaataaattcattcatttcatcttctgaaatgtcagacagcatcttcaatggatcaaattcgttattcataaatttttaattattaagttttttgaattgttctttacagtattgcccgacggtggggattgaattctctttcatccagtcttcgatttcctgtcggatgaacaccaagcgccgtcctccgtgggcgggcctatgaaatgggatgagccgttgatgcgtgaacttgtagaccgtggcctttgaatagcccgtaagtttaatcacatcatcgatgcccataatttctggtggaggtgattccggcttattgggataagagttggggcggttgccgaagccgaggctcacgcagagttcgataaattgctttaccgtgagtcccgcgatggggaaatcatcggggaaattggatatgttgttgtgtgcgtccatagctgtttgatatgtttgcacactctctatacgaaaaacagggcttaataaaaataattaagcccaaaaatcgggattttcgggcttttttgaggggtttggaaaaatactttattaacttatcctttttgagtgctattttagacttgtgctaaaaaaggcttaaatgcacgtagaatttttacatcatcgtcatatttatctttccgttgtgacacggcttttattttgtgcgctgcgctccaaatggtattataggaattgatctttaactcctgcatgatccagcgataggacgtaggatgtcgagcatataatgttgcatacataatataaacccatattctcagatcgaggtgggtttttgcgagaaaagtttcccttaaaattgaagtagtctttttgcaatctctgcatataacatagcgataattagaacgatactgctgtatgtggctgaatccgccgcaatgaccgcagtaagtcgtttttgcctgaaatatgagggtgaaaaccttgtcttccgttggaaataatttcaatatttcagcatatggtttgggatagtaggccatacaggagaaaatggattacaaggcaagatatttttgtagtttgcttatgctatccttgtgcttctgtggattcttttctttcagctttctaatattgagtagcttccattgaaccgacggataatgctggaaatcccggtactccgatgcctcccaatccggcgtcccgtcctcgaatccgagtagaaacgccttgtcggtcggtgtcagatggtcgttgatatactcgaccagtcggcggcgggtcacttcgtactgttcataggtgaacggcgtcgaggacatgccctcgaattggttggtcagggcgtcgcgctggtcgttgaaattgggattgagcgactccaagatcgggcggtcgcttcccagcaggcagaagatgaatccgcgtttgatctcgtcgaagtctttgatataatcgagtatcaggtttacatcgaacaggtcgcgcgggtgctggcggtcgagtgcagccgtgatcttgccgccgtagagttgcgacagtggcacgatgcgggctttacagaatacaccgaaatcttcttgggcgaggtcgcataagggcaattcgacgggcggtgcgatgatgcctcgcttcacgtcgtttacctccactttgacgaaatgcccgttatgagtgcaaatcagtttgttgggaacttcgcgtactgcaatgcccggtatcgcggcctcgatttttgcctttaccgctttcagccgttctttgatatgggtgaggcttgcttcccgcggttcaacggggatgtaggtcaggtcgatgtctactgaatatcgcggcaaattttgcacgaacagattgattgccgtgccgccgtgaacggcaaaacattcttccgccgaaataatcgggatgatgcggagcaacagccgcactcgctctttgtactcttgattaatcatttttcagttctgccggaattgtgatttggtacttcttatcgtaaacacctcctttggtgattacccgcttgccgctgccgaggtctatccggtcgaggtcgagggcctcgaaccacgcatgacgggccttttcggccataaagaggaacagccgtttcactttgacggaacggcactcctccaacagtcgttgtacattcttcggcgggagtatcgacagcatttccatcacataatagaggtcggtaatgtcataatattgcggtgcgaggtgcagacactccatgaatgcccgttccggggtagagatcggcaactcgaaaaccccttgtcgggtggtggtgattccggtgtcggaattgaatatttcggtggtaaacagccggagtgtcacaccccagtcatattttctgaaccaaagcggtaaatactccttttgtggcgcagacagcgaaacggtcggcctgcccatcgggaggtagtgcgaatatccgtggatttccagtgccgacatggctccgattgtcagatgtttgtcagcctgtgtattgaggctgtacatggctccgtataatgtcggcgtatcgcccgtgcggatcattacacctgtgcctataggagtcagccaagcggattttatgtagcggtgctgtaagtcgttggagatgtttttgagtttcatccatgacgacaaatagactgctccgggtgggagggactgtaatagttggtttatttttgtttgcgatgttgtactcatagtacaaatatacaaaaaatattaaactattgttggcctattacaaaactttcgccgcctcattgattaccttgttgtcgaaactgtcgagataggtattagtcgtttcgaggtcggcatggccgagcatctgcgaaatgatttcgcgcgggattttattgtattgcaaggtcattgccattgtatgacggcttacatagcttgtcaaatgatagtcgatgccgagttcttcggccaacgatttcaaatatttttgatatttggcgtaacggcttcgtatatggttgtatagcttctcgcccgtatagccggaacaggtaatgatcggtaacaaatagttatcgacggtaggcgaggccgatttcagccgttcaatcaatccctgaatctccggtgtgatatggattcggatggcggttacgttcttttggtgcttaatcttgttgcgtttgtaaacgatataatttccgtcggccagccgttgaatatgatcggtcgtaaggtaggccatatcgacgaacgacattccgtagcagtagtaagaaaaaagaaagagttgccgggcgtattcgttctggggattctgtgcgggcgtatctttgagtttttgcaagtcttgaggcggaaggtaacgcttctccgtcgcttcttccagcttggcgatctcgaagccgccttttccgaaaggataggctgcctccgagccgataccctcccggttcgcttgattcaatatcgcccgcaatgccttgaaataatatttgcgggtattgcccttgcaaccccgcttttgcaggaacgtatcgaaattgcgcacgtaacgcagatcaatgtcggagaacagccgttgattcagcttgccgtcgtaatatttgagcagtcgaagcgtttcgaaatagcatttggcgttgcccgtatgtccggtatcctttaatgtttggatgtgactttcgaggtatgcgcagaatttgccctgcttggaggggttcaaaaatgtttcctcaaattggttcagtgtccagtcgatgccgtctatctcgaatttctcgataatctcgcgggcgcgggccttgaccttgtccagaaaggcattgtcctgaatgcgtttcttattggcctcccgctgtttttcgcctttcagattccgttcgatggtaagtcgttcggccgaattgtcccaataggccggatcgacgtataatttcagactgatgcgcttgcgacagctatttttggtgacgcataattggagaatgtgataccccattgaattgggtttgtatttccgtaaaacgatgcgaaccgaataggtcatttcccgatgtaaaataattggtggtacaaaagtggtacaagaaaaatcgcaatagatgacaataaggcaaaattgcaattatctgtacgtgatgtaaatatactaaaataaagttaattacttttatcagaaaaaataaatttctcctctggggggcgcgtggtcgcaagttcgaatcttgtcaccccgacaagccgagagtcagccgcttatgtgaaaacataggcggctgattttgttttggcggcagtggctgtagacgggcggctgacgtcacggtcgacggggaaaagggccgggaccttcggacgccgggccggggaatgtcgattttttttcgtatctttgcataaaaccccgtgttgcggccgttattattcatgtcgtgcagaccgcagatttttgcctttacacctctccgatagcaattctggatgtttgcggcggaaaaaatgtcgatttttcccggaatgtttttcaaatgcggaggaatttgccgggggttcttgcgatcagcggatttctgcgattttttttcgcgccgggcctgtcccgcacttcgtgagacgacgcccgcgatgcgggattgcggcggtcccctgtcaacagatgcttaacacgaaaaacaacagcttatgaaacaaagaaaaatgcttgcgctcacgctctaccagcttggacagctttaccgtcaggagttacccgaacttgtcgccgccgccgaggcgagcggcgacgccgtgcagttccgaaggcgtctgggcgagtgggtctcccgttcggagtccgcgcagggcgatgcgggcgagcagattcggctgctgatcgattacgacgggcgggaggtcgatgaactgtctaccggcgagcggatgccggtgcggacgctgacgctgttgtggcagtttcttacgggctgtctggagaatgtggagatgcgcacggacctgtttatcgacctgttctacctgttcaaacgtctcggaggagcggaactgccgccgctttcgatgcagcgtgtccgcatccgctccgagcgctggccttcgggactcgatgccgaggtgcgggagatcagggccgacaacagggagcgcatgctgcatctgctggtgcagaagatcgagaaccgcaaatcgacgccctcgcggttccgtttcgcggaggggatgagttatgaagacaaataccgtcaggtggccatctggtggaacgatttcaggtttcatctggcgatggcggtgaaaagtccctcggagctgaaccgctttctgggcaattcgctttcggcggagaccatgtacctgctgtctaaggcccgcaagaaggggatgccgttcttcgccacgccctattatctctcgctgctggacgtgaccggaaaaggatacggcgacgaggcgatccgcagctatatcctctactcgccgcagctggtcgagacctacggcagcatccgcgcgtgggagaaggaggacgtcgtcgaagccggaaagcccaatgccgcggggtggctgctgcccgacgggcacaatatccaccgccgctatccggaggtagcgatcctgattcccgacacgatggggcgcgcctgcggcgggttgtgcgcgtcgtgccagcgcatgtacgattttcagagcgaacggctcaacttcgagttcgagagcctgcggcccaaggagagctgggaccacaagctgcgccgcctgatgacctatttcgaagaagacacgcagctgcgcgacatccttatcacgggcggggacgccctgatgagccagaacaagacgctgcacaatatactggaggccgtataccgcatggcctgccgcaagcgcaaggccaacgccgggcggcccgacggcgagaaatacgccgaactgcagcgcgtgcgtctcggttcgcgcctgccggcctatctgccgatgcgtatcgacgacggattggtggaggtgctcagggagttcaagcagaaggcttcggccgtcggcgtgcggcagttcatcatccagacccatttccagtcgccgctggaggtgacgcccgaagcgcaggaggcgatccgcaggatactcgcggccgggtggctcgtcaccaaccagctggtttataccgtcgcggcgtcgcgccgcgggcatacgacccggctgcggcaggtgctcaatgcgctgggcgtggtctgctactacaccttctcggtgaaggggtttcaggagaattacgccgtctttacgcccaacagccggtcgctgcaggaacagcacgaggagaagatttacggccggctgacgcccgaacaggccggggagctggatgccgagctggagaagggcggcgacacggccgaacggctccgccgctttatgaagagacaccggctgccgttccttgcgaccgaccgcagcgtgctgaacctgccggccatcggcaagagcatgtcgttcaggctggtgggcattacgcccgaaggcaggcgcatcctgcgcttcgaccacgaccgcacgcgccgccacagtccgatcatcgaccggatgggcgaaatctatatcgtcgagaacaagtcgctggccgcctacctgcgccagctggaaaatatgggcgaggatgcggacgattacgccagcatctggaactatacgcacggcgagaccgaaccccggttcgggctttacgtatatcccgatttcccgttcggggtgaccgggcgggtgagcaatctggaactggagtgattcggtacgaaacggcgatgaggaggcccggcggaagcgattccggccgggcctcgaaactgttgcatatatcaggaatatttattatctttgtaagaacgataaatgaagaccggcgccgatgtccggagcgccgttcggggcatgttccggttttcgtgcaggcagaattatgaaacagtccgaaagattgatgtcgctcgacgccctccgcgggttcgacatgctcttcatcatggggttcgcgtcgctcgtcgtggccgtgtgcggcttgtggccttcggccgtgaccgatgcggcagccgcttcgatgagccatgtcgcgtgggacggcttcgcccaccacgatacgatctttccgctgttcctcttcatcgccggggtcagctttccctactcggtcgccaagcagcgtgcgggaggaatgtccgaggggcgcatctatgccaagatcgtccgccggggactgacgctcgtcgtgctgggcatggtttacaacggactgttcaagctcgatttcgagaatctgcggatcgcgagcgtactgggacgcatcggactggcgtggagcatcgctgcggtgctgtatctcaatttcggcgtgaagacccgtgcggcgatcgccgtcgcggtgctggccggttacggagcgctttcggcgctggtcgcggcgcccgacgccgcaggcgccgggccgctgaccttcgaggggaatctggctgggtatatcgaccggcagttcctgcccggaaagctgatatacgggtcgttcgatcccgaagggctgctcagcacggtgcccgccgtggtgacagccatgctgggcatgtttacgggcgaattcgtaaggtgcagcgatattcggggcggccgcaagacgctttggatggccgcggcggccgcggcgctgctggcggcggggctggccttcagcggggtgctgcccgtgaacaagaaactgtggtcgagcaccttcgtatgcgtcgtgggagcctactcgctggggatgttcgccctgttttactacctgattgacgtgcggggctggcgccgctggacgctctttttccgcgtcgtcggactcaattcgattacgatttatctggcccagcgtatcgtgggcttcggacgtatatccgacttcttcctcggcggcatcgcatcgaaatgccctgaggccgtggctgccgtgataagcagtgcgggttatgtggccgtctgctggctgtttctctacttcctttacagaaagaacgtttttctgaaagtgtagtcgcatctgcggattccgtaatgtgccgtgcggaggtgcggctggcgcggagtttgctccccggtccgttaaagtttaaaatcaaaaaatcccgttatgaacaagacgattcaccgcgccgagtcgcgcggttatgccgaccacggttggctgcagactcaccatacgttcagttttgcaaactattacgatccccgccgggtgcatttcggcgccctccgggtgctgaacgacgacaccgtggctccgggcgagggtttcggaacccatccgcacgacaacatggagatcgtgtcgatcgcgctggaaggcgcgctcaggcacggcgacagcatgggcaacatgaaagtcctgcgtccgggagagattcaggtgatgtcggccggcacgggcatcacgcacagcgagatgaacgccagcgagaccgagccggtcaagtttctgcagatatgggtgctgaccgacgcgcaggaccacacgccccgctacaatcaggtcgagctggcgcctgccaagcgcaacgttccgcatgtgatcgtggcgcccgaaggccgcggcggcgagcatgtgggatgggtgcatcaggacgcttggttctatacgctggacctcgacaaggatcgtgtggtcgaataccgcatgaacacccgcggccacggcgcctacgtcttcgtgatcgaaggcagcgtcgaggcggcgggcgaggagctgggaccgcgcgacggcatgggcatcaccggggtggacgagttcccgatcaagggagaaaccgacgcgaaggtgttgattatcgaagtcccgatggagatttgacaaggcaaaggaaaggagctttccggcaaatttcctcctcctgcgggagcggcgaacgcttccggatgggagtgcgaaggaaaagggctgtcccgtggggcagccctttttgcgtcggtcggcgaaggcaccgggaagagggggttagccgggaggggtgtggcgcccggcgccgctgcgtcagaattccgaggtgaagtggaaccggatatccttgaaattctcctgcgcgagggcgagtccatagctcgtgtcggcgaggaagacgtcgcggccgtgcttgtcgacggccatgttggtgtgcttgcggcgtttgaagtcggccagctgcgcggcgttgtcgctctcgatccagcaggctttgtagatcgagatcggctcccagcggcaggcggcgttgtactcgtgttcgagccggtactggatgacttcgaactggagcgcgcccaccgtgccgatgattttgcggccgttgagggagctgacgaacaactgcgccacgccctcgtccatgagctggtccacgcctttggcgagctgtttgaatttcagcgggtcggcgttctcgatatagcggaactgttcgggggcgaacgacgggatgcccgtgaatttgagcttttcgccctcggtgaaggtgtcgccgatcttgaagttgcccgtgtcgtgcaggcccacgatgtcgcccggataggcgaagtcgatgatcgacttcttctcggccatgaaggccgtcggcgacgagaatttgagctgcttgccgctgcgcacgtgcaggtagtttttgttgcgttcgaacgtgcccgaacatattttgaggaatgcgatgcggtcgcggtggttggggtccatgttggcgtggatcttgaagacgaagcccgtcattttgggttccgcaggctccacgatgcgggtttcggtcggagccgggcacggcgagggggctatgcgcacgaagcattcgagcagctcgcgcacgccgaagttgttgaccgccgaaccgaagaataccggggccagttcgccccgcaggtaggccccgcggtcgaaatcgtcgtaaacgccctcgaccagctcgacgtccgagcgcagctgggccgcgaatttgtcgccgatctgggcctccagctccgaagaggcgaggtccgagatttcgacggtcgaggcgtcggccgtaagcttctcgtcggaggtgaagagcgagaggtttttctcgtagaggttgtatacgcccttgaacgtggggccgttcgagatcgggaaggccagcggccgcacgcggatgttgagctccttttcgacctcgtccagcaggtcgaacggctccttcgaggggcggtcgagcttgttgatgaagacgattaccggggtcgagcgcatgcggcagacctccatcagcttgcgcgtctgcgactcgacgcccttggcgccgtcgatgacgatgatgaccgaatcgacggccgtcagcgtgcggaaggtgtcctcggcgaagtcttcgtggcccggagtgtcgagaatgttgatcttcgcgcccttgtattcgaagcccatcacggccgtggcgaccgagattccacgctggcgttcgatctccatgaagtccgaagtggcgcccttcttgatcttgttgctcttgacggccccggcgacgtggatggcgccgccgaagaggagcagtttctcggtaagggtggttttacccgcgtcggggtgggcgatgaccgcgaaggtgcggcggcgtgtgatctcttcctgtaatgtcatgtaactgaatgtgtgtctgttttattgcggggagtgccgggcgctgttccgccggcggcaatccttagttctccttcgggtagtcggcgttgaagtggcagccgaccgactccttgatttcgcggccctgcttgatgaccagataggccacggcgatcatgttgcgcagttcgcacagttcgcggttgggcttggttttgttgtaaagctcctcggtctcctgccacaggatttccagccgccgcatggcgcgcttgagcgagaggttcgagcggacgatgcccacgtagttggacatcagcgtctgcatttcgcgcttcgactggatgatcatcagcatctcttcggtgtgctgcgtgccttcgaagtcccagtcgggaatgccctcctgaatttcgacccggtcgagcagcgacgatgcgtggcgagccgcctgatcggcgtataccaccgcttcgatcagcgaattggatgccagccggtttgcgccgtgcagtcccgtgcaggaggtttcgcccagcgcgtagagccgtttgatggaggtttcgccgttggtgtccaccttgacgccgccgcagcagtagtgcgccgcgggagtgacgggaatccagtccttggtgatgtcgatgccgatcgaaaggcacttctcgtagatgttggggaagtggctgcgcacggcgtcgggatctttgtgcgtgacgtcgaggtagacgaagtccgatccccgcttggtcatttcgcggtaaatggcgcgggccaccacgtcgcgcggcgccagcgatttcatcgggtggtatttgtccatgaattcctcgccgccgggcaggcgcaggatggccccgaagccgcgcatggcctcggtgatgaggaagttgggcttctcgccggggttgtagagcgtggtggggtggaattggatgaactccatgttttcggtgatcgccttggcgcggtggcacatggcgatgccgtcgcccgtggcgacgaccggattggaggtcgtggagtagatgttgccgcagccgcccgtggcgacgacggtgaatttggccagcatggtctcgatttcgttcgtttcgagattcaggacgtaggccccgaagcaggtcaggccgcgggtgtggcgcgtgacgaactcgcccagatggtgctgcgtcagcaggtcgatggcgaagcggtgttcgagtacggtgatgccgggatgcctgcggaccgactcgatgagcgcccgttcgatctcggcgcccgtcaggtcctcgtggtggaggatgcggtgctcggtgtggccgccttcgcggttcagctcgaaacgcccgtcgggagtcttgtcgaagcgcgtaccccattcgatcaggtcccgaatcagctccggcgcccggcgcacgaccagtccgacggcctcttcgtcgcatttgcccgcgccgcagaccagcgtgtcgcggatgtgtttctcgaaagtgtcgggggcgtaggttaccgagcagatgccgccttgcgcatagttggtgttgcactcgttcatttcgcccttcgtcacgatggtgacgtgtccgtgggcagcggctttgagcgcgaacgaaaggcccgccgcgccggaaccgataaccagaaagtcggttttcatagttttgcaagcgttaagcgtcgcaaagttataaaaaatgcccgataatcccattttcggccggaaaaagcgcacggaaaaatggggcaacggctccggaacggacccccggagcggtaattttttcggcccggcaggcgatatttggaatttttctctatttttgccttaagctacccaaaataaattatgaaaaaactacttttgactctggctgccggaatagttctttgttcctgcggttcgcacgatccgcagatcgcgatcgtgccctatcccaatcatctcgaaaccggtcggggaacctatcgggtgaccgatcggcccgttacgtgtgacagtcgcaccgacgagcggacgcagcgcgccgtggtcggattcgccgcacggctggcgacggttaccggcgggacgaatcccgtcacggtcgccgacgaggtgcccgcgtcgggcatccgtttcgtcacggacgaatcgctcccggccgaaggctatgaactgaacgtggacggggagggaatcgaagtgcgggcgtcgcagtttcccggcttcctctatgccctgcaaagtctcgaacaactgctgcccgcggcggtttacggcacggagcctgcgcccgatgcggcgtgggaggtgccctgcgtgaagattgccgacgcgccgcggttcgcataccgcggcatgcacctcgacgtggcgcgccacttcttctcggtggacgaagtgaagcggtatatcgacgtgatggccatacacaagctcaatacgctgcactggcacctgaccgacgatcagggctggcgcatcgagatcaagcgctatccggagctgaccgccgtgggcagcatccgcaaggccaccgtggtccgcaaggagtggggaacctatgacggtacgccctacggcggtttctatacgcaggacgagatccgcgacgtggtgaaatatgccgccgaccggggtgttacggtgattcccgaaatcgacctgccgggccatatgctggcggcgctgaccgcctatcccgaactgggctgcacgggcggtccgtacgaggtgtggggccgctggggcgtggccgacgacgtgctttgccccggacgggagaagactttcgaattcctcgaaggcgtattgaccgaggtgatggagctgttcccctcggagtatatccatatcggcggcgacgagtgcccgaaggtgcgctgggagaagtgtccgcgctgtcaggcgaagatccgccagctcggcctgaaggacgacggagagcataccgccgagcattacctgcagagctacgtgaccgaccgcatcggcaaattcctcgcgcggcacggccgccgcatcatcggctgggacgagattctggaaggcagggcgccctccgacgccgtcgtcatgtcgtggcgcggcagcgagggcggaatcgccgcggccaagctggggcacgacgtcatcatgacgccgaattcgcacttctatttcgactactaccagtcgctcgacaccgacgccgagccgttcggaatcggcggttacataccgatggagcaggtctattcgtacgatccggcgttcccggagctgacgcccgaacagcagaaacatattctcggcgtgcaggccaacctctggaccgaatacgtcttgagcgacgaacatctcgaatacatgcttctgccgcgtctggccgctctgagcgaggtgcagtggtgtctgcccgaaacgaaggactggaaccgcttcatcggcagtttcaggatggacaagatctattcgcagctggggtatgagttcgccaagcatatcttcggggtgacggcgtcgtatgcggtcgatccggagaaggggggcgtcgtgatgaccctcaccacgcagggcggcgcgccgatccgttacacgctcgacggctccgatcccacggcttcgagtccgctttacaaggcgccggtgaccatcggcgaaagctgcacgttcaaggccgcggccctgcgcgaaggcatgcagacgccggtctatacgcggaaattcgatttcaacaaggcgaccggacggcgcatcgcgctgaacgccgcgccgacgctcaaatatacctacggcggcgcctcgctgctggtggacggctaccgcggaggtcccgtctattcgaacggcgcgtggatcgggttcctgaacgagccgctggacgttacgatcgacatgcagggggcgaagccctattcggcggtgaccgtcgaatcgctggtcgagaaaggcgagtgggttttcccgccttcgtcggtgggggtctacctctcggacgacggcagggagttcaccgaggcggcgctgatgtccgtgccgcaggagacggccggcagccccgacggcgtcaagccgttcaaggtgctcttccccgaaacctcggcccgctacctgcgcgtggtggcccgtacggtcgatccgattccggcatggcacggcgcggccgggcaaaaggcgcatatgttcgtggatgaaatcatcgtagaataaaaccgggagtggacgtggagaagaccgccgtgcggatacagggacgcgagtccgttgcgatgacgacggccgaattcggccgcctgttcgctacgtggcgcgcgcggttcgaagcgatcgcgtgccgctacgtgcggagcgcggcggtggccgaggatctcgtctcggacagcttcatgtccttctgggagaaccgcggccggattcccgccgatgccaacctgcaggcctatatcctgattatcgtccgcaacaaatgcctcgactggctgcgcgcccaaagcctgcatgccaagatcgagcaggaggtgtacgagcttaggcggcgggtgctggcggccgacatacggtcgctgcaggcgttcaatcctgaggagattttctcggcggaggtggccgcgatcgtgcggcagtcgctcgaccgcctgcccgaactgacacgcgaagtgttcgtcgcccgccgcttcgaggagctgagctacaaggagatcgccgaaaagtacggcatcaccgtgcggcgcgtcgaattcgaactggaaaaggccgtgaagcagctgcgcgtggcgttgaaggattatttgcccgtgctgcttatgttgctgtcggataatattttgcgatcctgaattcgagagcgtgaattattaaaaatatttttttagcaaatccaagtgcgtctgattgggaatcgggcgcacttattcgtttttatagaaacagacgaagagagagatgaatccggaacttatctataaatatttggaaaatacggcgaccgatgacgagatgaagcaggtgctcgactggctcgacgccgatcccgcgcatatgcgcgaattggacgagctggacaaagtgatggccgcttcggtcatttacggtcccgacgtgctgtcgcctgcgcctgcgaggaaggcggcgcgccgcatttcgctgggtcgcattccgctgcgccgcatcgtgcgttatgccgcggagctggccgccgtggcggtcgtcggcgtcggtctcgcgcggatgcttgccgacgaccggatcggagagtgggcgcggcggacgacgacgctcgaagtgcctgcaggacagtacctgagcatggagttgcaggacggcaccaaggtctggctcaatgcgggaacccggctggagtatccgctggtgttcgccgggggcgagcggcgcgtgaaggttgcgggcgaggcgatgttcgatgtcgagcacgatcccgcgcatccgttcgtggtcgagacgttcgcctgcgacgtcgaggtgctgggaaccaaattcgacgtgacggccgaggagcgcgagggattgttctcggcggccctgctgcgcggaagcgtgaaggtgaccaaccgcctgacgcccggcgaacagttcgtcctcaagcccaacgaggaggtgcggctggcggggcggcggctgaacctgaatgcgatcggcagcatggacgactacctctggaccgaaggcatgatcagcatcaagggcctttcgttcggggagctgatgcacaaattcgaaaagagcttcggcgtgaagatacggatcgaccgcgcccggatgccggaggtcgattacaaccacggcaagatccgtatttcggacggcgtcgattcggcgctgcgcctgctgcagatggcctcggatttcacctatacacgcagcgaagacaacggaacgatcgtcatacgataaccagtcataaacctgaaaaaaacgaaaaactgcctatgagaagagccgaacaatgaccctcgccggtcgtccggggtgaataaaaaaagcttgcagatggtcgcaacatccgcaagccgcggtcggccgttaatcagctacccagcctactaacaactaaccaattgcaaaagtatgaacaaaaaacgtattcagcaaattaaatgcctgtttacactcttttttgtcgtgtgcgcatcgttctatgccacacggtcatacgctcagaataccgcggtgacgatccgtctgtcgggcgtcagcatggagcgtgtgatgaatgaaatcgagaaccaaaccaattatttgttcctgtcgaacaaggacgtggacatcaacagcgtcgtgagcgtcgatgtggaggcgcgcccgctttcggaagcgctcgcgcagatggtgcgcggaacagacgtggtctaccgtttcgacggcaaatacattctgctttcgaaggccgaccgcaggcccgtgaccgtgaagggcgtggtgaccgacgccgacggcgcgccggtgatcggagcttcggtgatcgtcaaaggtacgaccgtcggagcttcgaccaataccgacggctccttctcgctgcaagttcccccccccgcggaaaatgcggtcctgaccgttacctacttgggctacgagccggtcgatgtgaccgtcggcagccgcaccgatttccggattacgctccgcgattcggccgtggcggtggagaacgtcgtggtgacggccctcggcatcaaacgtcaggagaaggccctgagctacaacgtgcagcaggtcaagtccgaggagctgacgaccgtcaaggacgccaacttcatgaattcgctggtcggcaaggtggccggcgtgcagatcaacagcggtgcgagcggccccggcgccagcgcgcgcgtggtgatgcgcggcgagaagtcgatcgagaagggcaacaacgtcctctatgtgatcgacggtattccgatgtataaccacagcttcggcggcgacggcggcacctatgccaagcaggccggttcggagagcgccgcggatatcaaccccgaagacatcgagtcgatcaacatgctgaccggcccttcggctgcggccctttacggcagcgacgccgccaacggcgtggtggtcatcaacaccaagcgcggcgtcaaggaccgtacggtggtgaccgtcagcaacagcacgaccttttcgaaggtctaccggctgcccgacatgcagaacagctacggaaccagttcggggctgatgaactggggtgagaagtatgccagcacgttcgacgccaagaagttcttcaacacgggaaccaacatcatcaactcggtgtcggtatcgacgggcaacgagaagaaccagacctatatctcggcttcgacgaccaatacggcgggcatcattcccgaaaatacgtacgaccgctacaacttcacggcccgcaataccacctcgttcgccaaggacaagctcgtattggacttgggcgccagctttatcatccagcacgacgaaaacatggtgacgcagggcaagtactacaacccgctgcccgcgctctacctcttcccgcgcagcgacgacttcgacgaaatccgccttttcgagcgctgggaccccgtgcgcggctatatggtgcagtactggccttacggcgagggcgcgcattcgctgcagaacccctattggattcagaaccgcatgaaccgcgagacgagcaagcgccgctacatgctcaacgcctcgctgcggtggaacatcaccgactggatgaacgtttcgggccgcgtgcgggtcgataattcggaataccgcatcaagcagaagctctacgcctcgacgctgaccaccttctgcggaacgaacggcggttacgaggaccagacgcagcacgaccgcagtttctacggcgacgtgatgctcaacatcgacaagaccttcggcgacgactggacgctcaacgccaacatcggcgcttcgatcaacgaccagcgctacgagcaggccggcgtggcgggcgacctgctgctgaccaaccatttcgccatgaacaacctcaactatcaggagaagttcaaacccctgcaggaggggtggcacgaccagacgcaggcgatcttcgcttcggtcgaggtggggtggcgttcgatgctctacctgacggtgacgggccgcaacgactgggcttcgcagctggcctattccaaaaactcgtcgttcttctatccttcggtgggtctgtcggccgtggtttccaacatggtgaacatgcccgaatggttcaccttcctcaaggtgcgcgggtcgtattcgaaggtggcgtcggcttttgcccgctacctctccaatccggcctactcgttcaacaaccagacccacaactggagcaagccttcgacctatccggcctacaacctcaagcctgaggacaccaagtcgtgggagatcggcctgaacgcccgtttcctcaaccacatcaacctcgacgtgacctactaccgttcgaacacctaccaccagacgatctatgcgccgctgccctcttcgtcgggttacaaccaagtggtcgtgcaggccggcgacgtgcagaaccaaggcgtcgagctggcgctgggctacaacaacaagtggaacgacttcacatggagcagttcgtacacctttacgctcaaccgcaacgagatcaagcggctggcggccggcgaagtgaaccccgtgacgggcgagaccatcaccgacaacgagattcagaaagactggctgggcgcgagcaacgtggcgccgcaggtcatcctgcgtccgggcggttcgatgagcgatatttacgtcaatcacgagcttaagcgcgacctgaacggcaacatcgagatcgatccttcgacgggcaacctctcgatcgccgaaaccgacttccgcaaggtgggccagctctcgccccgctacacgatgggctggagcaacagcttcggctacaagggcatcgaactcggcgcggtcctcacggcccgaatcggcggcctgacctactcggccacgcagggcgtgctggactactacggcgcgtcgcaggccacggccgacgcgcgcgaccgcggcggcattccgatcaactacggcaccgtcgatccccagaagtactattcggcgatttcgacggccgagggcggttacggagcctattacctctacagcgccaccaacgtacgcctgcaggagctgagcctgcagtatacgctgccggcgcggtggttccgcaacaaagccagactgacggtcggattcgtcgccaagaacctctggatgatctactgcaaggcgccgttcgaccccgaaatctcggcggcgacggacaacgcctactatcagggcgtggactacttcatgcagccgagcacgcgcaatttcggctttaacgtgaaactgcaattctaaccgaaccaaagctatgaaaaatatcattaaacttacctgcctcttattgacggtatgcggttttgcgggttgtacgggcaatttcgacgagtacaacaccgatccctatgccctttacaagggagaccccgccgtgctgattcccaccatgctcgacgccatgatgtacgtgcagcagaacgactcgcagatggtcgatcagatggtcggctcgctgggcggatatttcacgctgtcgaaccgctggggcggtcagaacttcgatacgttcaatgcgtccgacgcatggaacgccacgccgtacaatacgatgttcgaggatatttacgccaacttcttcgacatcgagaaatcgaccagcaagtcgggccactactacgcgatggcccgtctggtgcgcgccgcagtgatgatgcgcgtcgccgactgctacggcccgatcccctacagcaaggtagccgacggctcgttctatgtcgagtacgactcggcggaggatgtctacaagcatatcatcgaggacctcgcgggcgcggcgaccacgctctacgcctatgcgcaggagtatccggcgtcgaaaccgctggctaacaacgatccgattttcgcaggcgactatacggcttgggcgcgtctggccaactcgctctgcctgcgtgcggcgatccgctcgaacgaccgcgaggccgccgagagcgcctgcggccatgccgccggcttgatcgagaccaacgcccagaacgccatgatgagtcccggcgtgcagggaaatccctatcagctggcttcggcgtcgtggggcgacctgcgggtcaacgcctcgatcgtcgattacatgaccgggtacgacgatccccgctgcgaagcttatttccagaaatcgaccttcgacaacacccgctatatcggcatgcgcgccggtacggccggattcgagaaatcggccgtaagcggttattcgctgcccaacgtgcagtccggctcgtcgctgccgattttcgtggccgccgagaccaatttcctgcgcgccgagatggcgctcaaagggtggaccgtaggcggtacggcgcagtcctattacgaagccggcgtgcgtctgtcgatggagcagaacggcgtggcgggcgaggacatcgacgcctatctggccgatgaaacgctcgttcccgccggacatctgaacgatccgcgcggcgcgaagtacaactacgaccgtcagacggacgtcaagatcaagtggaacgacgcggacggcacggagaagaatctggagcgcatcatcacccagaaatggatcgcaaacttcccgatgggactcgaagcgtgggccgaattccgccgtacgggctatcccgaactggcgccggccatcgacaacctcagcggcggcgttatctccgacaacttccgcggcctgcgccggctgcgctatccctataccgagcgtaacctcaacaagagcaattacgacaaggcggtggcattgctgggcggtacggacaacgagtcggtcgatcttttctggacgaagaaaaaatagtgtcgaaacctaaacgaaagcatacattatgaacataaagaaaaatatatgggcattggcggcggcgctgcttttcgcgactgcgtttaccaactgcagcgactggacggaggtcgaagccgaaaagaaggtcgaatacggcaataccgagacctcgcgccccgaatcctactaccaagctctgcgcgagtggaaaaagacggatcactcgatttcgttcgggtggttcagcggctggggcgatcctgccgttctgacggccagtatgctgatgggacttcccgacagtatggatatggtctcgttgtgggacaattcgagcaacctttcgcagggcaagatcgaagatctccgcatggtgcagcagaagaaagggaccaaagtgctgatgtgtacctttatccagtatgtcggcaaggggttcactcctgccgaatatgatgtcgacgaagcgacccgtgaagcgttctggggctggaaagaggtgcagaagctggacgaagagggtaatccgatgttcgacaagcagggaaatcccatcatggtgcctgaggagaacgccatgaaagcatcgttggaaaaatatgcgcaggcgatcgcggatacgatctacaaatacggttacgacggtctggatatcgacttcgagccgaatgtggacggatatcccaatgcgaagctcgacgagcatcccgatcgtgtggaagtgttcctcgatattttgtgcaagcacctcggccctcagtccaattcgggtaaaatgctcgttatcgacggcgaactttgggaggtgccgtcgaagaccgctacttacttcgattatttcatcggacaggcctattcggtttccggcggcactccgtcgccaactgcaggacagagcgaatcgaatatggactctcgcctgaggcagataatcaataacttcggcgaatacatgtccgaggaggagatcaccaagcgcttcatcgtcacggaaaacatggagagcgccatcgacgcattgaacggcggttattactggacgcttcgcaacggaaccagactcgacaaggccgagtgcccgtcgttgctgggaatggccagatggcagcccgtcaacggcttccgcaaaggcggtttcggcggttaccggttcagcaacgaggcggtgaacaaaccctcctacaaatggatgcgaaccggaattcaggcgcagaaccccgcagtcaattagtccgaacaaccaaaagcaagaaaaagatgaaaaacagcattaaaacagcagttctcggtctcgcggcgctcgtttcgggattctcggcctgcaacgatgccgattacgatacgctcggagtgcacgccttcgtcagcgagagcgcgtcgaataaaagcacgaaagtgaccattacggaactgggcgccgacgccgaaatcacggcctgcctgagcgaggccgcaacgaaagacgtaaagctgaaattcgtggtcgattccgaggtgctggaccgttacaaccagaagcaggcttcgagttttctcgtactgcccgaagaggtctacgagatggactccgaagtgacgatcaaggccggagaattcagcgctcctgcaaccaagatccatatcaagccgctgcccaaggagtatgtcggcgagagctatgccctgccgctgcgtcttgtcagcgccgacgggtcggttccggtgacctcgctgacctcgacctatgtgattacgaccgaagcgatcgtcgtctcgtcgctcccgatgttcgtcggcggcgcgggacttgccgccgacggtttccccttgacgcttccgcagtttacggtcgaggtgcgtttccaagtgagcaatacggccgaccgcaaccgtgccgtatttaccaacggcggttcggtgctgctgcgcttcgaggacccgcagaacgacacttcggaccataaggcccattcgctggtgcagttccaaggcgacggctggtatctcaatccgtcgttgtcgttcacgcccaacaaatggcagcatctggcgctgacctatgacgggaccaaggtgaccctctatgtcaacggtacttttgccggaagcaaggagggcgtgtgcgatcccaacttcggatcggccaactggttcggcggcgatgccggcggcggacacggaaccggcgattcgtggtggagcggatgtaagatactgatgtccgaggcgcgtatctggtcggtatgccgtacggaagcgcaggtgcagaacaacatgaccacgaccagcgccaaatcgcagggcttggaggcttactggcgcttcaacgaaggcgagggcaatacgttcgaggactgcacgggcaacgggcatacgctgaagacgtccaagaccccgacgtgggttgccggcatcaagtccaccgatacggaaacgccgtggccttaatcccgtaattatggcgcaggcgcgcccggtgcgtgcctgccgccatgcggttcattcaaattgtttgttaaatacgattacattatgatgaaaaaattgaaatatcttttggccggagttctcgtttctgctgttgcgggttgttttgtcgcatgcgacgacgatgagtctgcaacagacgaatggacggccgactatgtttatttggaacgtctgaagctcggaatcggctctttggagttcaatcagacgcattcgtctctgggaattgcaggcgatacggaggtctcgatgccgtttgcggtttgtcttgccaaaccatggaagtcggatgtcgccgtgaagctcgcttatacgatcgaaggcgatatgccggaggagatcgttactttccgcgaaggcggtgccgtcgtgattcctgccggggagttggcagccagagatacgatggacctcaggacggattggagctttgttccgcaggaggctgccacttacaaagtgacggtggggatcgaatcggtacagccggtttccggacaattgcgtatttcttcgaaacagaaggagttgtccgttcagataaacaaagccaaatccatggatatacaggccgatgtgaaaccttcgggcagccggattgcggattacagcggttggtcggtttatgctaccaatgtggatgacaataatgctgactggggggggcatcaacctaaattgatcaatggaaataccggagattatatatggttcaatactcctcatctcggtgtaaagatcgacatgggtgctacaaagactgttaccggattggagacgttcagtgcttacggtgcgtattatgcgatgagttcgtgtgctgtttataccagcgatgacggggccgagtggaaactcgtaacacctgaagagggcttgtcgatgacgcctgccggaacgcagtatgtttcgtttatcgcgccgataaccgctcgttatataatttggcatatgtacgggtcggcgcctctcagttccgagatttatgtttattccaaatagaggtgggctttgaatagtttttgaggggaagccgtccggtccgagaccgggcggctttttttgtggaattgtgggtaatcttgtctgccgaggtcgtgtgtgaatttgtgattgcaacagctatttataaagagcgacaacggtacaccaattaatagcgcatcgttgattggcagaggaaacgagagccagtgttgtttagttgtaatccatgcaagttccccgcaggctgagacagatgacttggtttgcagctgaaatatctgcataattatattttggacagccttgtagctgaattttgtattttccgggagaaagataaaacgttagcattgtcgggtctggatcttcttcgtcggatgcggggtatgttgggaacgggatgtattcagctccgttccatatgtcggcaaggggttcggacgaaatgtttgaatagggatcggttgcaccccatacatcgagccagacacttacaggcacggaagcggttataatatcgacatacattgttcgggttatttccaattcgaaaataagatcgtttccgcatcctctcaatcggtcgatgtcccagaaatattctccgctggtatctaccgccatgatttttatgaaattatcgctgtatggacctagttttatcatgttgctgcccatatccgtcccttgccggggatcttccagataggcgcagttgacaatggtgcattcgtttgaataggctgggccgaacggagtcgatatagatgcccggtattttgtgatacgctgttcgggtatcggcaggcgaatgtgtttttcatcggagccgaatggtgtccaaaagccgtttttatatacttcccatgtggatttcgaggcggtcagggatggttcggtcaggtagggaatgtcgaagtagaaacggttgaatccggttttgttgagttctatgagttcggggatggtgccgccgctgagaaaagacttgttgtataccgtgcatatgttcgaatatcggttttcgtggtcgcaggcggctttgcggcggtacatggcagtgaaggtcatcggtgctggtgtgacgagcgattcgccgacggccggcgggatggttgtccatgagtcgccggttttggtttcccatgtatagcgtatggcactgcgcggacagacggcggcctgagtggagtttattcgcagttgttcgttcggattcgcggtgtcgataagcagcgtgtctgcgatgctgcctgctgtcagcggttcatacatgctgtttgtaacggtgcagatgttggaatacagcgtctttgttccgtttacggccttgcggcggtattcgctcgtaagttctgtggtgacaggggcgttcgtgaggtttttaccggtctggccgcttatggacgtccatttgccgtccgacttcttttcccacgcataaattatcgttcccgtacctccggaggcgtccttgacggaattgatggagaaaaccccggttgtctggctgatggttttggtctcttcgatggaacctgcagtaaaaccgggtatcgggaaaatcaaggagagttctcttttgtcttgggtgctgaatcctgtccatgaaatgggactcgtctcctttgtcatgatggatttattgtcgtattgggaggttccgttgctcggagttccccagtcttcgtcatctccgataagctgtccgttgcgtagactatggcccagtcccagagaatgcccgatggcgtgcatgattaaatacatggcgttgttctgcaccttgctgtcgaacaggttattgacatcgggcaggaatgtgcagtccgcattgagggttacgctgcccggcttgccgtccgacgacggaggggtcactttcataagttttgcggtgctgttgccgaaactgcttttgttttcgaacttgattttgatctcctgaaggttgctgcccgatgtgttggaaatggatatgtaacattttgccacggcgttccattgggctatggcattcgtggctggattggtccagagcgcagaggaagaggtgaggttgccgacgttcatatatagcttgttctggtattgctgacttgtcaggtagcccttattgtgttgtgtcaggcgggtctgcggctgttgtccggcctcttcgagccattcgtcggtcagccagatatctccttcgaccagatatccgtcgtctgtcttttcgatatcggcgatatcgtagcccagcgatgagatgagggcgatgtcctgcttcatttgttcggacatctgttctgatgagttgttcatttgcggatcggctttttggcaggatgtcagtgagaccgcgacgaataaaatacccggaatccatgagatgacactccattgcggaaattttttcatgatgaaacgattttaggttagtaattggatgtgattgggtcgttataagatacgaatttaaagtgtcgaatgcaaatcattcggggcgattatcggccggagcgtgtgcgacggatgcgaaaaaaaacgtacatttgtggccatgaatgaacggcatatagacataaacgaattcgattacgacctgcccgacgggcggatcgccaagttcccgctggccgagcgcagcgcctcgaaactgctggtttaccgcggcggggagatcggcgaagcgcatttcgccgacatcggcgacgtgctgcccgaaggccagctgctggtgttcaacaatacgaaggtgattcgcgcgcggatcatcatgcacaagccttcgggcgcccgcatcgaggtgttctgtctcgaaccgcacgatccggccgattacgaacgggccttcgccgtcgtcgggcggtgcgagtggtcgtgcatcgtgggcaacctcaagaaatggaaagagggatatgtggagatcaatttcgagcacgaaggccgcccggagcatctgcgggcgtggctcgtcgagaaccgcggccgcgagcataccgtgcgtttcgagtggtcggcgacgatgacgttcgggcagctgctcgaatacctcggacggattccgattccgccctacctgaaccgcgaaagcgaggagatcgactatacgcgctaccagaccgtctattccaaattcgaaggatcggtggccgcgccgacggcggggctgcacttcacgcccgaactgatcgaagggatgaaggcgcgcggcttcgggttcgaggaggtgacgctgcatgtcggggccgggacctttctgcccgtcaaggacgacgatgccgctcggcatccgatgcacaccgagcatttcgaagtgcggcgtgcggcggtggcccgcctgctggaaaagtgggggcggatcacggccgtcggcacgacttcggtgcggacgctcgaatcgctcacggcgctggcgtggcgcatacgtactgccggaacgcccgatgcggagcgggtcgtcggccagtgggagctgtacgacgtgccggcggagttttccgggcgcgaggcgctggagaccctgctgaaatacatggatgaaaagggactggaacgcatcaaggcggcgacgcagatcatgattacgccgctggggtacgagttccgcatcgtgcgcaatatcgtcaccaatttccaccagcccaaatcgacgctgctgctgctggtatcggctttcgtcggcggggactggaagcggatttacgaatatgccctcggacacgggttccgtttcctgagttacggcgattcgtcggtgctgatgcgctgacgggggagcagggccgagagagcatgcgcgggccggatccggctgccggccggtcttcggcggtcatcagacggtcattgggcggggtgtccggaaagtccgggttgaagatcacgtgcggagcagcgtttcgcggatgcgccgcagggctttggtgatctgcgcttcgacggtcttgaccgaaatctgcatctggtcggcgatcgcggcgttggaaagcccctcttcgcggcttttgcggaatacttcgcggcagcggtcgggcagctgcgagacggcttcggcgaccagcatcatcatttcgtcggcttcgagctgcaatgcctccgggttggtgaagagcggctccggcccctcgatggaaatgccggcgggccgttcgtcacgaagccggttgagcgcgcggttgcgcacggcgcggaacagataggcccggacggaagtcaggatgtggagttctgcggcatgctgccagatgtgcgtaaaggtgtccaatacgatctcttcggcagaggtgcggtcacggagccagtaggccgcgaacctgcatagcggggcgtaataacggtcgaacaactcccggaaggcggcggtttccccccccctcggctgatgcgttcccacaaaaccatgtcgtgttcgttttccgacctcatcgtatcgctaaaggaaattcagactaataaagataggcattttcggggacaaaacggacgcggaacgtatgaatttttcgtttcggcattctttcgttcctgttatcctgcggcatgcgggacgcccgaaatcgggactgcgttaaaaaaaggggcctgctgaagtgtttcagcaggtccctttgcaggttcggacgtattattcgagcagttcgttgttgccccagacattcagctctgcgatgcaccatccccggaaggtcgggttataggtcttgttcgtatagctggcgtgaatgcgcagccggacgtaacgcgcatgctggtagtcgtcgagcatcggactgatgaccacacccatcggatccagcggcgagtcgggatcggtcctgtagtcgcggtatgtctgggtgtaggtccagttggcgtcgttcgctgcgccgaggccgtcgccggtgatctccttcgcggtccagacctccaagtgggcgatgccgtagcgcgcgccggcttccggtttgccggtagtcatgtagcgctgattgaactggaagccgcgtacggtcacctctttgcccagatcgatgacgaagtcgtagggcggattggcctgctcctcgtcggcgttgcagtagccgaaggtgttgatgtcttcgtcgaacatcttctccacttcgtagttgggtttggccttgggggcagcgagcaccttccagccgctgcggtcgagcagcacgggtgcgggcggtcccggcttgacgaacttgttgaagaggatgtagcggacgccgcccgtcggcgagaccgtcgcccgcgggtcgcccttgatcgaatcgatggcgatcgggagcaggtacggctcctcgtcgggcatgcgctcgctgaacagctcgactttcatcgtcgaggagaccgtgttgtagcggggcagcatgacttcggtggtcgagaatgcgtaggcctccgaggggcagagcttgtacgaggtgccgtgcgccgcgttataggtctcgaccagttcggggtcggtcttgaacacgacggttatgtagctgccgctgatctgttcggcctccgcacggatgctgagggtctgcttcttggggctttccaccgtaatcacctcggcgtcggccgcggcgttctgaatgctcagcagggccggctctccgagggccgccgggttttcatcgtccttgcagcctgccgtggcaaggagcagtgcgacggcggccagaagacgcatgtttgcatatcgtttcataatcgttttcgtttaagggttcgtctctgcgttagaatttgacatcgaccagcacgggaatgtggtccgaggccctcttgatgtcgcctttgttgaagtcgagcatgatcttggtgccgaccacgtcgcacttcgcgccgttgccgttccaaagcaggatatagtcgatacatttgttcggcgcctgcgaggagtgggtgaagtcgctcgcgccgtggggcgtcaggaccgtccagcccgtcttcagtttggagatggtgggcgaatcgggacgggcgttgaagtcgccgccgaggaagacgggcttcttcgagctgccgaattcgcgttcgatgaccttgttgatctcgtccacctgtcccgcctgagccagcgtggatacatggtcgaggtgggtggtggcgaagacgtattttgcgaactccatgacgaccatcacgcggggttcggcgccgtcgcccttcggcagcggagcggcaaaggtccggacgggtttctcacggctggcgattccgtcgccgtaggcgccgccctgataggccatcgcacgcgaatattcgtaactccactccttgcccatcaactcggcgaacttcttgagctggaagacccggccggtgcggaccgtgcagctgtccagctcgctgatgcccaccagatcggccttgccctcggtcatcatgtcggcgatcatctggtagctgccgtcgctgacgtacttggtgaagacgccgacgttgtaggtcaccagacgcgtcgcgccgtcggccttggggtagtagtcccggcccggttcctccggggtttcgggtttcagatggggcggaacttcgtcttcggaggaggagctgctgttgcaggccgttgccgggcaggcgaggccgagcagcaacatcatggtaaggtattttttgagcatgttcatcgtttcgttcgtttttgaagttagtattgggaattaaaagtcgaggccgtcgttccagccggggttctgcgtcagggcgccgccggtcagcgagcggtcgtcggtcggaatcgggtagtagtagtcccgttcctcgttccactcgcccggattcttcttgtggggcgagatgtagccgtggtcgccttccgagaggaagatgtcctgatcgatctccatgatgagcggagctttggtcgagggcgactctcccttggtcttgaggtagatgtcgggcgtgccgtcgccgtcgaggtcgtattcgcccttggaggggatgtagatgcccagcagcggctgcgtgaaggccttgccctctttccagcggatgaggtcgtagtaacggtgcccctcctgaagcagctcgatggtgcgttcgcggcggatttcgagcagtacgcctttgttcggacccgtcacgttgggatagcctgtctcaggggccgaaaggtacgggtcggggttggcgttggcttgggccatgtccagattgggcatgcccacgcggtcgcgcagcttcttgatcgtcaggtcgatgtcgtcctgcgtcagcgtgcccagctcggccttggcttcggcgtagttgaggtagatttcggccgtgcggatgatcggcaggtcggtgtaggagaggttgtaaccgtcggaaccgaagtcggcgggagcgacgaacttgatgggctggtagcccgtcatgcaggtcgaaaggctcggcacttcgatcttggtggagttgatgcgcgtgtaacccggcgtgcggatcgactgcgccagacgaggatcgcggttctggcactcgtcgcggaactccatcgtttgccagcccgccttgtccgtgaagcgcgtgccgtcggccatcagatagctggcgacgatcttgcgcgtcaggcccggacggccgtaggaggtgttgagcgagtagaaggtgctgttgtggaacacgcttagccccttgttgtaatcgcgggcgaggacgacctcaagctgctgcgcgtcttccgacacgaacaggtcgcggtaggcggtctgcgtgccgcccgtggtgtagagtccgtagccgctgttggtgatgaactcttcggacgccttcgccgccagatcgaggtagtatttccagtcgttctcctcggtgtcgatgccgtggtatttgcggaacgtgccttcgaagaggcagaaacgcgatttcagggccagtgccgtccatttcgtgatgcggtaaaggtcgtgcttggtgggcaggtagaggatggcgaaatcgatgtcctcgatcatgcgctgcatgacgtactcgcgcgaatcgcgcggacgcttgagttcgggatcggccgagccgatcggtttcgagtaccacggcacgtcgccgaaccgcttgatcttttcgaagtagaaatagacgcggaagaagcgggccagcgcgtcgtagcggttacggacgtcggtgtccttgcagttgcccgaatattcgagcagcgtgttgatgtcgcgcaggttggtccatgtccagccgccgcccgacgcggggatcgtacggccgccgcgcatctcctgcggcaggtcgttgtggatgatgttgtcccagtactcgttgtagagtccgtcggacgggaacgccgtgtagaatttgttgctgaaagcctgcagctcgttttcgttcgagaagaaggtttcgggcgacatttgggccagcgggtatttgtcgagccactcttcgcaggagacgagtgccatggtgcagcctgcggtcagtatgaataatagttttttcatggttctgcttgtttgattagaatgtgacatctacgccgaacatgtaggttttctgccacgggtaggtgcgcatctcgtcgttcatggcggccatttcggggtcgatatagtccgagcggatgggcgaccatgtggcgaggttctcacccgtgaagtagatgcgcaggttgtcgatcagcaccttgcgggtccatttcttgggcagcgtgtagcctatcgtgaggttcttcaggcggcagtagcggatgtcctgcagatagcggtcgttgacggccgtcagctcgcggttggtgcccgaaatggcgacgtagccgcgcggacgggggaaataggcgtcgggattctcttcgctccagtacatcttgtggaagtccttgggaatccagctcgcatagggacgggcgtagggaccccagaaagcgatggtattggccttgggataccactggcggcgtccgacgccctgaaagaagatcgaaaagtcgatgccggcccacgacatgctcagcgtcgtgccgtagtggaaccggggctggctgttgccgatgatctcccggtcgcccggatcgtctacggtgttcttgccgatggagatgatgttgtcgccgtccagatcgaggaacttcaggtcgccggcgtgcaggccgcgttccgaaccggccgcagcgttgatccggttgttgacggcggtctggtctacggcgtagccggcggcctcggcgtccgaagcgaacagtccgccggtgcggtagccccagatttcaccccagcgcatgccctcgtagtaggacttggcgaaggtgcggtcggggttgtcgtatttggtgatgtcggtcacgtagtcgttgaaggtgaccgtcacgctgtaggtgaacggccggcgcaggagctggaactcgtcgcgccagctgagcgaaagctcgtaacccttggtgcgcaggtcggcgctgttcatcttggggggatcggcgccgtagacgcccggcagcgcgacgccggcggtcagcatgtccttcgtgtcgcggatgtagaagtcggcgctgaaggccagccggttgttcaggaagctcatgtccacgcccagattgttgtggatcgaggtttcccacgagaggttcgaggccacgggggccgaaatggtggccgtcgtgggtttgtcgccgccgaacagatagctctggttgccgatcgagattttgcggatgtagtcgtagtagcctacgttctggttgcccagctggccgtacgaataccggatcttgaggttgttgaagttgtcgcggataccctcgaagaacggctcttccgagatgcgccatccgagcgagaacgaggggaagaaaccccagcggtggccgcgcttgaagcgcgacgtgccgtcgtagcggccgctgacttcaacgaggtatttgcctttgtagtcgtagttcagacggccgaagaaacccatcagggcgtattcgttctggccgccgccgacctccatgcgttcgttgccgtcggcgccctgtcccaccagattgaggtccatcagcgtttcggagagcaggttgtagcccgtggccgacacgtccttgagatacttggtctcccagttgaatccggccatcgccttgaagttgtgcttctcgttccacgtgtgtgcgtaggtggcgtagacgttggcctgatagtagttgtgcatcatggtcttttcgtagagcttgtcttggaagcggctgcccgtcgagagggtttgcacttcgcccggatactgcgagtattcggtgttgacctgacggttgaggttgtgctgggtattgaacatgtaggtgaagttacccttgatctccagccctttgaccggggtccacgtcagctccgtggtggtcgacatgttgtcggtcttgtccttgttgtagtggccgcccttgttcatgatcgtgggcaggccgtccatgatcgagtatttcgacagcgaggtgtagtagacgctcgtgccgtcggggttgtagggcatcatcgaagccagtccgtgtaccgtgcccagcgagaaggcggtattgactccgctggggccggggtagtagtactggtagttgtagtagctggtgttgttgctgatcttgagccacttgttgatgtcgaacgagattttcgaacggaagttgatccgctgcagacggtcggggtcctgacggaagagtccctcttcgctgtagtagttgcccgaaagcatgtacttgaccttcgagttgccgcccgacagcgagacgctgtggctcgtgttggggtgttcatccttgaacaggtagtggtaccagtcgaagttggcgtagtaaacatatgtgtcgcggccgtcgcgctggtcgatcttcacccacggacgttcggggttttcgaccttgtcgttgcggcgggcccacagttccatcatgtcctgttcggtgtagttggtgtagttggtgcctgcgtcggcgtgccagaacaggtcgttgacgtagaccgagtagtagccgcgggtctcgtagtcggtcgaggtggtgggggcgttccagccccagcggccgctgtacgatacgcgggtttttcccgaatcgtcgccctccttggtggtcaccagcacgacgccgtaggccgcgcgtgcgccgtagatggcggctgccgaggcatccttgatcaccgaaatcgaggccacgtcgttggggttgagcttcatcaggtcgccctcggcgccgtcgatcagcacgagcggcgaaccgccgttgatcgaggtgatgccgcggatgttcaggtcggccgagttgcccggacggcccgatgtggtcgagatcgtcagacccggaaccgcaccctgaagcatgtgggctacggagggcgccgagcggcttgcgagctgcgtgtcgtccaccgtggcgatggctcccgtcaggttgaccttcttctgggtgccgtaacctacgactacgacgtcctccatcttcacggcgtcctcggcgaggaagaccttgaggttgttctgcgaggcggggacggagactttcttggagatgtagcccaaataggtgaagctgagcaccgcatcggcgttgggaacggtgatggtgaaactaccgttgttctcggacacggtgccgcgcgtattgtcgccctccagcgtaacggcgacgccggccaagggaagctcgtgggagtcgttgaccgtgccggtgatcgtgcgcgatccggccggggccttgcgcgccgcggggatcagggcgatctggcgttcggagatcgtgaaattgagacccgtcggggcgagcatctggcgcagggcggcggagatcggcagctgtttggcgcggaggctgacgcgccgggtcaggtcggtctgcttggcgtcgtagaagaatgtgtatttgctgctcttctcgatgcgcgaaatggcttccgagagcggtatgtcggtgaactcaaggttgatcgccggctcctgcgtctggccgtgtgcaaccgttgtccatccgcagacgagcagcaaaagaattgcgaatagtctaaaatgtttcatggttgaagttttaagttagcgtgtgtttgcggcggctgccgcgggaaggatagcgtgcggttcaggtctgttcggtcataggcattcggggtttggttggtatttggtaggtttacggttttattctatctcggagatggataccgagcggttgtccgagaaggtgtagacgatcggattgatgcggctcatgatgcgcagaatcgcttcgagcggttcgtcggtgagggtgaacgtgtaggcgtaattgtgggcgagtgccggggagatgtcgatccggatgtcgtaccagcgtgagaggtagcggcagatttcgcccagcgactgccgctcgaagaccagtttgcccgcggcccagcaggattccagctcgacgttgcccctgcggatattcagctcttgggtggcggggtcgtagcaggctatttctccggggtgcagccggcgcgtctccccgttgccggaatcgagggccaccgaaccctcaacgagcgatacggcgacggtccggtcttcgtgcgaggtgttcacgttgaatttcgtgccgtgaacccgtatgcgcagcccttccacttcgaccgtgaaggggcgttcgggatctttggcgatgtcgaaaaatccctctccgcggagttttacgttgcggctttcggcgccgaaggagctgtcgtaggcgagcgtcgagccgctctggagccatacggtcgaaccgtcggtcagatgtgccagcgacttgccgccgaaggcgcagaactcctgtctggccggaaccggtgtgcgggagaggtcgggacggaccgcgaagagcgtgacgacgacgcccgcggcgacggctgccgccgtgcgcagtatcggcatccagcggcgtttcggcgcgggccgttccgcccgctgcggcgttccgcagacttcgatgcgggactgcaactgctcccagagccggtcgcggtcgggattgtaggccgaggtgcggcgctgtacgtcgtcccatatgcggagggcgttttcgtagatgcggcggttgtccgcatccgagacccaccggtcgaattcgcggcgcgatgcggtgtccagcgtgcccttcagcgcacggatcaggaggtcccggtaatgtttgtccatgacggtattcggtttttacccgaagacacgaaaaaggcggccgacccttacggccgaccgcctttttttcgatttttttagcggaatgtctccggatattcctccgcggacgcttcgtatatgccgggaacggcgatgcggagaggctgtttccgcaggattccgggccggttatccgacgaccgcggcgaacagatccagatgcccgtccacgtagcgggcgagcgtctccgtgacctcggcttccatttcgccgtactcctcctccagctcgtcgaaggcttcgtactgctcgtacatcgccatgaactcctcgtcggtgcgctcccgttccaaatcctcccggttggcgtcgtagatcttcttggcgcggtagaccagcttcgagaaactctccgcaccccacaggcgcatgactctggcaaacggattgccgaagatataggccccgtagccgttctggataagctggcagaaaccgccttcggtcacctcgtcccggaaaatccggtaggcgagcagcgagtgctgttcgccgctgagcagcggcatcgtttcggccgtcgggtctccgccgaccgtctccttgtatttgtccgtaaagacccggaggaattcgtccatccctttggcggctgccgtttgcagggccttgtctgtaatttcgatcacggtttccgtcgtttgattgtgaatatggggttgtttagccgggttactgctgcgcttcgggcgcgtaggtgcgcagggccagtttcttgacccacaccacgaagccgcccgtgaggatcaggttcagcaccagcgtcagcaccgagatgatgagcgccgggccgcccagactgtagcccagtgcgatgaagattacgcccgcgcccacctcgccgcgggtgaacatgccgatcgagagggcgaggcgttcgctgatcttgcggtcgcggtagaagaagagcggcaccagtttgccgaggttcgaaagcagcgacacggccagcacatgcagggccagcgtgccccacggcatcatgggctgcgagccggtgaccgacgttgcggcggccgtgtcgcccggcgctcccgttacgagcggcatgctcagccccacgagcagcatgaagaggaacgagatgccggtggtgatgcgccgttcggcggcggtgtcgatctccttgtgtttcatcagcatgccgacgacgaacgccgggagcaggacttcgatgtggatgctgttttccgggccgtaaagccgggccgtgacgatgtggacgagctgggtcaaggcgcagaccacgacagccagccccaagatggttttccagtcctgacgtacgttccacgtcgcctgccagcgccagccgacggccagcagaagggtgacgacggcgatgatggcgaacatctgccaccgcagaccgatcatcaggatttgcagggggatcatcagcaggatggtgtccagatcgtcgaagatggccagcacctgtatctttttgtaaatccagcttttcttgagactgagggccgcgagcatcgtgaagaggatgccggccgaggtcggcgcggcgaaacggctcagcagcaggttctccttccacgcctcgccgctggtccagagttcgggcggaagcagtacgaagacgtagtagaggacgatgagtatccacggcagcgcggccgtggccatggcgatgaagtagtccgcagtgtaggagcgccagcgggttttgtcgatttcgaattcgcggccgacgttgatcatgatgaatccgaggcagacgtaaagcagcgtgtcggaacacttcttgaacgccgcgtatcctgcgccgagcgtgcccggaagcaattgcgagacgatgagtcccagcatcaggaaaagggagaacgagagaacttttcgcattaactgatagttgtttacaagtgagaggagtgcattcgccggcaaagataatatattctggtttattcccgataccgcacccgcctttcgtgaaaaaaataacaataatgaaaccgcaattcacaattattttatacctttgcggtcgaaaacggcatatcagtatttaaaaccataaattaaacatttacaactatgcagattgtagagattcacgcaagagagatcctcgactcgcgaggcaatccgaccatcgaggtcgaagtacgtaccgtatccggcgcattcggccgcgcagccgttccgagcggcgcatcgacgggcgagaacgaggcgctcgaacttcgtgacggcgacaagagccgttatctgggcaagggcgttcagaacgccgtcaagaacgtaaacgaggtgatcgctcccgccgttatcggcatgaacgtagccgatcaggtcggcatcgacaaggccatgatcgccctcgacggcacgaagaccaagtcgaagctgggtgcaaacgccatcctcggcgtgtcgctggccgtggcccgcgctgccgccgactacttcggcatgccgctctatcgctatatcggcggtgcaaacgccaagacgctgcccgttccgatgatgaacatcatcaacggcggttcgcactcggacgctccgatcgcattccaagagttcatgatccgtcccgtgggcgctcccaccttcaaggaggctatccgcatgggcgccgaggtgttccacaacctgaagaaagtgcttcacaaccgcaacctctcgacggctgtcggcgacgagggcggcttcgctcccgcgctgaacggcaccgaggacgctatcgagtcgatcatcgaggccatcaagatggcgggttacaagcccggccgcaaggaagagggcggcgacgtgtcgatcggcatggactgcgcttcgtcggagttctacaaggacggcgtttacgactacaccaagttcgaaggcgagaagggtgccaagcgttcgtcgaaggagcaggttgagtacctgaagggactggttgccaaataccccatcgactcgatcgaggacggtatgtcggagaacgactgggacggttggcagctgctcaccgaggagatcggcggcaagtgccagctcgtgggcgacgacctgttcgtgaccaacgtggacttcctgaagaagggtatcgaaatgggctgcgccaactcgatcctgatcaaggtgaaccagatcggtacgctgaccgagacgctcgacgccatcgagatggctcaccgtgcgggctacacttcggttacgtcgcaccgttcgggcgagaccgaggattcgacgatcgccgacatcgccgtggctaccaactccggtcagatcaagaccggttcggcgtcgcgttcggaccgtatggccaagtacaaccagctgctccgcatcgaggaggaactcggcgacgaggctatctacggctacacgaagatctaccgcaagtaattccgatttcgaagggcctgacagccctgtcacgtcaggttccgggcgaagcccgaaccggattataaacgaaaggaccggacatattgtccggtctttttttgtgcggcgcgtgcggtcgctcaggcgacgaccgcggtcaggcgagtatcggcttcggaatgaagcccggatcggcatgaaattttcggcatgtacgccggggagtagtgcgcggaaagtccgattaaaataaaaaatactaaatattgtataaatattttgataaaaacgattaatttttctatatttgggataggaaatacagcacggctgtttattctggcaaaataatccccaatcgaatgtgactgatgaacagtcaggacgtgatatgcgcggttcctgaccagttacatatttgaataatggggattattctactattgccggagtcaggttccgcgcattttttgaagaccgacctgtttcagaagatgcgccggcacgaagcaattaataccggggtgaaaccctgcggcagtttcacccgaccggttgcctgcgtctacctgcatgcagtggaaagaatcctcgctgatgcgagggcagtgacgcaacttactgcgggagggaggggcctgataagaggtccctccccattttttgccgtccgtccggtgcggcagctccggcggctgttggagctggccgcagagcggatcgcgattccggagcaagcgggcggttacggcacggtttcggccgcttcttcgtcggcattgccgaggctgaactccttgtcggcgaaaagctcggcaaggcccgtgatctgtttcaggcgaagcagttcgtcgcggtccatgccgatatggcgcatgatccactggtcggacatccgcgcgcgggtcagctcggcgacgatctcgctcatcagttcgacgttgtgcgtgcctcgcgcccggttgtgacggatggtcgaggccatgcggttcgaaaggtccttttcgataacggcgacgggcagcaggcccccttcgcgttcgtagatgcgcttcgaggttttgagcaccagatagcggtggtagccgtccaccagctcgtaaaggtccttttcggcgtcgtaatagcagacgcacggcatcgtatagccgtcctcccagatagacagttccagcagcttcatttcgggcggtgccacgacgttggggttgtagctgttcgccacgaccttctcaaccggtacggcgcggacgttatagacagggcttcggtagctcttttcggtcggatgttcgtaatagcgattcatatttttccatgattttcctgcggcgcagcgtttcgctcttgttgggcgaaaaacccatgtatttgcaggcgtggtcgtttttcagaatacagatgcagatgcgtttgaacgtgggcagctgaccgaattccggaaggtcgatgtcgtcgagatactccatgcgcaccggacgcttgtcggtgcggtagccgcttttgtcgccgacttcgatgcggatgccggccctatgcagtttggcgatggtttcctcggagagacatccgcccttttcgcgccagaagcggatgcttacggatagtttttccagatagttgcgccgcgtcggctccggaagtgtcgagagcaggaagtgcatgtagcgctcccacgtcattcctttcggcaggcgcgccgactgccagccgactgccgccgtcctgccgtacagcgccgcgaaattggccccgtcgacccggccgaccatgcgtccccacgtatccggatcgacggccttgtagaggtgcaggctggcgatggccggcgagatgaacggactggccacgcgctgactgtcgagcggtacgccggcccggtagaagaggtcgtacagccggttgtagggccagccgaaacgaccgttcgccgtccagatgtcggtcgtcagccagtcgtagagcggataggcgttgcagatgccgccgccgacccactggcgtatccaccgttttccggcgaaccgatggtggttgcggtcgctgtaaatcgtgcgccagcggttgaagctctcctgcgtgcggatgccgatcagacagcacgtgcgcgtcgcaccgctgcgtgcgtggagccattcggcgaagcggttctggaactcgtaatcccacatttcgtcggtgaagaacgggaaatcctgatgcgtaaggcatccctcaggcatctcccgtacccaaacgtcccgcttcgactcctcccacggccgccagtactgccggaacatcgaggtgcaggtctggaccttgaacggcacgcagacccggtagacgtcgaggatgtcggcgttcgcggccagcgtgcggtccacgtagtcgagcgtatcgcggtactggatttcgtaatccatgtggaacaccccgattctccgccgcagtccgtgccgccggacgtagtcgatgcagaggttgagcagcacgccgctgtccttgccgccggaaaaggagacgtagatgttgtcgaagaggtcgaagacggttttcagccgctgctgcgtacgttcgtagacgttcatggctgccgctttttcccgtactgcatcgtaacgtactgcgtccactccttcgtggggacgaatccctcggtgcggaacacttcggcgtggcggagcagcgtcatggaacgtatcgtataatcgcggtggtagtattggatgatttcacgcaggaagcgcgacagcagccgcgggtcgtcgcccgaaacgtaatagttgttgatcttggccactccgccgtcggtgatctcaacgggaacgaatccgaagacggtctcgccttcccacgcgacgaaccacgtgtgcgcacgcgaggtccagaacgggtagttgttgttctgacgcaacacgctgcgccgcatgaccagcggggcgacgagtgtgtaaaggcggggcgaagtgccgtccagtttctcgattgtcatatccgaaaggtttaaaacgaccgaatgttatatatctgggaccgaatgtattgaaaacgcattcgatccttacaaatataaaaaatatcggttgttttctcaaattttcagttcggggcgatggcattgccggggctgttgtccggggcttggtgctgaacgcgagactgcatgccagcatgcaaaaagagaggaggccgataacagcctcccctccggcaatgagtcgcgtcactctgtcaatatacggattccgccagcgcttcgacgagcagtttgaggagctgctcggccgtcagggggtggaacgttttcctgaatatgcggtccatcttcgtccggagcagttcgaagaaacggttggcttcgtgaggcggcattttcttgaccgtcatcaccatcagccacagcggaacttcgatatagggcggctggatatagagttcgagcagttcgtcggagtgatgcctgtaatccagataactgttttcacagactccgtataggggtagaattattaactcgtagacgatgcggtgcgttctgcgcatatcgccttcttcataaaaccatacgtcgatctttttggcgccgactatccggtacggattataattatccctgctcatttcatgaaaggccctttatttccgaataaatgctgttggccatgtaatcgcgtaattcgccgcgggtcgagagccggcagaaccggtattgcgccggcaaacgccggcctttcgagaagtgcttctggtccgccgaacacgattccagacagattgaaccccggtcgtgtctgtcataaaggccccataaggattccgtatccgggcatcggggattgtcggtatggaaaagatatacctccccgactttgaaagtacattgtttcacagtcattcgtttagtctgttttatagtttgtgcggcaaagatggatgaaacgtcgggtccttgcaagaatatgtggaaccattccaattttttattttaacggaatcgtctcaatgccccttcccggtcggagtgtccctcgttacgagcgacaccagccacaggagcacgattgcaccggcaatcgacgtcagcaggcttccgaaagaccccatcggaatccatccgatcagcgagacgagccatccgcccagaattccgccgacaagcccgacggccagattgaccaccagacccgatccgcgtccgcggactattttgcttgcgacccagccggcgagcaggccgattatcaaataccccaaaaacatagtctgactgaattcgtattctgtcacgacatgcaaatcgtgtacccgtttcaccctccgtctgcggaaagcgtttcttgggcaggccgtttggcgaaaagcggagcggcaagccgttttggacgtttttttgcatattcccgtctgtccgcagccgtccggacggatggattgcgccgcgaaaaccggcattcccgcatccgggatgacagaccgcacgaagttcttccggaccggaatcgccgtctcggacgatgctgcgaatgaaaaatggattgagatatggataaacggaatattcaacaccctgccgataaataccataacggggagttcccgatgcagaagcaggatgcaccgggccttcaatcccggatggaccccgttcccgactgcggtgagacgagttacacggggcatgagcggctgaaaggccgcagagcgctcatcacgggcggcgattcgggcatcggccgggccgtcgccgtcgctttcgcacgcgaaggcgccgaggtggcgatcaactacctcgacgaagagcagccggacgccgattcgctcgcaggccttctgaaagcggaaggcttggaactgacgatgcttccgggcgatctgcgggatgtcgaaacgtgccgacgaatcgtcaaggaagcatataaacggctgggcggactggacattctcgtgctcaatgcgggcgtgcagcaggcagcggccgacatcgccgagattaccccggaacgggtgcgccgcacgttcgaagtgaacgtctatgcaccgctcttcatggcgcaggccgccgtgccgctcctgcctccgggcgcgtcggtcatcatcaccgcctcggccgaatattacacgcccaacaagctgctgctggattacgcggcgtcgaagtcggccgtgacggctttcggtgtggcgttgtcgaagtatctgctcgacaagggcgtccgcgtgaacagcgtgtgtccggggccgacatggacgccgctcgaagtttcgggcggcaatcccgacgaggacattccccggcacggtgcggatacgccgctcgaacgcgccgcacaacccgccgagatggccggcatctacgtgttcctcgcatcgtccgaggcaagctatatcacgggcgagatatacggcatcacgggcgggctgagcgggaaatagcccgataatcaggtaacaacaatataagtgaaatcatgaaaaaacaagacttgcagaatccggtggacgcctatttcaccggggaatttccgaaacagcggcagcccgcaccgggcgtcgaacagcaaatgacaccccgtcccgatacgggcgaagagagctaccgcggtctgggccgcctgaaagggcgcagggcgctcgtcacgggcggcgattcgggcatcggccgggccgtcgccgtcgccttttcgcgcgaaggggccgacgtggcgatcaattacctcgcctcggagcagccggacgccgagacgctgcgcgacgacatcgaagcgcacgaggggcgcatcgtcctgcttccgggcgacctgagccgggaggcgacctgccgcgaggtggtgcgcgagaccgtccggcagctcggaggagtggacattctcgtgctcaacgccggcacgcagaccgccctccacggaatcgaggagctttccaccgaacagctggtccgcacgttcgagacgaacgtcttcgcgatgtactggatggcgcaggaggccctgccgcatcttgcggagggcgcgtcgatcatcaccacctcctccatcgaggcattctcgcccaatgcgcacctgctggactacgccgcgaccaaaagcgccatcgtgggcttcaccaaagcgctcgctaaacagctcgccccgaaaggcatccgcgtgaacagcgtcgcgcccggccccgtgtggacggcgcttcagatttcgggcgggcagttccccgaaaagattcccgaattcggaaagagcacgccgctcggacgcgccggacagcccgtcgaggtggctccggtctacgtcttccttgcgtccgacgaggcgagcttcatcacggggcagaccatcggagtgacgggcggcaagtagaggcatcatgaaactccacggggacagactgaaagccctgcacggctgcgaagcgcaggaaagccccggcatgcaaaactgaaaatgccggggcttgaatcttgcgggaagcggtgaatttttatggaatccgaacctttgcaacgcatgaggatgcgtcgttacatcgaaaacgcataggtcacggtttttccgatcggccacgtttgtccctgaataccgaaactgtgcggtgccgtctggtcgaggttttccccatcgagccaaacgtgaatataaaggtctgcctgaatcgtatgcggaaacatcatcagggtttggtccccttccgtaatttgctgtccggaaaccaacggtatatcgaggtcgaacgtataggtgtttcgggtcgctgacgtacctcgcgggatttcccatatcaaatccccttccgcatcgagctgcatggtgcagtctccggtagtgggaatgtcagccagctgaaccctgcgaatgcgcctgccgctgttctgctccgccaccgacttgaccctgaactgaatggccgtcagcgcatggcggaaagtcagcggcattccttttcccggatagaccagtacgtcgtagtcctcgctgcgtacggcatcgggcgttgctatcagcaggtctatctggtctgtcacgttagcgggaacccggtagcgaattttcggaatacctccgtcattggccgtcgacaggagtcttgaacccgacggaagactgtagggcgcatatgcgaagaaccgaacccactctttgttttttggccagaaatagcggcggccgtcaggcacccaccgattgcttacggcattccggctcacccggatattgtacatcaggttcggcttgcattgttcgttccagtcacccgaataggcgtatgccgaaactccgaaggagtcgtaaaaatccgcttcgtcctcgatctgcacactgcgcgttgcggcctgcggacgtccgggaattccgtccgtgacgatcgtttcgagaaacatcgggcgctccgcacctgcgtcctcctcccttatcgcacccgacgggcgttcccgcacccggccgtcggaacccaacgcggcggcttgcggcacagcggcggcgggtttcgaccagccgtccacgacctcgaaacaaaccggatcggttcccgtcagcaaggcttcgccctcctctttcgtacacgacaacaagcataatcctgcggcaaggagcagtgcaggacgaaatattgcgaataaagtcgatttcataccgttcgtaaatttatttcggcgaagtcccttccggggacctccttgcaaccgggaggggagattcaaccccgcccggtcataaatgaccgcctcctccgttccgtccgccggaagcggacggagggagaaggggtttataaactataactggatatccttgtcggcaggatcggtcggaatccaatcgtccacggtcacggtgaaccagatataattgcctaaaatatcatcgccgccttctttccattcttcgggatcgtacttgccgacgccgttatccgtgaaatggagcgtgtaggtatagtggatgccgggtttccagacggcgttggagaagagtccgatggcgccccagccgaaatcaccgtctgtcactgtgctgttgtctttcttggtagctcccggttcaggaaatatctgcgtccagccttcaaattcgttgtctgcgtttaacttcttgcgcagaacacgcatctcgaaagcaaggtaggcgccctgagtactggtagtttccggccaaacataattgacattctcataataatagttgtttttaacaaaatcctgcggaatcagcaaccactggtcgccctccagcagatccttggcttctgcagtcgttccgtctaattcgaccatctcgccaagtgtataatcataacgttgcagatttacgttgtgagcagctccgtcaccataagtcaaactgcctgcagggttcggggcattgatcgtccaattctcaagcggaatcaggttctgctccggattcgatgtcgagcctgtaatgttttcgtccgtcgtataatctgcattatcgtcggcgcggaacttgaacgtacccgtcgaaggaatgttacgcagggcgacgcttctgatttcgaccttcagatcctcaccgctcttcttggccttgagggaaatctgcgacaggatgtggcggaaattcaacgcaactgccgattccttgacgcctgcatctttggggtccttgatcgttctggcgataatgatgtccgtttggttcgctatctcttttgccggaacgtatttgttgatcatatgcggggcttcgacgccgttattatgccatttgggctgcgatacatattctccggtttcgaatttcgtcacaccgtcgctcttgtaggcttccgccgagccgtgtcccggagccagtttggccggataccatgcggcgaacgtcagctcatagctcggccacgaataatttttgtccaagaaaaatcccttgcgtgtttcgttatcgccgatttgcttctccgcgtatttggccaactgacggttgaagtagaatgcaccgtcgccgtatgccacgacatagaagccgtttgcgtccttttccatcgtttccttgttggtaatggtaccgcgcgtcgccttgggcacggacggcgaaaaagagatgtgactcaaaccttcggggttggagttggtgctgatcgtttcgttcttcgagcaagccgtaaaggctgctgcgacagcaacggataaaagtacttttttcaacatagctaagagtatttaggattgttacatcggaatttcgatttcgacgcttccccagtcatccaccgagggattcataccgccgccgggagcgtcgtccgtaaaccgcagcccgtcgaggacgatatgcacgcggtgcggatcggctgccccgtgtatctgcggcgtcaccacatcctcggcatcgccatagacctgatactgctgcgcaccgcgcgtcatgatgccgtagacgacgatcttgtgaggtacggccggttcagggcagtggccgaaagtgtggaaatgcgcctccacggtagtcgcatcggccttgcggaattcgaacggaagaatgcagggggcatcgcggagcgcatcggcgacaaggcagtaggctccggccatacccgaaagggttccgctgatctgcaccaccttgtccatgttttccacgttgcggatttcgaccgtataggtgcagaccctttcggtgggcgtcagcgtgacggtcgtcgtctcgttgcgccgcagcgtcagctccccgcagcagtcgccgtagagatattcgggggtgcgcacgacctgctgcgtctcggtgccgtcggcacgcggtacattgctcgaagagcggttcaacggagcgagcaggctctcctgaggcgtatagaattcgaacgtgtcgtattgttccgtattgcgggcatgggtcgattccatatccccgttatggcagataatccggtaattgcccggagacaactgcaccgtaccgccgtcgcgtcccgtaaattcgtactgtaccgggcgcccgccctcttcggggaagaaccggacatacatacattcgggattcgctccgggcagctgcgaccagtcgaaaagtacatgcacgaaacccacgtgcggatgctcgtagcagagttccttgtgttcgcacgccgtcatcgccagcagggcgagcagcgtccagaagcgcatgatccgtttcatcgcgcacctcctttctgcccgttgcggccgcgccacggcagccatacgagcgaaatttccgctttcgtcggcccgaaccagcggagccggtgcgtggactgccagacataacagtcgtcaatatgtctgtatttcttatatttgccgccgaaatatcccaccccgatcgtgaaatcgagattcagccggcggccgacaggatgcgaatagccgtaggagatacccgcgccccagctccatcggtcggcgagggaaccgttccggctgacggcgaagtcataggtagtcatctggccgtagagtccgacgtggtggcccgtcaaagggttctcgtgcgccgcacgaccaacccacctgcgaatctccacgtcgcccccgtaggtgcgccagaagaaatttccgcggggtttgttccaccacgaatacatccagccggcgcctacggaccagttgcggccgaggtagaactctgcacctatattaggtacgagggcggcatcatacagaagatttgttttcaggccccaaaaatgtgggggggggaatttttaggtgcggaagagacgctgacggccgccggcagctccgttgccgatgcgaccgaatccgctaaaagacttgttgccggggcatcttcgaccggcatttcgacgggtgtcgcaggctgaacggaggcaaataccgaatctgcttcggggaggcgttcgattacgctgacgacagagacgcccgaattgcgcaattcggggaagagatgttcgtacatataccaatagggacgcccgccgtgcagcatgcccaagcggcgcatgcgcccgtccacgacctgtccgttgcgaacgatccattcgggggtattgcgcaaaagagccagcacctcgtcgcggtggcgcatgtcggaaacctctaccagttcgatcagcccctgccagtcgatgccgagcgatctctcctgcaccaaactgtcaggcaacgcaaggtgcgagcggagatagcccgcaacgttggatacgcgttttgcggaaaggcggcggttggctgctgcggtgccttcgggcgagcacccggcggcgacatgaatcgttttcaagcgccgtgtcggatcttcctgaatcgttttcagcgcggatacgaaagcctgcatgcgctcgccgttcgcccggtaatcggattcaggcgcagcatacccctgacgaaaatagacccggagtgcgagcgtgtcggaaacaggctgtttgtgggcgtatgacatgcccggcaacagcagccctgccaaagaagtgacgaataatatcaaattaagtctcattgtcagcgagagtatcaaacaaatctcaatgtcagtaagtcttattcggtcgttccgaacccatcgagcgtacgcggtctcgacgggtagagttatgaattcatatcgcaaaaataaatatattttttcaaatttcccccccccatcatttttttgcaacaaaatcgataataagagcactgcaatgtaaaatagagatgccccccccctcgatcgctggcgacgatgctgttgatttgcaggtttacctgtaatagcgtattatgcgtaattcgcgaccaattttattccggtcaaaagttggtcacgagttggatcgtaaaaacctgcttcagaataggttttacgcgattgttctgaaaacgaaaaaaaccttatatatcattgatatataaggtttttactctattctgcagtttgttgcgactgctttcaagggtggaagatggggctcgaacccttattccttatttgttgtatatcaatctcttataatgcaagttcgcttttgaggtcactattttgtagtgaatgtttaacgcctcaatgcatacctatactacatagacaaagatacgataaatttttcatatttccaaatatcatctttatcatgcccgataagacctttctgaaaatcaagatgtgatgttaaaatgttgatatgtagctatttgggtgtttggattgcccgtgcctttgtggcatctttgcgtcagaatcatttgtgatagttactgctatggaccgcatggaagaaattctggaaatcgtgcgagaaatccgcgaggatgtctcctttatgaaacgccaccgtaatatgctttgcgggatgcctattctggaagtcgacgaagtatgcgaccttttgaagatgagcgatcgtcaactgcgccgttatcgcacttcgggtcagctcgtcggtttccatttcggtcgtcgtctgatgttttcgacggctgaaatcaaccgcttcatagagcgtgttgaactggaacataagcagaaaaagtctttgagaaaagctatccataatctttaacccataatactatgtctgaaacaacagaaagatcttattatctggtggagcccatgtatttcgagaaactgctccgcacgcatttcatgctgacacaatctacgctgctcttcgaacacctgttgagccacagtgaccgtccgatgttcctctcggcccgcaaggtctgcgaggtgctgggtatggatcgtcaccagctcgaacaatgccgtaaaaagcggatgatccgcgcccgtgccgtcaacggacagatgctctacgatgcctacgagctgatcgcgcttacggaacacttctaccgccggaagttgcggaagaccctctcccggataccacagttcacagtgcgctgaccgaaagggattgactgcattcgcagcagtccctttttgttttgaggcagcacgagtaataattagaattcctttgtgatcgccgtctccggggcaagatagcgtcaggggcttacgctcttttcggctttttcgcacgatctccaccctgcgggtcgtatcgcgcgaaaaagtccgactgcgggctgcccctgacgctgaattttctgccccgaagccggcttctcactttcatagtgggtattcgccggccgtatgtcaaaccaaaattcatttcgaagatgaagaatcagaagttcgaaattgcggtagcaggttacgactaccgcttcaagacctacgcccgggacggtgtggaagcatcggtaaaggtgaaatgttttctcggacaacccgatgccgagtgtacgatccttattccgacgttgaatgactacctgcgggaaacggaatcctgccgcaggcaggttgctcagcgatgagaaagtggatcgatcagtcgacctttgacgaactgctgctcgccaatgccgaggataacgtagagcggactattcaaagcgcatcggccgtattggaaatagtgcaggagttcgttccggaggcagccttgttctaccgtgtcacacacgccgcagacagcctgaagaactatttcgaggaagcatgtactggtttcctaaggaacggcatcctgtttcttgtccgcaaatacacctatccgaaaatctattacgagctccgttgtgattggtcgtctttccgatatgcggacaactactcctacggcaaggctttcgacaagcaatccgaaccgaatcgtatcggggtcttcaccaaaaagaagatcgacgattgggtggaatacctcacgcagggtttccgaaacctcgaacgtatcgatgcggagaacgaacgaaaaatgacggggtatcgcaatcggttggaggcaatacccgatgtcgtctggaacaaagacaaaagccgcggccatatcacacggcatggtttgacctatactttcgaaataagacagacggattacagcgaaaagatctctttggattatcgctgccgcacgctcgatgatttccttgcactctccgacaacaaactcatacttgtatagcttgaaatgaaaatgacgtatggaccgaaacattattatcgaaaatatctgcgccacgtgccactgcggcgaacgacgcgccgaggaatatctggccgcggagcttcgtaacctgcgtgagttgcgagatgccggggctctgtgctacggcgaccttgaaacggcctgttcgggactgggattggacttcgattatacggactatttctgccgggccttgtcactgaactaactccgatttacgatgaacaatctttgttttaaccgtttcacactgtggacggacgatgtgaaaagccgccgcaaaatccttcgctggctggcgctcaattaccgcttgtacgattacctcccctctgacgcagaggttcgcggacggttcatctcgtgcaaaccctttcccgccgaggcgttccggcgtcagatcgggaaattgcacaacgatggaacgctgttcctgcggattgtctctgcggacttatatacgctctacgtggaaggtaacgtctatctgcgcggagcgtggcaccgaatctttctttaatcacctgccgcctgctccgaaacgagcgggcggcattatttcaatagcatggcatacgaatcatccatccctttcgcggatatccgggatttccgcgccgccgagatcaacggtatcccggctcttttcaccatgtctcgtctcgattccgagaccctttccgcaaattttcactcgtgcgaggtcatgggcggtaggggcagcgattttcagtggctcgttccgttggctcttgtaaacttcaccggaacgttcgtctcccggcagcccttgctccgggaaggacaggcatatgccgaaatacgccggtacggcctctacgatgcgacggctttcgacgaatggtctgaaaacaataactcttaaatactatgcaacgaaaattcaaactgaaggtcagttataccttccacgggtactttaccctcgtgcggctttcaggcccgtacccgataatcattaaaaacgctttcgaatgaatatgcaggaatccgatttccggcgtgcgctggaaatcatcacccggaacaaccggatcacggtgtcgttcaacacaccgatcgccgacaactactcccaagtctatccgcttcttatccatgagagcaacgcttcggtactgaaacagctccatgaggcgggcttctcgatgagcatgacgaaaaaaggactggaagtatcgaagtattaacctcaaataatcacgcaatgaaacgctatgaattttatcggaatcaaaaaattactgtcatagattgccggtatttcagtattgaagccgagaatctcgaaacggctgtccggaaaatcaaggacctgtgtgcagacggtcaactcgacaaactgtcaaacgatccgacctatcaggaagatgctgcttatcagattcccggaacggaatatccactgtacatagaaaacaataacggagatcctacggttatgatttactcagccgcagacggaacccgtatcacggacaaccttccgatatcgaccggaataactcaaaccaagaacattataatcaactaaaacatgaatttaaacgaatattaccgtaaccataaggacgcgatcaacgcatcgattatggaaattgcctgtgatctggccgtcggacgactgctgagtacgcacgatacacctttcgaaacatttgtcgaagccgatgaccccgacgatcctgacagcggaacccattacaaggaggagtttcagaaagaatacgacacgtattacgacgaggagtacgcccgtgtcgcaaagctgatgcgcttcgaccattgccaagacgatggagttgcagcttcgtccgaagatacgaatgtttaaactatatacttatgattgatattcctttatccctgcgcgttctgccgcagggacgctataaccgcggtatctacacctgttatgaatgtggcttcgaaccgccgcactacaacgtagtgccctgtatgctgggtcttgccgagacctctgccggcacgatggtcgtctgggaatgtccccggtgcgggcaaaaatggatgttccactaccgggcgcagaatgcccgtgaagcccacgattatgccgcccagctcctcgcttaccgccgcggcgatcccgattggcgtatgaagctgaatcccgactggattgcggcgcagcgacagaagagtaaccctaaaacctgatcctatgaaaatctttgaaagaatcgcaaaacgctatgcgcttcagaattactatctgcggcgcaatttctactggccggatacgctgccggagattctcgactactggcagcaacacaatgaattgccgttcctctatggcggcgataactggccctacgatgctatgtgcgagcggcagcgccgcaagggcgtctatgcttcgcaatacctgacccccgaccgtacggcgcgccagatggcggcgctggccgtgcgttatttcgacaatgacagccgaatcgtggacgcctgctgcggtacaggacaacttacgcgcgccttgatcctcgaaggcgtgcagccgtcggcaatccttggcttcgatgtcgatgcggaactggccgatctttacgaacgtctctatcccgaagttgcggctttgcagatgcagttccatgagatcgacttccgctgtgagaacgtcatcgcaaatccgccgttcgagattacggagtgtgcggccttcctgcaatggctttcccgcacgcaacacttaggtgatcaagccttgctccttttaccttacggctatatcgacaaacagcgtccaaagaccgtgcaggaaacgatgcgacactttgtcgttcactatcgggcacccatgcaggagccgttcgcacgcacgaactgccgtgcggagatcgtcgtgctggaacgggcctagaaataaagaaagacgataatataatctatcgcctttctttataaaatggtcaaaaatctgaacatattatgtattatcggaaatgttttgcatttctttggcttccccccccctcaattataccttgaaataatcatatataaataaaggaaaggcatttaatattgcaacgcttggctctggcttattgatgtaattttgaagttgtgctttgaaaattttatcttgagctatggcattttttacagcaggcatgatattttctccagtacatatgtaattagctttcgatacattcatggtttttagatgctcccagcaatcttttgcattcgaacatattttaggtgtccgatgacgatctatcaagatgaaatccaaattgtcgtaatggcaaaattcacacgacaatcgcttaaaattacgacaatctgcgcagctgactgtatatttatagtagttctcatccggaagttctttcgtataccggatcgattcgatcattggatagtttatgtaaagttttccgtttgaagtttcatcgtcgaataattccagcatatccttcaatctaatatttatctcttccagagaaaggaatttatgttgaaggtcgtagtcgaaaaataggtaaatttcggcgaaatccgaggaattggcaatatctttaaacgggttttcttcattgccttggtgtatttcccgtaataaggatacaatgtctccagttcccaactccataatctgcttgtaaagattataaatgttgttcccaaaagaataaactatcgtatccgtttccttttcgaaaaacagatattttatgctctcaaaaagcatcggctctcttcgggctccttcaaaaacaaacaaaatcataattgaaaggcattacctctgaataacttttcgatattatgcccaaaccgaagttctttttgagtacatgcgctaagaggcttgattttattgttgtttacgatgaagttgcaatccggccgtagcaggtcgttcgtcatcagataagtattatgcgaagaggtgaaaacctgacagtccagagcaaacaacctcttgcacacctcgaatgccaatttaaaatggtaaaaggcatcgaactcgtctatgaaaacaaatgatgcgcttctcattttttgtatccagaaatacagaagcatcagtgcattcgtgcctgttgagataatcttatcaaagataacatctctgccgcctattttacaaacgagcagtttgtcattaggtcgaggattcgcgaattgatacttttgttcactgacttggtgtaaaaactcgctgaaatcttttactaaattattctggatgatatattcatcaagattggttggtgcaagatccaatccgataaattctcgtgtgtcgagacaccggaaccacagcattgaatcaacgaattgcaacactgttagcagataatgattttttgccaacggatatgatgtgagtaaaaagttgataatggatacgttgttggcattatctttcaaatttcgtttggtcgtattctccatcggaaattcattggtatctatgttgaatgtacgagcggttcgttcgaatactaatgtattatcgacggatagtttttccgttaaaagctgcccgatattatttttcgagtagcaataattgattattctgtcagcatccttgaatacatactcaaattccaccgggacatttagtttccccacatatacaaaattggcgtaataatccagttttctccatttctgaccaagatggtttacaatatcaaagagtgctaacccaaagtttgttttaccagaaccattagggccataaatgatcccatttttaatgatgccgtccttgataacttcggtgttgaattcataattgttaggtgtggataaatcccactctatacgttcggaaaaaccgcgatagtttttgactgaaaattttgcaagcatcatgataggtgaatttttgcaaatataatatattatttctgttatgccgtaatttttttacggttatattgcaaactctacattaatcaagccattattcaatcagatacgctattaatatcccggaatatataccgaggaatcataaaaattatccccttgtcggttgccatcgggaaagataagcccgggacggtcggctgcacctccctctccggctccggggcggaaaaatcatcctcgccggagctgcggtatttttccgcccctgcaccttcgccgcgggcttatgaatcttcccgaggcaaccgacccgttcgggatataaagcctcataacatattattcattgcttgcgcgataaaaacaataaaattcgtgtgagcagaaaacacgtgagacacacggtaaaaactgttagatgttatgcagactacgaaaatgaacacacaatcgaagaagaggggcaagtatgcaaaccgcaagccggctgctcccgacatcgccggacaggaagcacgggatgctgctcgtgtcgagattcccgaagacgcgcctatcgaatcgcaaaaaacggctgatgaggaatgtccgttcatagaccagccgacagtccatcctgagacggatgtccggctgcttgatttgaacaaaatcatcaattcgacctacaatccccggaagaacttccgcgaagaaacgctgttggaacttgccgaaagcatcaaacagtcgggcgttcttcaacctatctgcgtgcgtccgaggaacgagggcttcgagatcgtctacggcgagcgccgctattgggcggctgcaatggcgggcctgaaattcattccggcccttatccgggagctgtcggacgccgaggcggaggatgccgccatcacggagaacctgcaacgcgaggacgtacggccgcgcgaggaggccgctgcctacaagcgggccttgcagtcgggacggcatacgatcgagagcctcgtgggcaagttcggcaagtcggaggcctacatccgttcgcgcctgaagctctgcgagctgatcgacgccttggccgggatgctcgacaaggaggatatttcggtgggcgtcgctacggagatcgccaaatatcccgccgacatacagcaggaggtctacgacgaacattttgctgaagggtgttacagttcgtggaaggcggtgcggatcaaagatatcgcccggcggctctacgagcgttacatgaccaaactggaaagctacaacttcgataagacggagtgcctttcctgccagcacaacacggccaatcaggtgttgttcaaggacgaatgtacgggtggctgcgcgggctgccagaaccgtgagtgtatgatccgcaagaacaacgagtttctggtgcagaaagccgtgaaattcctcaaggacgatccgcgtacgacgctggctacgaacggcgaaacgcccgctgcggtgctcgaggcgctcgaacaggaaggctaccacgtcgaagaactggaatacaatgcttattattacgacgaaggtcctcagatgcccgacgttccgcaggccgaaaattgcgtgtcagaggaggattttgccgaggctcaggaaaggtatgaagcccggatggctcgttttacggaacagacgcagcagttggagttcgacatctcggaagggcgggtgcgcaaatatgccatcatcggcaacctcgatattgaaatccgctacgaagagatcgaggacgaagagcgggaagtgacggtaaatgaggggcaggacgatgagcataaggtcttcgtcaccgtcgtcccgccttctccgctggaagggctgatgcagcaggagcgccgtaaccgggaaatctgctatgagcatatcacgaccgatatgaagcgggtcttcctcgatgtgaaggttgcgaacaagcccttgcagaaagaggagcagcagatgttctactacgccgtgatgcagcgcgtaatgagcgactcgaaactccgtcagtgcggtttccggcccaaggagggctcttacctgaccgaccgggagcagttcgccgcggcgggacgtattacggccaagcaacaggcggcgctggtccgtgcgtttctggtggactacttccgctcggcagctccggagtatggatgtacggacgaaacgctcctgacgggaatgatgtgccgcttcgcggatatgaacttcacggagcagagccagaaggtgcagcaggagtatctgaaagtctacgagcgtcgcaaagcccgccttcaagagcagatcgacgctttgcaggcaaaagccgaggctgaggagttggcggtctcgatgcaggaggctccggacttcgatcccgaggagcttcccgacctgctgccggacgagacgcccgacgcagagccgaagccggagccgctgatcattccgatggaaccggatattgaccccgacacccggatgcctgaggagatgaaaacagcagcataacgatagtgcgaacgagatgtccaaccgacggagcaggtcatgcctgctccgtctttgcattactataacaatgaataagaatttgattgaaaagatcgctccgcagctgacggagctgatgataaagaaaatggagacgctcaccgaggagtggcgcaagccgtggatcgccgacctcgcgcacggtcttccgcgcaacctgcgcggcacgccctaccggggcgggaataccctgatgctgctgttcctcacggagatcgctggctaccgtacgccgctctttatgaccttcaagcaggccaaggaggagggcctgaacatcctcaaaggctccggttcgtttccggtcttcttctggaaactgtacgtccgtcataaagaaacccacaagaagatcgagttggcggaatactacagtctgccgcaggagcagcggcggcaatacgacgcgctgcctgtgatgcgttattatccggtcttcaacatcgaccaaacggatatgccggagcgacagccggagcgttacgccgcgcttacgacaccgaccgggccgaaagactattcggacggtctgacctgcgaatccctcgaccggatgctggcggagcagtcgtggctctgtcccatcctgctcaaatccggtaacagggcttcctattcgccgacgctcgaccggatcgtctgccccgaaaaacggcagtttccggagggcgcggcattctatacgacgcttctccacgaagttacgcacagcacggggcatccggagcgtctgaaccgttcttttggctcttgctacggagatgccggttatatccgggaggaactggtcgctgaacttacggcggccctgtgcggtgcgatgctgggcttcgccacgacgccccgcgaggagagcgccgcctatatcaaggactggctggcggagttccataaagagccgacctacctgttcgacattctcacggacgtgaaccgcgcagcgcggatgatctccgaacgcatggctggcggggaagaatcggactctacggaagcgattccgtaaaacacgtaaaacaaatcgtttaacctgcgccgcggccgaaaggtcacggcgctctttaattccactactctgagtcacatgatcgtaaaacgtatcaccatcactcccgacctgcaggtgatggtgcgcatggcgacgaacaacatccgcccgctcgacttccgttacgacgaggtcgcattcctgaccgaaacgctgctgaccgacggcatcgacaaatacgaggcgtgggaacgctgccgcgaagataaggagtacgagcggagtctgcttctgagcatgcggaacttcctgcactaccgtcccgttctgtgccgttgccaccttgaacaccgggggcgccccgtgcggcgtatttcggtcgggcgcatctctttttcgcaacagcatcgccgtgtttttcggagcattatcgacgcgcaggcggctcttgtcatgaagggctggaatcccggagacttccgaatcctctaacataacctaactgaaaaacaatgaaaacctaccgcatgactaaatattacatccatatcgattcgtgccgaacagcatggaaatggggcgagctgccatgccggtgcagttggtgcggataaagttgaacttaatacccaacattatgaaaattatgtgtcaggaacattacgacaaggtagtgcagtacgccgaaagtatcggcgataagacgctccacgagtgtctgaaacggctcgaacggcgggagcaaaatccccatcgtccgtacgagatcgaactttacaaagactttgctccgtattcattccttttcaaagagcgctatcccgacggtcgtctgggcgttgtctgcggattggtttatcacggccgtccggacctgtcgtgctgtttcatcgacggggcttttcacggttggatgacccacacctgaaaagtcgaaatactgattgtcgatcccaacggatacaataaatccgaccggaattttgttttactccaattgtactaaaatacattaagtcttttttgcattttttagatgtggatatatgcttttgagtaaattttcatatctttaacagtctctttgataagatttattaatgatggaaagaattgatatcacctcttttgatgattcgcagattctgaacgtaggtaccgttaatacttatatcaataatttgcgaaatgtacaagaacaactaaaagataaactaaatggtgtcagtttattttttagaggccatgcaaataaagactggactttaacaccggggatatatcgtaataatgttatgttgaaaaaagaacatactttggttcatgacattattcgtcattgtcccatagaatttcaaagttgtcattcttcgtttgagaaattagtcaaaatgcaacattatgaattgccaacgcgtttattagatatttctatgaatcctcttgtagggctttattttgcagtcaatgaagagtattcttatgatggggagttgcatatttttctgataaaagattctgatctttataattttgacgatggttgggtaaatattctttctcgattcagttttctttcaacaactatcacaaatattgggacttctaaggatacatggtctaatctcatgcgcaatttgaggacgtttcaggaaccttatccatttttgacggattttactgagtttaataaagtagtatgtgttttgcccaaacttgacaacccgcggattatacggcagcaaggcgctttttttctttttggaatgaaagatggaataaaagaacaaatagctgatttagaagtgtcctcaattaaatttaaggttccagcatgtaaaaaaaagggaataaaaagccaattagatcaattagggatcaatgaaaagttctgtttccccgaaattgataacgtggcacattacctaaaggaacagtgttctatataaattgttttaacgcctcattcgatttgttaattggattctgccattcaagaataatttaggtaatatcctacttttaattccttgatacttagtataaaatatcgtgacgagcaataattcggataataaatcttattcaacctaaccaattaccgccacgagggatgacaaaagaaacgacctcgcaatttttgtaaggtggtttgattgaataatgggagttattctaaggtgaacgaagccttaactatgaattgaccgacataaagatgtaaatgaaagttatgagtagcttcagaatttctgcttaaatcttccctgtctttgcgaatcttctgaaacagttaccagccgggtattttttcggctggttgctatttcatgtattcctgcctaaaaatattcccgtcaccgaagaggcatccccatatcgaaccaactcgttggccaactgcttgaatccggtgcctgtgttgcatacgtcgtcgaatagaaatacacgacgtccccgaaaccggttgtaatgtatgcgtaggttttctattttacttttataaaggattccccgcatggagactctggaacgtgtgatttcgattgcatcgaacccgtcttccatgcctgtcgtttcacacagcagtctgcagaatatctggaaacgccgttgattatcccagaaagtggaggcgggtatgatggtcaaaataacatcggttaatttgccggcaagattttgctcccgccgtagtgcctgctccaccagccgtacggtttcccatggtcctgcaagaggttttccgtctttgaagcggtagataaattcgtcgtagccagttgcattttggattccatgagtggcggtatagtcatctaatgcgtaacaatcaaaactatcaatttgaaaatggtgtttgaaatgaaccggtatagggacgaccgcccggcaacagccgttgcgcaggtcatgctccattgcttgtctaaaccattccatacgattcgtattgcttatccagcagtcgagttccgtccatgatgtcagtccgccgtacatacggataccttcggttgccgagagtaaagaatcgtaataccccgttcgtgtccaattcaactttccgagtacgggacggagctggtcataattgtttttggtcgccgctatggcgaacgcagcatccgagattcggcatacgaactccgtttctgcggattggattgaatcgctgatttgacgcagtatattcagtccttcatcgtcgatccgattgttcggcagatattctatactcagtttcatgacgctatgaaatatgcagagttataaatataaggaatatccgggaaatatgcgcggttgatacccattttttgatattacctttctatagtacaggccgcatatgcaacataggcacgatattttcgtttgtattgcgaacgaactccgcagggagtaccgaggaaacgacgcaaattcacactacacggccggcaggaaccggcaaagccccgcttaactatttgtcgaaacgacgacacgatgcccgacggcattgcgtgccgacaccccgtatgcccctgcgcctaattatgcacgatgaatattcatttcgatatatacggtcttataacgacgaccgtcaaatcgctgccctacgtcagcgaaggcattccggcgggattcccgtcgccggccgcggactatatcggcgaccgcatcgacctgaacgaagtcctcatactgagtccgggtgcgacatactatgcccgcgttcgggattactatctggtcgaggaggagctggagcagggcgacggcatccttttcgacacacggcttgcaccgcgcaccggggacctcgcactctgcgaggtctgcggcgaacgggtgctgaaatatatccgcaaacgggggcgcgagctatggcttctcggcggcggaacggacgacacgcttcctgtcgacggcgaaaccgaagcgcgggtgctgggcgtcgttacggtcgtcatcaaaatccggcggttcaagcgacggcgcacacgccttatcgaccgcctgccgcagaaggaacaacccgcgctgttcgagcggcgggcgatccgagcctcgtattttccggagagcgacgttcccgttgaggggttcgtcgacctgaacgaagagctgattcccaacccggtcagcaccttcttcgggaaggtgcggggcatctctctgatcgacgacgacatcgaggacagcgactcggtgatcgtggaccggatgctcgaaccccggtggggcgatcttgccgtatgcgtcacctccgaaggtttcaccatgaaatacgtcgaggtgcacgacgatggggagatctggctgatgcccggcaacaaggactatgctccgattcggattaccggcgagaacgaacggttgatatggggcatcgtcactcactccatccggcagctgagaacgaagaagggaggtgctggatgagccggaaactgttgcccctgaatccccgtcagatggtcggccttgccgacgggaattccttttactgctcctgcgaggagtccatgcagccgtggctgcacggaaagcccattatcgtggcctcgaacaacgacggctgtgcgatagccatgaaccggccggcgaaacgatacgtcaggatgggcgacgccctgtttcagatagcagacaccatccggaaacacggcatcgttacgttctcctcgaactacgagctctacggcgacatgagcaaccgcatgcacagcatttgggcctccttcgtccccaacctcgaaatatacagcatcgacgaggccttcctcgacttcaccggaatggagggtttcgatttcgagaagctggggcgcgagatcatccgcaccacccggcgcggaatcggcatcccgatctgtctgggcatcgccccgacgaaagtactggccaaggccgccaacaagctcgccaagacggacgacgcccggcaggggctctatatcatcgatacggaggagaagcgtgtggaggcgttgaaaaaactcccgataggcgatgtgtggggcatcggtcggcggcatgagaagcgcctgacggcgatgggcgtccgcacggcctacgatttctccgttctgccgcgcgagtgggtgcgcaggaacatgaccgtcgtcggcgaccgcctctggcgcgagatgaacgggacgccctgcatcagtctggaactggcgccgcccgacaagcaggagatatgcacgtcgcgggcattcgggaaaatgacctccgacttcaacgaggtgaaagccgccgtggtccgttacctcagctcctcggcccgcaagctccgcgaccagcattcctatgcccggcgcatctatgtcggcattgaaaccaatcccttcaacgagtaccagcggcagacctaccgggggctgcagatcgagtttcccgtacctacggataatacgttcgagatgattccgtatgcaatgacgctgctcaaggcgatctggccgacctatactcccggtgagagaccgttcctgttcaaacgggcgacggtaactctttcggaccttattccggccgaagcggtgcagcttaacatgttccatcaagagcccaacatcgagcaattacgacgcttgcaggctgctgtggatgcggtgaacggcccgctgaacctcgacagccggctcgtggtgctgggcgcggagttgaccgggcagaataatacccggctgcgtcgcgagatgctttcgaaatgtccaacgaccaagtggagcgaccgtatcgacatcgccttatagcccatgcggaccggaaccgagtaaggaggctatctgctcttccaccgattcgtcgtatcgtttcttacggaaatagacttgccggaagatcggactttggctgtcccgttgcagcttgaaccggtgagaggaatatttcaggtcgaggcggatgatggtccggtagagttggccgggcgtggcgtcgcaacgatccttgatcgctttgtactgatccttgcgaatcggacccgcagcgagggcggttttcagttcccgttccagccggcggttgatctttcctttcagcagatgctccggggtgggcctgccgtccgtgaggaggaatccgaagccgcggcggcagcaaaaatccatgatgccctcggccttggcctgcacccggtggtcgagcatgtcggcgaggggcttgacctcggcgattacgaaatgccgcgatcggagataaacggcgaaatccggataggtccgggccttcagcttgccccgccagtaaggaatatcgacgggctgctcccaatagaaaagtacctcttcgctgccttccagatactttatgaaatccagttccagccccgattcgtattgaatctcccgtccgcatttttcggagtggaaaacaccgcttcgatactgcggcttgtgcgacacctgcctgcggggttgcagtatcccgaagtagtcgatgtcgaaccggttccggttctcgaaccagaggactttgcggaaaagcgacgttttcttcacatcttcgaaacggaaaagtgcccctccgtagtacttcgtcggcctgctgcgcggcgttggaaaggcatggagtttgtctccggtattgaaaaacaagaatatgtgctttttcacttcgcttgcggccaatgcggccgcagtagctaaaaaatacggcaaacagctggatatcgtcgaagccgcgcgtcagatcctcgccgagcaggaacaggagcagcgggcgaagcaggaagccgatccgaaacacaagatcagcgtgtacgacattcggctggccgaggatatatacgtcatccccgcatacgccgagccgcaatgtgtcattgtttccgggagcgacaaactccaagtgatgcagtgggggctgattccgcggacggcgaagcccgaagaggcggagcgttacgaccgggagaatctgttcaagaacgcacgggccgagacgcttttcgagaaatggccgtggcgaatgctgtggcagcataaccggtgcatcatccccgtaaccggctttttcgagccccaccggctgtcgaacggaaaggcgcagtattactataccactttaaaggatcaggatttattctcgatcgccgggctctgggacgagtggacgcatccgcagagcggagaaaaggtgctgtcgttcgtgctgataacgaccgaagcgaatgccatgatgcgaaaaatacacaatggcggaagcaatccctttcggatgccgaagatactcacttcggagcaggaacgtttatggctcgattctacgatcgtttcgaaggaagccgtcactgatctgctcacggtatatcccgaagaagagatgtcggcatggcccgtgcggccgaagttcaactacggagacccttacgacgaaggaattatagagccggtcgcggaaatgcagacgctcggactctgaacgcaaagctgcatgacatcatacaaaaagagaggagaccgataacggcctcccctccggcaatgagtcgcgtcactcttctaatatatgaactctgccagtgcatcgacgagcagtctgaggagctgctcggccgtcagagggtaggaccttttcctgaatatgcggtccatcttcgtgcggaggagctcgaagaaacggttggcttcgtgaaccggcattttcttgaccgtcatcaccatcagccacagcggcacttcgatatagggcggctggatgaagagttcgagcagttcgtcggagtgatgcctgtaatccagaaaactgttctcgcagactccgtacagcggcaggacgattagctcgtagacgatgcggtgcgttcttcgcatatcgccctcttcataaaaccatacgtcgatctttttggcgccgactatccggtacggattataattgtccctgctcatttcaggagaggccttttatttccgagtaaatgctgttggccatataatcacgtaattcgccgcgggtcgagagccggcagaaccggtattgctcaggtagatgccggcctttcgaaaaatgtttctggtccgtcgaccacgattccagtcggatcgagcccccgtcatgcctgtcgtaaagaccccatagggattccgcatccggacatcggggatcgtcggtatggaaaagatatacctctccgactttgaaattacattgtttcaccgtcattcgtttgggctgttttgtggtttgtgcggcaaagatggatgaaacgggaagcccctgcaagcacatgtggaaccattccaattttttattttaacgggaggacctcaatgcgtttttctcaggcagaccgtttaacgaagaatttacggcggtcggttttgccgggtacttactgcgtagtgcagcggatttcgcgttttggaaatcgattttctcacaaaaacaccggaaaaaatttggatgataacgaagaaatgactatattcagaataacaatagagcatttatctgttgtaaactgtttatcgtttcgtaagtcccaacttctacctcaatgacggataaacgggcaagatcggaatgcgcggtcttgactggttcgtcataaccttgggacggtacgaagcaaccggtcgagaaccgcgcatattttttgacataacgaatcaaaagatgtgccactatgaatcgacccgaatgtgaaagcgaaaggctgatttacagtttagaaacaagccccaaattacaacttttattcgaaaataccgctgtcggtgaaacttatttgtttcaccggattgattcggattgcctgcagatttcccgtttttcgataaaggcattggaaccgccgtccgtcccgtatcgaccgtctccgattcgtcttcattctgatggcaccgtccgctttcgcccggctgcccgcaaagccggcctgcgaagactcgtgcgcacggatcgccgttccggcatcgtctgaatacgaacaaattttcctaatctcaaaatgatggattttatgaacggttttgaaaaggataacgagaatttctatcgcccttatcgtgtggtaagcgtcaaaaagatcgaccgctggttttttgagaagcatgaccatcgcagaacccatgcgaagatctatgaaacggtcatccggcccaagttcgggatttgcgaaaacacatttctcgactaccgccacgaacccgacgaactgctggaattgttccggcaatcggtcaaggtcgaattctctctgtggcttccgaccatgcaggccaagtacatgagccctgtcgaagccgaccgcttcagcctgatgctttgggatgcgttcgacacggcttttaagtgtatacacaacaaggaaccggccagcctgatagatgctgaaaagttattgaagcatct

SEQ ID NO: 12095 - DNA, 20355 bp, Unknown
  gut microbiota DNA sequence
ctgtttgggagagaaatcacccgtcgggtgaggtgacgcgactctttaatgaaaggagggggctgtccgaaaattcggacagcccccccccggtatataatgcgcaacccttgtgattgcggatgctcttggctgctttgggccgtggtgccaccggagccgggcgtttatgccggttccgcgggccgcgggcttcctctgcggcctgtgtccagtggacagcgtcggggcaggcgatcacttccgccgaagcgctccggtgtgtccgtacacgttcttcggggcaacttagaaataggtgctcacggcaaattcgaactgctcgataaatatttttttaaaggccgaaaggttgttctgttcgtaaaagacgagcatggcctttttataatcgatggagtccacggtgcggaatgatatcggacaataatcgtgggccatcagctccgcgttactgacgattcgcgcggtgcgcttgttgccgtcgttgaacggctggatataggatattagaatcagcagcagcagagccttttcgaaaatatcgtcacggcggttgacggaatcgcaaacgtcttcaagggcctcgcgaatctgaaattcgttgtccagcggccggtagttggtgcccgtgatacccacacgccgggtgcggatgttcttgtcgacgcccaaatcctgtatcaggatactgtgaatgttctcgattttcgctatgctcagcggttggaggtaatgcgggttttcgatgatgtagtccaaagcctccttgtgattgaggagcatggtggcttcttccagcgtctttcccgatgctgtctctttctccagcagcagtcgctcggtctccagcagggaatatgtgttgccctcgatttgagaggacttccagctcagatccacggccagacgctccagctcctttttgtattgcgacggggtcagtttgacgacgttgtcccggaaccgctgctgcaaaccggtgagtctttcatgctctgcacgggtgaacaacggagccttggcaagaacgccgaatagttcgaaattgaaatggtcgatgatttttcgttggtcgatttcccggctgaaatagttctcgacgtcgattggggcgaacaggtcgtaagccggggacacgaaataacgggtgcccttgttctgcccctctgccgtcagtttgttctccgagaccagccgcgcgagttcccgccgcagggtcgccgacgaaattgccagtccgaggccggatgttatctccgacgaagagacgccggggtgctcccggacatactggatgatacgatctgttcgctcgctgttcatgctgtttgaagtttatcgctcgcaaatatagtaaaatatcgctcagataagccgatttttgagcgatattattgcgatttttgagcgatatcggtatcatatgcggtgcgctttccctctcgttgtcgtcggccgcattcggcgtttcagcccgttgttggccgctatgttcttttgcgtcttgcagttctggggctgcaaggaggattccggcatcgccgcttccccgtgcccgatctgtcgggcggcattgcggttgcgggaggtaaatataccgttacgcccatgagcaatctgggcaacggtgtttcggtaattgccgtgatcaatgacgtctgcaatctctttctggtgttttcataaatcagtcattttatagcaccttggctttcaaaagctctcggcttgggatttcgatagtctgatgtcgggctccattcttctcgatgatctccagcaaaagcaccttgtcgtcggagatcgtcagtttgggtagtgcgaataccgttcgctgacgctggtgtcccctcacgactgcaggatcattgcatacgcgcaggatttcgagcgtcgtttgttgctgcgccgtgcgcttcgtgagcttccggtccgctacaatgaaatgtcgtgcatccacctcgaaggagatattcgtgtcgttcgagatgcaggtgtgcatgtatatcacgtcattgaacgcataaattcctaacacctcgaccacgatgccgtacttcttcgtgcgaatgcccttcacgtccgtacggttctggcggtatatgtcgctcaacatgtgttttacggttgcgggcttctcgcggcctacttcgcgcagcagtactcggtcctcggaagcaatcgtctgataatcgcctacggcggcaggttctttcaccccgtctgtccgcggtgcctgcatcgcaagattgacggtcgagacagccggattctcggcataatagacatcgaaagtgaaaaatccgccgtcttcggtgatgaccgtgaggtttgtttctgctgcgaaattccgcacggcggctttcacccgaacgacgttctcggctccatcggcctttccggcgatgatgtctatcgagccgatgtcgatatacgtgacgggcgacgggaaaaggatatgcacggttttcgtaaatcccgcttcgatacgctggggacgaatttccgccggcgtttccggtgtcgtctgtgccgtgacttttgccgcggcggttgctgcgacaatcaggaacagataaataaggtttcttttcatattactgctgttttgaaatcaataatagctgatggttggctttgagggttatcttcacctcgcggagtttcccggcgacatactgcgacgaggcctgcaatcctccgcgcgccagctcggacaatatctgctgcccggccgagcgagtgacgttcacgctcgtaccggctgtctgcccgacggatgccagcgcctctttgagggccgtccgttcgcgggagttcggaacgttgagtcccggctggccgtcgaggtcgtaagccgcggcttcgacggcgaagatccgcccgccgtattcgacggacgacaccgtgacttgcagccgcattccggcaatcgtcgcaagaccgtataacggagtgttgcggggaattagcactccgtcgatgcgcacggcttccagtagccgcagttgcacggtgcttccggcacgtatgacctgcgtctgagctacgcaggccttgacggtcggaatatcggcatgcgcaacgcgacctgccgccgtgagaaatcccaagttacgttcgacggtgaaatccgcccgcgtgtcgagcgtcgaagcttcgacctcaccctcccgaacgggccgcatgacggaaaggcgcgaatccctccgctgctttggcggcccggcctcttcgtccgcggccgttccgccagcgagatacttccgtgcgagcttgtactgctcctcggccagttccagagggtcgggctgctgccgctcggcgtcgagttgggattgcagggctgcaacctgctctttcagggcttcgacctcggcattgcgctgcggagtggcgtagaagccctgcacctgctgctgcatggcacggttggcctcggcggcccgcagtgcggggttgtccgccggtacaggctcctcggcaggtttgagcccgtcgtccagcagcgagaacgaattgtcgccgagtgtcatcatgcgtttctgctgctgttcctcgctgcggagctgttccgcggctttgcgtttgtcgccgacggtggcctgcgctttgccgtccggaacggaggtattgatccccgcggccccttcttgaggcttgacgggtgcaggccggaatatgaaccacagcacgacgaggaatatgcatccgaggatcgccgcgaagagcagcaccttgcgtttgcgctgccgctcgaactccgccgaagggtcgttgcccgtattcttgttgtctgtcataatggtttacggtttcaggggtaaatattcaaaatgcccgacctccagctccggtaccatgtccgtagcgaacaggagccaaagataaaggagcagtagcaggacgagcgccgcgagtacgatctgctcccggatgcagggcgcgagcatgtcgtgccggcgccgcagcgaccgccgcacccagcggatgcggcagcgcagggagtgcggtttagcggtcataggtcgcgaggtctttgttttcgacgatgttcagcgcctcgaccataaatccctgcgggttgttgtcggagcgggagacgttcaccagacggcacgtcgtgacgagcgaccgctccgtgacggtgctctcgcgcagaatacgctgccgggcaaaggtcgtaacctcgtagggataacggtcgaaatcgcagcggatgctgtccactttgaccatctgcgagacattgcccgcgatcaggcggttgaagaatcccttttcctgcaagaccttgtagtaggacaaggcgcttttgtcggccatctgcaaggcgcggccgacgttggactcgatggccgccttgtcgggcgagagggtgaaaaaaagttcgtggaagcgccgcacatgctcgcgggcttcgacggggcggttctgtgcgaggtcctgcgagagtgctaccatcagcgagcgaccgttgtccagtacgtagatcttctgccgctgccgttcggcgaaagagtaggacatccagactgccgccacggttacgacggcgcagattccggcgaagacgagcgcgtacatgcgtagttgcctaaacgatgtttcgatgttcgttaaacacttgaattccataacagcgaattattttattttctgaaaataagccgggcgccgttcatgatgccgcgtcccacggccttaccgccggaccatgccgctgagccggcgcctttggccccggcccatgttttgccggccgtccatccggccccggcgcttacgagcgaggtcatcttcgagacggtcttgttgtaggcggcgaatccgttcgcctgcacgacccacgaggcgatcgaggggatgcagaggtatccgcatacggctacgagcatgaagatcaggttcaggctgttcgaccagtccacataccagttgtatccctgctccatgagttcggcatcatgccgcatggcgagactttgcagacgtgcgatgatcgccgagaaaagatccgagatcggcagccacaggtagatcgagacatacttcgtgagccattgcgtcagtgtggactggaatccgtcgaacacggagatggcgaaggcgatcggccccagcagcgacagcacgaccagataaaaagtcctcagcacgtcgaggataacgctcgcggccgcgaagagcagttcgagtatccacgccaagcctttgaagataagtccctttacagaccatgaggagcgctcctcgttcatgcggtcgagggtttgctgcgtctggtcgtccacgcccagttcgctgagctcgcgctccatctcctcgtcctcggcgtagtagctgtccgggggcatctgctcgcggccttcgagttcgagccgctcacgccgctcctgccactgttccatgtcgagcgtctgcccggccataagcgaatgcgttgcctttaccagcggcgagagaatgccgttcagggagctcagcacgagggtcgggaagaacaggatgcagatgccgatggcgaagggccgcatgaggggaaagaggtcgataggttcggcttgggccatcgactgccagacgcggtaagcgatgtagagcagcgccccgatccctgcgatggccattgcgacctgcgatatcggatagcacagcgccatcatatcgtcgtataacacccggagaatcgtatgcagattctccgtaagggaaagcatgcgtaccatactaccagtagcgttgttcgtcggttccgtagagcgagagcacaccctccatatcccgcttccgggcggcccgcagcagggatatggagatgttcttacgcgtgtagtagcgtgccagatctcgatggcgccgcaggacgccgtagacgcgctgcaccacgtcgatccggtccttgtccgtcagggacatatccgtaggattcacgatatcctgcagctccttcaattccccggccgactcctcgatgatgcgggcgtagcctgcggcgatggccgcgagctccgcgggcgtgaagttctcgtcgccgaccatgcggcgataaccgtcgacgtagatgtccgagatttcgcccacgagcagaatgcactgctgcaccttgcgggccgagcggacgaggttgttgacggatttcagggcgtcgtagtatcgcttcccctgctcataaatcttcacggtttcctgaaagctttgcagcatggtggagccgttcttggcggcttcgacgacctgcttggtggagttgacgatcccctgcgcgaggttcgtagggtctgagacgacccactgggcgtatgtgctgaggcccgtgcagacaaggcacagacacagcaggatgattttctgtttcatgcttgaattgattgtgttattgaggatattcacccgaagacgggcatcaccgctttatccgccgacccgaagccggttgtccggtttgctctttccttgcagaattgatctctttctgccgcaccccggaaatatgtttctccggcttcgggcctttctgccgcagggactcgaacagatcgtcggcgtaggactgccgtccggtcatgcggacaaggcgggcatccagctcgcggaaggctttctcaatctgtccgtattgctcggcaggtgatatgccgggaagaatcctgtatttgtcgagcaactgccggttggtgtaggggctgtcgatcttttccgggatgcgtgctaaccatcccaaggtctgcaattcggcatcgagtttttcgatgtaggtttgccgcaggggaatttccgggtcactctccaatatcctctcggcttcccgcaccatgcggttctcggccttccagattcgctcacggagctgctgcacctgctgcggatcgtccggacacgccgggctgtccagccgctcgcgtatcttctgcaatcgccccatctcggcgtcccagtcgtagaggtgtacgatgtaacaggagggcatataacgcccactcgtttctgccaaatggcgcagttcgcggaacgtctcggcgcggaactgccggtcgatgatatgcgcagcggcctgcacctcggccatcggcggctgccggagcttgctgtcgggatgctgctccagataggcatccaagagaaaggtgtgcatggacagcaggccgtgcagggagtgggcggtgtctgccggaacatccgcgaggcggcacccgatctttttcgcaaacggtgttctgcgcagggcatccatcagctccagcatatcttttcccgccgcatcttcgggcgtcctgagaaagcgggatgtcgctgtattcattgtcagtccgattccggcaatggtcagattagatttccggtgccgtcgcacaaggtccgtaacactgcatatatcccgttcccggagcaggttctcagcatgacgggcaatgagcgtgcgtcgatgctccttttcccaatccggcgtgcggcggaatagccgcgcgatcctatctttccattccatagccgtcggatttagaaatgtgtgactgcgggcggagtccgccgaagggctgccccgacaagcaggggcagcccggaaatgccgaatgacgctccattattcggccggctcgttgaagtcgcacgcttcggcaccgatggcatcgtcttcctgccgccggatgctgtcttccggaacgaagcgtccgtaacagccgacggtgagcgtctcggtggcagcatcgtagatcacgcggttgccgtcgtcggcgccgagccacaggcggtggcggcgcagcgcgatgatgccgtcctgtacgatacgtttgtagcagagcgcgtggtcgaaaacgaggatgcgccacgtcccctcgccgatgcggcgtatcgaggccgagaggttgttttccgccgagagccacgccccgcagatgcgatcggcgtcgagttgttcccgaaggtccgccaaagtgcggataacttcggtgcgggttctgatctcctgctgaagggccgctacggccgacgcaggtgtcgattggttactgttcattgtttttgagttttgaagttcgtttgaaagcgccgcccggcacgaggagcagtgcatcggccgggggcgtgtaaaagagagcgacccggcgtccgccgtagaccgtataatagacgcaatccttgtagtgcagaacatgcgtttcggacgtgctgcggcgcgtgatggtgatccggaatttatcaccgcacggctcgattaccagccgcgtatcgtcgagcgtcgaatgccatgttccgcacaacggacggattttgtggtattcgtaatcgtagaaaaggtgaaacgcaccgagcacggcggccagtgccagcaggatgccggcgcacatccaaagtatcggtttcatggctgtaagaattaagattcgcgttcgcgtgccaactggcggatggcggcttcgatgtcgccgccgagcttcccggcgagttccatcacctgcattttctccgattcctcagtggtataggtcaaatattcttcgaccgaagtttccgtggcataaactgccgactgcacgcctccgagtccgatccacacttccttatagcggcgtttgggatcgttcgagagattgatcgagagaatctgcgcccgctccttgtccgtcagacccagcagacgttgtatgccgtcgaatttcgagaggtatttgcgttggtccaaaaggattttgcagtcggcgttgttgatgatcgactccttgacgatgggcgacgagatgatgtcgtccacctcctgcgtcaccacgaccgcctcgccgaaatacttgcgaacagttttataaaggtagcgtatgtaggccgacatattggccgaggtgagggccttccagcactcctcgatgaggatcatcttgcggacgcctttcagccgccgcatcttcgaaatgaaggtttccatgatgatgagcgtcaccaccggcagcagcgtccggttcgaggagatgttgtccagctcgaagacgatgaaacgcttgtccagcaaatccaactgcttgtcggagttcagcaagtagtcgtattcgccgcccttatagtaaggttccagcacgttcagaaaattggtaaggtcgaaatccttctcgcgcacgcgcttctgctccagaagccgccggtagtcggtttcgacgaactcgtaaaaggtatcgaacgaggggacgatggagcggtcggcgcagagtttcgagaggtagaggttcacggcgttcgagagcgctacctcctccgagcgcgtcggctcctcggattcgcgcttccaaagggtcagcagcagcgtcttgagcgactcgcgtttctctacgtcgtacacaccgtcttcgacataaaagggattgaaggcgatgggcgcctcctcggtgtaggtgaaatacaccccgtcgcggcctttggtcttggcgtgaatcagcgagcagagcccttgataggagttgcccgtgtcgaccagcaggatatgcgaaccctgctcccagtactgacggaccagatggttggtgaagaacgacttgccggagcccgacggtccgaggatgaatttgttgcggttggtgatgacgccgcgcttcatcggaaggtccgagatgtccagatggaggggtatgcccgacaggcggtcggacatcttgattccgaagggcgagagcgacgagcggtagttggtctccccgttgaaaaggcagagcgcctgatcgaggaaggtgtagaaactctcctcggcggggaaatcggcttcgttgccgggaatcgccgcccagaacaacaccggcacgtccaccgtgttgtgatgcggcgtgcagcccattagcgcgagttgcgagcccacgtcgttgcggatgcgcttcaattccgcttcgctctcggcccatgtcatgacgttgcagtgacagcgtacggagcgcaacccctgcgagtgcgcctcattgagatacatttcgatccactcgcggttgatggcgttcgagcgcgaataggccgccagcgagttcatgttccgggccgaggcttcgagccgcttgagcgtttcgtcgtggtcgtcgaggaatatcacctgattgtagacgtggttgcaggagagcaacagccccacgggcgccgcgaacgagaggcggcagtccgagcggtcggtcgaaagacgttcgtagcggaaatccgtcgccacgctctgcggcagcatatccagatcggagagcgtgtgcatcgagaggtacttgtccccgatgtacatcatgtccgggtcgagacggatatcctcgttgacgaccggactccgctcgtccgagagagcgaagtaacgggccagcagcccggcgtcgtccgccgtgccgacgatctctgcttccgtgagtcgctcgacgcgcacgagacccgaatcgttcagaatgcgttccatctgctctgcggcttccaggaagcgcgtcacagcatccttgtcgcgcatctcccgcgggacgatgaagccccggcacaagacggatgaagcgctggtctgccgcatccgttcgggcgtggtcttcgtaacgaacaggtagcacgtgtggcgcaggtagggccgctcgttgaaatgacgttcgtaagagcgggcgagaaagctccgctcggagccctcctccggtgccgcataccgctcctcgatgaagaagtcctgcttgtggacgacggtgtaatccggcagcactttcagggctttgagccatgcgccgtgcagcgcttcgtactcctcgcccgtgagggtgaagagttcgggcagcgtgacgcggtaggctgcggtgatgtcggcgaacttggagatgatgcagttgttctcgacgcgcagcaaagggaatttcgattccagcgtcgaggttttcaatgttccgcgcataggattatggttttacggttcgacgaaagcgcaaaagccgcccgacggcccggcggtggacgatgcgccgcggatgccggcgcgaggccatgagtttttgaagcccgtgaggaccgaaacggcggttcagatagaaggtgccgcccgtgacggcaagaccggccacgagggcgaagaggatgcagaagccctgcgggatgccgctcatgtacattccggcgaagcagacgaagacgcccagaagccccgcgacgaacagcacgaggtactgcgccgtgagaccctgaaattcgacctgacggccgacccctttgttcacttggtattcggccatcgcttagaggaagaacgaacgtaagaccgtaccgacgatcaccagaaagacgcacgagagaaacagcgccgtagcggatttcgaagcgtccggatcgcccgacgagaatttcgagtagacgcgtacgccgccgaccagtccgaggatcgccgcgacggcgaagatcagcttcgtaagcgggtcgaaataggacgttaccatgttcgtggcctcgctgatgccggccatgccgttgccctgcgcaaaggataggagtgcggagcacagggacagaatcgtgaaaattgctctttttttcataaaacaggtagtttggttaagggtgtgaaaaaggccgcagcctgctttgggggcattctgcgaccggatacatcgtatttcctgttgcgggaaaggcgttagccgtattcgttattccatttcatctcgtaaatagtttaatgtcaggcataggcccggatgtcgaagttggcgatggcctgccgctcctcggccgtggcgtcgcccatgacggcgcactctccgaagtccagctctccgagcatcgcatgaacctccgcatcgcggagttctgctctggcggggagagccggaagcgaaggtcgggctccggcgggcgcttcgggctccgagagttccccgtcttcgccgatcgagggctgcacgacaaggccggtccatccttgcattgcgggcttcgctaccgggacaaatatagcatctccgcctgccggggcggtaccgatgtccgctacagtccgctccagtccgcaccgataggatttcgagaccagaatttcaggagtttgacggggtgcagtatcggcattcggcgtgtgaggggcagcatcgtgcccggtgtgttttttcttcgggcctttcagattgtcgacgacgtatgacgcgagccgcccccggaaaaacaaccgatccaggcatacgatccaggcggcaataagaattatgctgttcatggtagaaaggtttttaaggttgtgacaacggatctgttttcgatgtttccgccttaaagcaggtcttgcggatttcgctcttgatacagtcggttgatctcgtctttgtacaggtcgagatggtgacgtaaaatattttcaacataggatgtcgcggtcgtatgctcatcgccgaccttacggacaacctccaatactttacgtttggtttcgctgctgacataaagagtcgagcgggtacgaatgcttcttggctgcaggaacattcggtcgaagtcgccgatgacgatgtcgtcatcagatcgcaaaggccggaagggcgccggaagcggcatttcccgtttatcggcctctttccgtcttcgatcccggataaaatcctcacggtcatcggccggaagaggtgccggggtatcgggacgttcaggatgccgccaatgctgtatcagggaactaatcccggaaaaaatactccaaaggagtgccaatccgagcgtaataagacccagcatctcccaaaagtgcaggtcggacaaatagctgttcaacatgattgaaaaagtttcagatgatgttatggtaattctgttcttgatgtatgcggttgatctggtcgcggaacatttcgagatggtgacgcaggatattatctacataagatgtcgcggtcagtcgctcgccgccgatttttttcaggacttcaaggattttccgtttcgtaggggcgctgacatagagcgaggcgcggaggtcgtaatccacccggacaagaaatgtttttttgtagtcgggcaatgtcatcgaacgtcgccgtcgtatatccgggactgaagcactctccggcttcacatcctgcctttcggatacgaccgtttcggagggatgagaatcgggattggaggaatcttcagatatggcgacaacggatgcaggaggatcgggaatggccgcagccttgagtgacgcgcgcatacgcgcaaaacaattctttttcattttagatgaggtttttggtgcttttttgtttgtaaattctattgatgtcgtctttgtatagttcgagatgctgccgtacgatattttcgacataggacgtggcagtcatatattcgctgccgattttcttaaccacatccaatacctttcgcttggtgtcgatacttacatataaggccgagcgaacgtgtatatcatggcgagtcatataggtctgctcaaagtccggaatgatcattgtccgtcgccgccgggactccggtgccggggtgggactatcttgtgtttcttcttcggaataccgggccgcgacctccggttctgcctgcggctcttgctgcgcaggatcttctatctcgcgtgtaactttcgtcgtgaggggcaactgtcctgcgatcacctgtcttacaagaccttcgtctacttcgactttggttttcttagccattgtcagcggatgttaagaagcgtgagaatttccgttgcgagggtctcgatctgtgcttcacgtgcaaaaatccgttccggcgccagcagcgtcgagcgaccgactcctgcattatccggatgcagctctttgttgaacttcgagcggtaaggaatgtgagttgtcataagcgatagcccgagcttgcggataacggcctcgtattggtcgtaaagcggcgttcgttcacgacggtctatcatcgtccagaaaagatagacgctccgtaaagtgagggccggattttgggcaaggttattggtgaggctccgggcaaaggagagcgcactttccatgacgaccttgtcggctttcagcggcacgaagacagcgtccaacgacgcgaggagccgaatgacgccttcggcattgacagttcccggtaagtcgtagagaataatgcggggattgtagccgctttgccgcagccgctcaacttcttcggaggcttcgggcggcatacatttcagcagcggccagagcttgcggcccgttgccttgaattggcgtatcagcaacagtttgtgataatcgtcatgctcgatgagcgacagttcccgctctcgctgggcatggatcgaccattggggatagtcgcagtccacgaccaacacgtcgtgcccgacgatgtaatgcaggtaactggcgagcagtaccgtgaaggttgattttccaacgccgcctttctgattgcagacggcaatgcttgcaggggtgatgttcataatacagaatttaaaaggttcgataactcgcgtttgggggtagccattctgtcaaattttgcatttttgctgcattcagaaatgcactctttcagaaattcagcgtttatgaatatcttttcttccgaaagagggaaagagcgattttaacaacgaatttcatcccggaacaatcgccatcgcgccgacacgatatccttttagtatgattcgatttcatggctcacaaacgctttcttttattcctgccgcaatatacaacaggataaacgcgtccgaactaatgtccgccccagtccgctccagtccgttcggcgggcttttttttcgtaccggacggttgtaatattgcaccgggaaacgacccggcctcaggacccgtcatggagaacttccgaaactttcggcagcaattcttcggcgcggatttttcccatcgccagatgggagcgagctgtgtttttgtccgacaaccttcggtttgtccgacaaaaacgctcgctctgcgaggccggggccgctcccaagtcgcgacccatttttaagctatataatggatactaaccgaaaacagacagacaagacagacaagacagacaagaagccccgaacgccgagttataaatactctttccggcttaacgaagagcaaaacatccgcttcaacgagctgctttgcaaagccggatcggagcataaccggagccgttttatcgtcaaaagaatcttcgccgaggagtttgtcgtcatcaaacgcgaccctttgaagacgcagttcgtcgcccggctgaacgatttttatttccaattccagaaactcgccaacaactataatcagattgtaaaggctgtcaattcgcacttttccaacgttgctatcccgcatcagatcgccgcattggaacagcgaacgagggaattgaaagctcttagtatcgagattctgaaccttgcaaaacaagctgcggaatggttgcgaatataaggtcgggctcctcgcccggcggggctttgcactataacaaggaaaaggtcgataaggatgaagccgaggtgcttttctggcagaagatgctcgaaccgttcgataaacacggacgactggatgtcgatgcctgcatggagagtttctggccgtacctcgaagctaacagaagaacgaccaatacggttttccatgcttcgctgaatccctcgcccgaagacaagttgaccgacgatcagctccgggacatcgcgcaggaatacatggaacggatgggttacggcaaccagccttatatcgttttcaagcataaggacatttccagagagcatctccatctggtgtcgttgcgtgtcgatgagctgggacggaaaatcagcgattcgcacgaatacgaccgttctatgtccgtattgcgggaattagaacgcaaatacgatctgcatccgagtatcaaaggtcaggaacagacggacacccccgatcttcggaaagtaaactataaggcgggaaacgtcaagcaacaggtctcatccgtcgtcaggtcgtgcctgcggaattacaaatgctcgtcctacggtgagctccgcacgctgctggaattgttcaacatctcggttgaggaacgtacgggaacgatcgacgggcggaactatgccggagtaatctacggtgccctgaccgacgatggctatggaacaggcacacccatcaagtcaagcaaaatagggaaagatgtcggctataaagcccttcaaaggtattacgagaactcgaaaatgaaattgaaagaagacgggaaccttgctcggctgcgacagacagtccgggataccatgagcccgcacaacacacgggacgaattccggcaactgctcaaggcagacggtatcgacactattttccggatcaaccccgtgggaaggatttacggcgtaacgtttatcgaccacaatgcaggaatcgttgccaacgggtcggtactgggaaaagaattttcagcaaatgtcttcaatgaattgtatccggtactgaaaaacgacaaacagcttgcagagcagcaatactcggaacaaaaatacgagctgcgaaacctcacggcaaatccggtttcgggaattgtcgatacgatattggacttggccgatgtgcgggctttcgaggagcagcaaagaatccagcgacggcggagaaagaaataccggctttgattcgtgggcctgcggatgtctgtcttcgcaccgttattgtctgatgcttcgacttgaatcccgatgcccttaaagaggggcgtgtgccgaagtttccctcgctatgctcggacgatttccaacttccgggaagagctgtcttcgcggaagttcgaagatttctacggtacctgcgcaaggagaggggcttcgttttgcgtattgaatatttcttgtattcttatgagaaatttgagcattggaaaggttttcggctgtgccggcccgatagttaccggaaatattttttgagtacgaatccggatttgggttcttgagtttgtgtgtcgatatagacaataagcaggtacttgtgccatgtctcgacgacggtcacttgttgtccttgtttcacggtgtcgataatccgtgcgttcttcatggctgcatatctcaggggtgcgtcgattcgtgccgtgcgtatttttgctaggtatctgccggctatttggcctatctcctgttcccggatttcgagagtgctccggagttcggttcttactatgtcggcgatatcctcctttccgggcaccgtgaatgcgctgtatatcgtaagaattgcgcttgtaatgcctatcagttccatcagaaataccctgacgcgccggcatgttgttcgtgtcaggagtttcgttaattccgtgaggagggtttccctgaatgtgtcgaatgcgttatcatccgcagttgtgttttggctgccgtacatgtcgtccagtgtctccgcaacgatggaatttgtcgtccctacgatggctgcttcctgccatgtctgtgtgtaggagatgttttccaggaacgctgcggatgttccgcagagcgccgcattgaaaattccgaaagctgcttgctgccgggtatccattcgcagcagggcgttgttcagggcgatgtccagctgccgtgtgcttgccgctactgcggcgaactgttcctgccattgtctgtttacccggtttatgacggacagatatcgcctcatcggagctagcgggtcggataccgtcgagattcctttgaaaaggtttttccggtatgttttgagacgctccgttacctgaccggcggggttttcccgataaagacacaggccgccggagatttgatcccgcatctcccgcaccggactcaaggcagattgcacggcacccatcccggatagattccggattattctctgctgtctgcgcaatgcctcgaagagatcctgcaggttgtgtgtcctttccattcgtatcgtttgtgtatttgggtgtgtgttgacttcgtgtgtttgccgacgatctttgccgatccgtttcgcggtgcgtgtccggatgcttcggggcttgctgtaccgcctattttctgtatatgatctgtgtgagacagctttgcaggtcttcgtcgtgttcgagattgagtttgcggcgtatcctgctgcgcacgtttgtgatgtttgaagggctttttccgagctccttgacggtctgcgcgaggcttttacccttgagtatgcagatgcatacctctttttccgcgggtgtgagtccggggattttctcttcgagttttgcgagttcgattgtttttgcgcggatgttctccgtgattgcgtcggtgagtttctggcaggtttcggcgtcgaggagttcgagcagcgtctcggtctgctccatggtcagttctttctgccgggccagatgtatgaactccgtcagttggtctgtatccatgcggaagagttcgagcatggactgcctttcggttcggtatgcgttgttttcgacggatatgtcgcgtatggtttggttcatgcgtgcgcccatgactcccagaccgacgaatgcgatggcgtatgccggcagaaagtcgaatgggaatatctcagtcgcaaggaacgtacatagggcatatgtggcgatgcttgcgcctccgagcaggtagggtatgattctgtaatagcttgctatggatatcatcagcagcagggccagcaggaccatgtttccgattattacgaggtttgcagtgtgacttttgcttaccgcttcgtaaatcatctcgaaggatatttctgcctgagtgatgacgagaaacagcgccgtcaacttctcagtcgtcgccttctcggacaggaacaggagcatcagcacgagcagcagtccgagatgcagggcgtttatcgagtggtagaacgtggttctgggggctgcgtcgctgaagaagctccataagattccggccatatatccggcgcacgtatagaagaatatgtaacgtcgctggcgttccgcctgcgatgttgtttccgagaggttcagtttgtctatcatttcgtgatcggtatctgttgttcggacagtgcgttcaggttcgcagggggcgcttcgtcggtccgttccgtcctttcgggctcctgcatcagtgcgcgtaggcattccgcgaggttgtccttgggccccagtcccattttcctgcggatgttggagcgtattacggatacgttggacgggcttttgagcagctcgcgcgctatttcggggtgtgtcttgccttgcagcaccagacaagccaccttacgttccgtcgccgttagggagggaaggcgttcgtcgagcttgctgtaatcggtctgacggtgctgcatcaagtgcaggacgctctggcgtatgcggcgttccgtttcgtcgccgaggagtttgagcagctgttcggtctgtccgggcgtcaggtcccgttttcgcagcaagcgtatgaattggctgacttgtccgtcgtcgatgttgaagaggctgaacagcgaacgccgctccgcgaggtatctgcggttgtcgtgcattagggagcgtatttcttttattatatagtgttccatcagtgcgcagcttgcgaagagtgtgaaaatcagcaggaatgagtctttgagtgtggcttctccgctgagcagggccgccgttgcgtaggccgcggttcctgcggcggccgtcgtgtatgacagttgcgggttgtatgcgaacagggagagtacgagcaggaatcccagcagcagcgttccgcggaatacgatggcggctgtctcggtgtcgggcgttgctgccgctatcacggtttgtgcggctgttttcagcaggatgagcagcagcagggcggcgaaggctttgttgaccggagttttacggtaacggcagactgcggggagtgccgccgcaagaatgcacaggagcgctcccgtgacgacctcccgtgtgttgggagtatttattgcggcgattgtttcggccgccgaatagaccgatatggcgtatgcgctgtaatggaatacggctttttgcaggctttccagttttttggtcagtatctttttcatatttgttcttatatctgcttatatttcgctatatcagtattatatgacacttaatctttaggtttttaacatggcaaaaataataataattttaataatgtgactttttttagttctgaattttcctgaaaatgagacttggggctttttctttgtgttcgttaaatctatatttgtggcaccgaaaggaaaaatttcgtacagatgaatcggtttaaagatattgcgaacgtattactgcttccggatttctgctgctgccgaattccggggcgtatgacgtctgcggcattccggtcgcttgctgcgtgtgtttcgcacgtggtgcgcgtgtatgtgtacgtgtatttgtatttcaaatttcccccccccc

SEQ ID NO: 12096 - DNA, 4085 bp, Unknown
  gut microbiota DNA sequence
gagatatcgtttttgaaggctgaagcgtcttttcggcctctttcgtcgtgcttgccgccttttcgggcggcttgcgcgtgcttctccgttttcggacgtcgcggggcgtccggcggcggcatgctctccgcgaacgggtgctgtccttcgtgtggctcgttccggctttgtttgtaacggctgatcattcatagcgcttatacttgtttgttatgaggaaaaggatgttgaaatatatgaatagcactttgtctgctgtcggaacgacgaccgtcgtactgttgttgtcgtgtgcggtcttggtctcctgcatccgcgaggatacgggcgactgccccgtgccgcaccgtttcgattacgactggtgcaaccgtgtcgaggcggagagttgtctggggcagaaccacctgcgtctttacgacggcagcggtatctgcgatccgcacgattgtccgcaggagggtgcgctgctgtacctgaaacagcgtcattaccgtgtgctgacctataacgaccgattgcagggcgttgtttacagcgatctgcacgatatcgagcgggcccgtgctacggttaacgaggttcctacgcccgaacttatcggacgtgtggaggcattggcggccgaagaggcgtcggctgccgatgcatttcgcaccttgtggaatacgcgtgcggggggagagctcatcggtcaggcggagagtttcctctaccgggattccattcccggtgttacagtggatttccgccgtgagggccgttcgctgctggttcccgaacctgtgggctatgggattacgttccgcagccagatcaagggctggacggtttccgatgtgaaatccttggaactgaccctttcgggcgttgttccggaagttaagctcgtgtgcgggagccgcacggaaactccgaatcgcacggcgctgacccggaccgtgcgtgaagatgagcgttatctgtcgtacctctatgtctttggcctcgaccgcgcggaggttgtcctgcgagcctatatcgatcccgtctccgacggcgatagcccggtttatatcgagcgggacattacggatatcgtgaacaaggcgctcgacgaggccgagcagacgggcgatccccgcatcgagttcgagctggagctcgaaccgttggagttgaatatgaacgggctccagatgggccggatgcgggtcgtgggctgggacgaggttgacggcggcgatatgggcgtgtagggccgaaccccgtgcggggaatgcgatgtgacgaatgcagactgaaatgcagataatgaaacacaaacaacattttttaacccattttattaacaaattcttttttatgaaacaattttttgtattggcgtttgcagccgcagcgatggtaggttgcaacgagaatgaaaacagcggaaacgactccaaggtcgatttgagtcaggctcagcagctcaaggtgctgacgtcggtcagcaatacccgtacggccgttgatggcacggttctccccgtaggctcggctatcggcgttatggtaactgacgaagccggtactgccgacttcactccctcggctatcggcaacggcaatgccgacggcggttattactctagcggccgcaacatccgtttcgccaacaacgctggcgagaacagctgggtttcggtcaacacggaggacaagaccaaactgcttcttttcgcagccgacgagaagggtaaggttttcggctactatccctataccgatgatgccaacgtcctgggtatcggcgatgctacgacgatccccgtcaagatcctgaatatgggtaacatcatcgtgggcgacgatgagggccagggtacgctcgacggtgtggacagcaagaaagcctacactgccgaagacgagatcgacttcctctacaacacgcgcaacgacatcgtaggcgccaagacgaccacgacggccaaattggtgatgaatcacgcactttcgcgcgtatcgttccgtatgtacacctcggccgaggctcaggaggccgttcagggcgagaccgactcctactatcagttcgtgggctacacgatcaggaacaagaccaacaatctggaagaaggcgagttgcacgcgaacttcaagtattcggccgacgcgaatgctacccgcatgaacatccagacgggtgagatcaccggtactatcgccggcggcgagatcgcacgtacgatcgagggctacaagatggtaagatcgacggccgacgacgaaacgaacaacaagacggctgccgacgcttcgtatcgtgtcagcaacctgctcttcccgctggccaacattacggccgacgccaacaacaagtcggaaaacatcatggttgtcatctcgatccagcgtatgaacgcagacggtacggaggctgttgacccccaaagttacgctctgccgttcgacgttgcgacccacaccgcgtgggaagccggcaagaactacacctacacgattaagttcaccggtaactcgctttcgatcgagaccgtgaccgtaaccgactgggtagaggttgtcggtggcgacatggagatcgagtaacgccgaagattcgattatcagttaataaacatagtgtatccggggcaggcggaatcctgcctgcccctttttttcattttcgcggcccgatcggccgcacaggcccgccggaggtccggcacgggcgcaggatagcggggcttcggggccttcgatccgataaacagagacacggcgcgcggtttccgccgcaaggaaccgcacgggcggcctggcatcggggaaacgcccgttcagagaaagacaagacgaatacgagatatgccctcccgtgggggagggaacggagatcccggcggccggtgcggcgcgggatgccgaactccaaacgaacgatttatgaaacagtacaggatgcggaccgtgacggtcgcgatgacatatatgttcggggcagtgctgcttgcgggcggttgcacccgggaagagtccgccgcccccgcgggccgcgaggctgtgatactctccatcgccgaggccaactacggggctttgggcggcgcgcggaggaccgggacctctccggcggacggcggcacgccgcagacgcgggccatcgtcgacggcgggggttcgacgttcttcaccgacggcgaccggctggggctgttcctgcgcggcgacggttacgaggatgtggataaccgcatcgtgcagctcgactatccgggcgagggcccgcagaagaagtggaaaatcacgggggaggccattcccttgtatgccgatgcggcgaccgtgacggcttatttcccgtacagcgacgcctacggccttacgatgtccgccgtaccgctcaattcgggtccttacgacgtgaatacgaacgacgtggtgtggcagcgcgacacggtgcactcgacccatacgcaggccatgttcctcgaaatgcagcacgccatgacgcgcgtgaagatacgtctgaaccgggggacttcggacacgtccgattccggtgactatacgggcgagggcaagatcacgggcgtccggatcgccgacgccggggatgtcgccgcggacgatcgtgtcgtctacctcgacgggacgctcgacctgacgcaggcgacgccggtcgtcacgccgggctggccggacacggtggccgacaagagcgaaaagaccttgacggcggagggcgtgctctacgacctgctgctgttgccggtggataagatcgacgagggcaaggtgatgctcaacgtggtgatcgacgacaagttgctgtcggcgcctttccccgtcgatgcggtcgataagtgggaggcgggcaaggcttatacgtatgaggtggcggttcgcaacggagccgctcaggtggtcttcggcaaggcgacggtgacgccgtggaacgacggcgggagcatttcgggcgacctcgacacgtcgaagcccgaatacggcggcggcgacgtgcaggactggggcgacaacgagtgggagagcgaagaagggggtgacgaacctgtgacgggtgaaatcgcggatgcgagcctcgtccccccccc

SEQ ID NO: 12097 - DNA, 11603 bp, Unknown
  gut microbiota DNA sequence
gggctctgttcccgtacggatgtctgtcggcggcaatatcggtggattgctgcatgccgcctgctcgaacggagcggccacggttacttttactgttccggccaatacaattaaaaattcgcgtacggtaactttcgaatatctgtggaacggcacatggacgaaaatcggctcagactgcacgcagcagccgtgctattacgtctcttcggccgccgttacgccccgtggggatatcccggcagttggcggcacctacaccgttacactggagggctatggcagttttcagatccgggccgtcgacggcaacggcgtccaattaatcatttcgaccgaaaaaaatgcgtgctggaattattctgcaaatattaatatcccggagaataacgagtatgcttcgcgcgaagtgattatagagtatgggtccgccgagaattggacagaggttgcacggctaagccaagccttctacccggcatatatcacccggggtaggctgcaatacaatcaatgcgttgaaacatgtggatcggcggagcgaataattccgaacaccgatggattgcgatggaatgaccctaccgatctcaaacacaaaggtgttgcaatgctgtggcacccgagcgtcggcggaaagcattgcttcagcctgataaacagcgaatactccacttggacctatacgactgccgatgcctatcgattcagagatgggtattgcaggtgtgtgggagagtaatgtgaaatatgcctgaagcagagatcacgatagtaagttcgtaaaggaggggctatacccttcaccccatagggttgcatgcaatacccccgggggtgcgggagaaagggtggaaaagatgaagaacgattaagatgctgataatatgacgatttaccccttccctgaaacgggcggggaaaatgaaaggcaggtgccgggtctggggagcccggggcaagggacgataggacgaatgaagatatcgggagaagaaaaataaagataaaagatatatgtctcagttgttgaaatatgtttggattgcgctggccgtccttgcggccgggtgttccgagagcgacagggaggacggaaactctgtttccggcggtcttccgggggtgagcggagaggtttcggagggcatggtccccgcgaccctcgatctgagctcgaacggtcgtctgacatccgccgccggttcgcaggcggcgacacgcgctgcgagccccgacgagacggccgtgggggacctgtggatgttgcagttcgacacggaggcttcggccgagggttcgctcgtgcaccgcgcctacattcccgcgcaggagatcgtccagagcggaatggcagtcacggcttcggtcatgctgcgcgagagtgcgagctgcgtgatcgtcgtggtggccaacgcgcccgaatcgttcaccgtttcgacgcttcccgccggcacgaagctcaccgagctgcgcgcacgcacgttcgccgtgagctccacgaccggggcctcgctgccctcggatgcatcggtccgcctgccgatgttcggcgagaccgaacagatcgccgtgtcgctcgtcggttcccagtcggtgtcggtgaagctcacgcggctggtttcgcgtatgcgcctctcgctggtcaacagtttcacgagcggctatccgcttctggagctgacgggggtaacgctgcgcaacgctccgacgaagatcgcctacggtccgctgaccgagcatacggcctatctgggcgacgtttacccggaggcctcagccgacaatttccgcgattacgaccctgtcacgacgggacttgcggggtcggaaacctcttatctgtggtacatcgccccgaaccgccgcggcaagggcacggccacgaaagccgaagagaagagcgccctgacggctcccgaagggcagggcagctattgcacctatgtttcgatccggggcaaggtgttccatagcgccgcttcctccggccgcgacgtcgtctacaacgtctatctcggtgcgaacaatatcgacgattataatttgtgggccaatgcggcctacagcgcacggctgacggtcacgggtttcaacgacgaccagctggaggtgggctacgacggtttcggaatcacggtcggcccgctggaaggcatcgctgacaatacgatcacgggctggcatcccgacacggggttggattacatccccaaattcctctctttcacgcccgaacgcatcgacttcggggacgcggagtctcctgaggcacagaaggtcgcgttccgcatcaacagcaagtggcgtttcagctatacttcgggcgatcgtacgaaggtgatcgcctcgtcgagcgcggctgcgaatacggaccagacgggcggcggtcaggacgagcccgccgactgcgaggttacgttcacgccggtggtttacaaggcccaaagcggtacgcccgtggcgggtacgcgatataatgcggtggctacgttctccaccgtcggcggctccatcaccgccacacgcacgacgctgtttctgcgtacggtgccgactttctacggcgagccggcggtgtcgccctcgtcggggacgatcccccgtgccgggaaggagctcacggccacgctggcctcgaacgcccgctggagcttcgcggtcactccgggcagttcggtttctcagcaggccgacgtttacgctacgcgcagcctgaaggcgtccgttcctgccaacgaaacttggagcgaccgcacggtcaaggcggtggttcagtacggcgagagtacgaaggagtggagctatacccagccggggatgttcatctccggggttacgatctcgcccgacccttcggacggtattcccggcatcggggccacctatacggtcggcattacgggcgactgcggcatggtggctgtgcgggcggtcagcgacggcgaggagctcgcccgcgcgtacgcttcgttggacaagcctgccgagctgaaagtgccggtcaacggatctaacgccgaccgtaccgtcgtcttccagtatcaggagaacggcgtgtggaagaactttactcagggtaggcaggttccgggctatggcattacgggcgctgcggtcagcccggcgggtaatatccccgccctcggcgcccgctatacggtcacgctgaacggtctgcttcctccggagggcgtcggtatccgcgctgccgtggacggctcggccattgccacgggtcaggtcaccgcgagcggacggggcgttacgctgaacgttccggccaatgccgggacttcgaaccgcacggtgacgttcgaatactggtggttcgataagtggatcgccatcgacagccgcacgcagcttcccaaacccgacatcacgtctgccacggtcagccctgcgggggacatcccttacgctggcggcggctacacggtgactttgtccggggttcttcctgagggcggcgttcaggtgcgtgccttcgcgaatggagtgcttgcacaggcgacggttactgcgagtggtgcgggtgcggagttgacccttcccgccaatacgggtctttcgaaccgcacggtggcgttccaatacctgtggaacggcacgtggacgaatatcgaaaaccgcaaacagtggcccacgccccggattacgggtacgtcggtcaatcccaagggggatatcccgtatacgggtgaccgttacaccattacgctggatggcgcattgccgcaagagggtgtcgagatccgtgcgacctccggcggcgttcagctccccggcgcaacgggtcgggtgaccacggcgggtacgggcgtcacgctgacggttccgaccaactccggcagcacttcgcgcaatgtggtgttcgaatacaagtggaacggcgtgtggacgacgatggacgaccgtacgcagtggccgacacctgcggttacgcaggctacggtcagccctgcgggtaatatccccggtgagggcaagagctatacggtcacgatcagcggcgttatgccgcagggaggcattccggtccgcgcctataccggcggctcggccgtcgcttcggcgacggttacggccagcggcagcggcgttacgctgaacgttccggccaacaatagtacgacggcgaaccgcacggtggcgttccagtaccagctgaacggtacgtggatgaatatcgaaaaccgcacgcagcttcctaaacccaatatcacgtctgccacggtcagccctgcggggaacatcccttacggcggcggcacctacacggttaccctgaacgggcttcttcccgcgggcggcgttcaggttaaagctattggcaatggaacgtcaaccggattgattatgtcgtcggggcatggtgtcagcctgaatgtcccgcgaaacgacgacgctgcgacaaagacaataacgttccaatacctctggcaagggacatgggttacgatcgaacggaaaacgcaagaaaggggtagagtgcgcgtaatcgtttcagatcccatggaattcaacgagtgcgcctcgtggatcaggcaacaccgaggctacacgcttttcacccaacagaggttcgatccaaaggggctgttctggggcgaaccagggtgggacaccacgaataaatggatatggtgggatgagaagctaatctggtggttcagcgtcgctgacgagtatggcattggtttcagtggcacatacgatagatcatggataaaaaatgaactaccgagatgcgcgggttggaggatcgcggactaaaatctcatgacgactggaggcaaacactgaacagccggacccgctccgacatccctctcgtacccgccaccctatagggttgcacgcgcaaccctatggtcgcggaaaaaaaggtgaaaataacgatggataattaaggtgttgataataaatatattagctgccttaaggaacgaacgtaaaaataagaaatagcgaaaccggcctcctgcgtcggctgcggacgagcctaatgcgctgaggttcaggataaacgctctccgcgccccttgcgggagggatgggacgcggtagaaggatggacagataaagagaaaacgatagaaaagataggtgatgaagatgtcaggaaaaataacgggcttttgccttttgggtgtcgcggcgctggccgcggcggtcggcctgtcgctcgtgggttgcagcgaggactcccgttcatgctggagccccttcccgcgcgaggtggaagcgacgcttccctcgctcgcagtagccgaggcggtcgtggtggagcctatgggcagccgtgctgcgtgtgcgaatgaccgggtttcggagggggccgatgggctgttcacggtcagcctcggtccggagggcggtgcggacgctccgcggagccggttcgtggccacgcgtgccgacatgtcgctttcgaacgtctgggtgttgcagttcgacgcttcgggtgcgaccaaggcgtgctcttatgtgggtacggtggctgccgggcagagggtcaaggctgcgcttcagagcggcgagggctacacggtgtggatcgtggccaacggtcccgccgagggggtatttacgacttctaaccccgccacgcttgccgacttcgaaagcaagatgctgtatacggttacgcccgcctcggacgaattgatcccgctgagcggcaagctcacgaacgtcagggttctcgacaacggacagctgctcgtgggtgaagacaatacggtggccccggaggttacgctcacgcgggctatggccaaagtcgatctgttgctggagtataacgtcagcggagccgagctcgacggggtgtggctctatcaggttcccgtgggtgcctgctacgggctgaacccggaatcaaagggttatcccgcttcgggcgatgcttcgaacttccggtaccgcaatggcgaaagcagcggtctcgcgccggtgagttcgggcagcggcacggtgacccacacgtggtatgtgggcgacaaccggcggggtcaggttcccacgatcctgtgggagaagaacaagggctcgaacaacgcccctgcgatggctacctatgcgcgcatcaagtcgcacgagagtgcgaatacgaccaagggtctgtaccacgacgtttttctgggcgagaatgtcaccacggacttcgacgtgctgcgcaaccgtcattacatctaccgggtgcgcatcggagggtcgctcgacgaccagaagctgctggcgcagcgtgacgaccgggtttgggcgggttcgctggagtacatcgacggagctcccactgtcgacccgtcgctggacaaggagatccatccggacggccagacgttcagaatcctcttcaaaggctattggacgggtacgggcattcccgtgcgggccacggttggcgatgatgtgctcgacgagggggttgcggtctgctacgcgggcaacacgggcgaggttacgctcgaaataccgaagaacgaaagtgcggacaaacgtgagatcctcttcgagtacgagtggaagggcgagtggtttccgatcggtatcggcacgcagggcggctacggcgttacgggcggcaaggttgagcctgctggggatattcccggcgagggcggcgagtacagcatcaccctgtacggcagcttcccggcagagggcgtcaagatatatgctacctcggacggcaagagcctgatgagcggtacggtcttcaaggccgatacccccgtcaaattgaccgttcctgctaatgaaagctatgatgcgcgaacggtcgtcttccaatacgaatggaaaggcgaacggttcgatatcgaaacgaggacgcaggctgcgggctattctttcaccaacgccgcggtcacgcccgccggggatatccccggagagggtaagacttacagccttaccctgacaggactcttaccttccgatggcgtcgaagtccgcgcacagagcgggggtacggccctcgtgagcggtaaggtcaccgcttcgggacaggctgtctcgctggctgttcctggcaatatgagctataacacccgcacagtggtgttcgagtacctgtggaacggcacatggacgaagatcggggactcccgtacgcaggcgggttattccgtcaccgctgccacgcacaacgctccggctacgattccgggtcagggcggttcgtacaatgtcacgctcacgggcgtccttcccgccgcgggcgtcgatgtccgtgccagcagcggcggcacagcgctcgtcacgggcaaggtcaccgcttcgggtacggccgtctcgctgacgatcccgggtcagctcagctatgatacccgcaccgtgaccttcgaatacaactggaacgggacatggaccaagatcggcgctgactgcacgcagcagggctggcacgtgaccaatgccagcgtctcgcccgcgggggacattccgggtgcgggcggcacctacaccgtgacgcttacgggctggggcggctaccaggtccgcgctatgagcggcagcacacagctagttataaatacggactatacggaggtctcgaactattctgccacgcttaaaatccctgcaaacacctcaacggggtcaacccggagtgtgacattccagtaccgaatcaagggaacgtggaccgacatcgacactcgaacccagtcgcgtgatgtacagagcgttacttggcatgcttgtaacaccgagtgcgcttcgcgaggcgggataccgacccgcgacgaactaacgggttactcgtgggacgggtggccgaaaacggaagtgggtgcctactggtcaagcgaagtggtgcctgattctggtggctggtattattataccatcaattggaactcgacgacgcagtggtacatagcgggtaaccggccttatgggagctcggctggttgccgttgccgtaacgactaaaattgacggcccgaccgaactaaatgcctgttaggaccctgatcgatatcatcggttcatactcgctctttccgcaacccctgagggtatcgtgcgataccctcgggttgcgggagaaagggtgaaacggatgaggagtgattaaagtgttgataatatgactattaactggtttttgatgcggaccggaaaataaaaaaccgcgaaaaactccgctccgggttgcctgaatcggatgcaaggcgctgattttcaggataaccgatatccgccacccttgctggaaggggctctgagcggggcggaggtgccgggggaatgcagatacgagcaaaaaataagtaagaaagaacgatatatatgaaaagcgaagaaacgagaaacaggttgcgctccgggcttcgggccctcgggtcgggccgcgcggcgtcggctggggttgccgctctgcgtgccgcgtcggtcgccccgttgcgtgctgccacggctgcgctgctgctgggcgcagcgtcggtgctctggggatgttcgaaggagtccccggcgggcggtgcttccggggcgtgccccggcgaagcctccgatgtccgtgtgacgctgagcctcgcctccgacgggccgctgcatgcggtcgataaggacgcgacgggagcgcacggtgcggccgcgccgactccgggaacggcctccgaccctgtttgcgcagcgggtgcttccgccacgcgcggggttgtcaatccttcgatcgtcgatgagtgggctgtgtccgacctgtgggtgttgcagtacgacatgagcgggggcgcggcggggtcgctggccgcccggcgctacgtggcctccacggtgcaggacggggctacggtgcgcgtgacggccgacctcgaaccgatggagaaggcgcgcatcgtcgtcttggccaacgtccccggcatgttctccgagagcgaattgcccacgggttcgacgctcgcggacctcgctgcgctgacctatcccgtcaacgccgccagcggcagcgcgcttccggaggagtattcctctacgcttcccatgcgcggcgacagcggggaggatctgaagctcgaaacgggccagaccgcgacggtccgcattccgctctaccgtcttgtttcgaaggtgaacttcacggtcgacaacctctgctcggagggctggccgcggctgacgcttacggacatttcgctgcgcaacgtccccgcggcggggagctacgggcgcgtgacggccgctacgcatgcctcgacgcgctacccggcggccgcatccggtaatttcaaggactacgaggttctgagcgacggtctcggcacgcagtgcgagatgctgtggtatctggctcccaacagccgcggcacgggcattggtacgacgcctgccgacaagacggctgtcaacgctcctgtgggtcagggcgactactgcacctatgcctacgtgcagggcatgatggagcagagcgagggcgccccgctgatccccatgagctaccgcgtctatctgggagcgaactcttataacgattacaacgtgtgggccaacgaggcctaccgcatcaagctgacgatcagcaagctttccgcggaccccgccgagattggtcacgacggcttcaccgtcgagctgaccgccacggagggtttccacgacaacacggtcgaggggtgggagatcctggtcgacggagccacggtcgctcccgacccgtcgggcggcatcgactacaagagccggactttcacggtcacggtcttcggctccttctccgggacgctgcccgtgcggatcacctcgggcggcaccgtgctggcttcgggcaacgcctcggccgggacggctctgcagctcaccctgcctgagaacacctccgcgaacagccgcacggtgagcttcgagtacaaccccggcagctggaccacgatcaagagcggcgtgcaggcgggcaagcccgccgatagggtcgatgccggcgacgtttgggtggacacgaatcaccggagccgcatcgatttcaacgaagccacgagctattgttcaggcaagggcatgcgcctgccgtcgttgaacgagttgaaatacatccttgcgaaccgcaactcgttggggctttccgacctgacgaatccgtgcgcctactggagtaatcagcagaacggatcgcgttacgcctacggtgtcgaggtgtcggacagccgtacgacttactatcattggaagacggacaagcgctgcgccttgtgcgtcaaggacaaatagcgcctgccgggcgacgatgtcagaggataagacaatacgatgaaacatacacgatatagcgatatgataacgagctttcagaagatattcgggtgcttcggcatgcggcgctgcgccgcggcgcttgcgctggcgacggctgccgtcgtgggcagcggcgtcgcgggttgcagcaaggaggatacgcccgcgggcagccgcgtcggcgagacggtgctcgtgcgcctgccgggcgtgagcgtggctgcgcccgtggaggtcgttcccggcgcgtggggcgcctcggccggcggtgccgtgaaccgaggcatcgtgccgcaggacgctgcgccctgcgccgctgcgccggacgctgctccggacggcggcctcgcttcggccgatgatgccggggagctgttcagcgtgacgctgggggccctgccggccgcggatgcggcgacggagcgcgggaccgccggaacagccgggacagccggttccgccggaaccgccgccgctgggacctcctcagcccccgccacgcgtgccgatgcggaactcacgaacgtgtgggtgttccagttcgatgccgcgggccgcgcgttgcgttgcgagtacgtgggcgggctcggcgtcgggaaactgttggaggtgcatctcaacagcggcgaggagtttaccatcggcgtcgtggcgggcggccccgcctcggggctctcgactgagaccgtccccgaccttgcggccttccgcgaggggctgctcttcacctcgcccgtgacctcgttcgaggaggttccctatgccgggacgctcgccggggtgcgcgtgctcgtcaacggacaggtgcaggtgggcgactcgggcgccaatgtccctgtcatcacgctgcggcgctgcatggcgcaggtgacggtggctctgacgcataacgtcacggactatgcgctcgacggcgtggagctttacagcgtgcctgtcggtgcggccttcgctcccgaccggacggccgcggtctctcccgcggctgccgacgccaacttcggcttccgcgacaatgcggccgccggactggctccgcacgtgcagagcactgccggcggcacgggccgcagctatacatggtacatcgggcagaaccgccggggcagcggtacgggcatcgtgaaggtgcaggacaagaacgcctcgaaggccccggcctacgccacctatgcgcgggtcaagacgcacagcaccacggcggcggacgccccgctctactacgacatctacttgggcgaggatatgttctcggacttcaacgtcacggccaaccacgtctactcctatactacgcggatcgtaggctcggccgctgcgcacttctcgctgatcgacaccgacgggcgggt

SEQ ID NO: 12098 - DNA, 12348 bp, Unknown
  gut microbiota DNA sequence
gccgtccggggatatccccggagagggtaaggcttacagccttaccctgacaggtgtcctaccggaccaaggcgtcgagacgcgcgcgcagtgcggcggcacgacgctcgtgtcgggcacggttcgaccctcggataagactatcgaactgacggtgccgggcaatgagagctatgacgcccgcaccgtgtcgttcgagtataaatggaaagatgcatggttccgaatcggcggcgaccgttcgcaggccgggtacgccattgccgaggccgggcatactgctccggcgacggttcccggagcgggcgggacctacaccgtcacgctcaagggttggcgtccgggcaatcttcaggtgcgcgtgatgtccggttcgacgcaggtcgtggcgcctacggcctccacgaacgccccgaccgccggcgaccagaagacaacggtgacgattcctgccaatccggacgcacagcgaacattgacgttccagtattgcttcggcaaagacaataagtggtttgacatcgcttcggccgtcagccaggacgtgaacggcgtgcagtcggctacggtcagccccgatccgtcgtcgggtatctcggccgacggcgcgacgttcaccgtcacgcttaccgggaacctcggcagcgggatctcggttcaggcgcgcataagcggtcagaccacggctttggtttcggccacggccaccgtgtcgggtacgggcgttacgctcaccgttccaaccaacagttatcccaatgctgctcgtacgatcgtcttcggatatgtcgagggcggtgagttcaaggagatcaaacggggtacgcaagccaagggtgagaatatcaataccggtggtggcggtacggtcatcgagcccgatcccggccagaagatgacttggcagaatgccattaattattgcagcagcaagggcgatggttggcgtttgcccacgcagaatgagttgatgtactattggtgcgtcgagccctccattcctgccgacagtaagttctcggccggctactattggtcggcttctgagtacagcagcgatagcagcggcgcgtgggccgtgaatttcagcagtggctacacgttcggccgctccaaggcgggcagcgagtatgtgcgctgcgtcagggacgaatagcctgccgtgcggcaagggcgtaagcccccggccgcacggagggtgtcagctctttacctctttacctctttggccgccggagccgggctgtgggccgggctccgcgggccggggcaaggagactggagggcgaagaagtaagaagcgaagaaaaagataggtacgatataacggagaattgaaatatgacggttgaagagatcatagaacatgagggtcgcagcggccatttgtgcctgatgttgcagggaatgttcatgcgggcctacaacggttcggcccagacgcttgctcgcctgacaggctaccggctcaaacgacacagcctgtggagtgaagaacgcccggtatgctattgcggttttcccttcgcgcaattggagcgcgtcagcgcactcattaccgatgcgggcgggattctcgtaagccgcgggaatggctatgccgagttttcgggtctggacgtgtcgttcgacgcttccgccgcgctttcgctgcccttgcgggagccgcgcaggaaaaaggctgcgatgcccgcggatggcggcgagttggcgcggcgcatcgcggctttcgatctggctcgcgccacgccgctcgaggcgatgaatttcgtcggggagttgcagcggcaacttttcgcggcggaggtaaacgattaacggatacggacgatggccctttaccagacattgccggtctaccgcgacacctaccgcatgctcctgacgctgttccgcctgacgggtcatttcccgcgcgagtacaagtacaagctgggtcaggacctcaagcgcgacgccatgcggctggttcgccacatcttccgggccaacgccgaggtcgcacgtaggggcgagcatttgcggtcgttcgccgacgatttcgaactgattaggcttcaggtgcgcctgggatttgacctgaaactggtgagccataaacaatttgcggagataaccgaacagatggatacgataggcagacagataacgggttggcggcgcgcggcgccctgagcggtcacaacggaagggaacggggggtgttacggtgctccccggcgtgttccggattccggttacccggcagcggggttccctgggggcgagatgtccgacggggccgctgccacgaagtcctcttcccgcgcgggtggagggcgcttgaagcggtaactttttacggcgttctcggccggcaactattggtcggctactgagaacagcagcaatagcagcaacgcgtggaacgtgaatttcagcaatggcaacacgaacaacaacaacaagacgaacagcaactatgtgcgctgcgtcaggcaatccggcatccggtgccgtgtgtgccgtccccgttatttaaaaggatgagatgatatgatgacgttcgaggatttgatacaggcatataccgattgccgccgccacaagcgcagcgggcgggaggcgctcgccttcgaggtaggtctcgaagacaacctcatggcgttgtggcgcgagttgcgcgcggggacctaccgtcccggccgttcgcgctgcttcatcatcgggcgtccggtgcggcgcgaggtcttcgccgcggagttccgcgaccgggtcgtgcagcacttgttggtcaaccgcatcgaacccgtcctcgaccgggggatgatccacgactcctactcctgccgcaagggacggggtacgttgtacggcgtgcggcgcatccggcgctttattgcgcagtgttccgaggggtatacgcgcgactgctatgtgctcaagtgcgacctgcggggctttttcatgagcatcgaccgcgggcggctggccgacatgctcgagcgtacgctcgagcgggagtatgcgggcgacgataaggccgaggtgctggccctcacgcgtctgatcgcgctctacgatcccgttcccggggcccgggtcgccgggcccgtcgggggttggcggctgttgcctcccgacaagagcctcttcgccgtcagcgggcggccgatgcccgggggcgtgcgctccccgttccctgttccgcagggcggtaagggccttcccatcgggaacctcaccagccagttgttcgccaacttctacctgacgccgttcgaccactatgtcaagcatacgctcggcgtgcggtattacggccgctatgccgacgatttcgtgatcgtccatcccgaccgggagtacctcagggagctcgttccgttgctcgaacgcttcttgcgcgacgagttggggctgacactccatccgcgtaagcgctggttgcagcattacgccaggggcgtttcgtttctcggggtctttatccggcgcgatgcggttttcgccgggcgcaggaccaaggagggcctttaccgtacggtcggcaggtggaacgccctcgcgcaggagcgggcgttggagcggtgcgacctggaggctttccgcagttcggtcaactcgtattgggggctgatgcgccatcatagcagttatcgtctccggcggtgcagtgcggaacggttttgtcccgaattgacagccgtgaccggacaggtgggctaccggaaggttaccttgtccgacccacgcaggagagcgaaaaggaagcggaggaaagaaatctcaaggatagagtgcatgaaaataaatgcagacagatatgaaaagtaggatcgatatgaagaagatgattttggcggtcgttgccgccgttgcggttgccgggtcggccggggcccagagcggtgtccgttatccgtacgttaccagtgagaacggcggtgtcgtcgtcgtgttgcgcgacagtaagggtggtatagacgagtcttcgttgttttcgtcgcgggttaccgcgagcaagaccgggaatgaggcgagtgcggataatcgtatgtcgcgtaagttcagggttcagaagagcaatcccggccagaagacgtggtccgatgccatgtcgtattgtgacaaccttacggaggagggttattcggattggcgtttgccttctcagcgggagttgatgatgatctggcttttgggcggtagcagcaatgtcaccagcggcgataagaacgatacaggtgttggcagcgcctccaaaccggtcaatacgccttatttgtatcaacagtctggctttacggcgttctcggccggccactattggtcggcttctgagtacagcagcaggagcggctacgcgtggtacttgtatttcagcgatggctactcgaccagcaacaccaagacgacggccagcgcgtatgtgcgctgcgtcagggacgaatagcctgccgtgcggcaagggcgcaagcccccggccgcacggagggcgtcagctctttatctctttacctctttggccgccggagccgggctgtgggccgggctccgcgggccggggcgataaccgccgcagaaaatgaaaaccaaaaaaatgaagaataacgatatggaaaagagaagatcgtcggttgcgatcggcagcggcggatcgctgcggggcgcggcgtgtcggtggctgcgcgcggcgttgtgctgtgcggcgctggtgctgtgcggcgctggtgctgtgcgcatcccgtgcggaagcccaaaaactggccgtgaaggccaacgcgctgagctggctcacgaccacgccgcaggcggaggtcgagggggccgtgggggcgcactggacggtgggactggcgggttcgtggaacccgtggacgttcggcgggaacaagaagttcaagcattgggaggtgcggcccgggggccgttactggctgtgggagacgttcaacggccacttcttcggcctgaacgccgagtatgcgcagtacaacgtcgggggcatgaaggcgacgcctttcggcctgatgttctccgacgcggacgagaagcgttacgagggatcgttcttcggcgcgggggtctcgtacggctacagttggatgctttcgccgcgctggagcatcgaagccgaggcaggcttcggctaccgatacgtcaactaccgcagttacgactgcgtgacgtgcgggcgtccgaccatcgacggcgacccgcagcagcacaagagttatttcggaccgacgcgtgtggccgtatcgctgattttcatgattaaataggagcgttctgcggggccgcggggagtcccggaacgggagccgtgaagaaaaaagtaaactggatatatatgaacaggttaatgaactacattcggttggggttggtggtcgttgctgcgggttgctccggggggccgtcggaaaatgacggtccggtttcggagcccgctccggcgcatccggcgcagcttcgggttcagactgcggtgaagacgcgttcggcggtggacggcacggttttgccccggggttcagccatcggggtcgtggtgacgaccgaagagggtagcggctggttcacgccgtcggcgacctccggcagcggatcagccgacgggggttactattctgacggcaggaacgtccgtttcgtcaacgagaccggcgagaacacctggacgtcgaccacggcggatggcaagacccgactgcttctcttttcgggttcggaacgggggcgggtctacggttactatccgtggaccgatgacgccgatatccggggcgagggctcctcggccacggttccggtcgggattctgaatgagggcgcgatcgtcgtggacgctgcgggtgcgacagccggaaccgcctgcaccgccgccgatgaaatcgactatatgtacagttcgcatcgcgacgtggtaggtgccggcacgaccactacggcccggctcgtgatggagcacgtgctcgctcggatttcgttccgcatgtacgcttcgtccgggtcgcaggctgccgtcgagggcgatgcggagtcttactacgagttcgcgggctatacgctcaagaaccgcaacggttcggaggagctcgtggccaatttcgatgaaaatacgcgtctgtcggttgccacgggcgagattacgggggccgtttccgggggccagatcgtccgccggatcgagggctgccgcctggaacgttcgaagggggacacacccgaggatgacggagccgctgcggctgcttcggcgcgtgtgggcaacctgtgtttcccgctggcggcgatcggccacgacggcgggaaatcgaccggcatcgagatcgtattcgaggtgcgtcgcatgaatggcgacggaacggtcgcttcgggtgctgcggcctacgccctgccgctggcggtcgttccgggcgagagcgacaagtgggaagcgggcaaacactatacctacacggtgaaattcacgggcagttcgctgtccgtagagagcgtcacggtcacccggtggaacgaggtggccggcggcgatatgaatatcggcgaggacccgtatgtgagctccgcggaggtttcgccggagggggatatccccggtctgggcggtgcctacggcatcaccctggagggactgctatccatccacggcacggaagtccgcgcccgcgtcgacggccaggaagagaccctcgcggagggtctggtcgccgagtcaggcgagaccgtcgagttgacgattccggccaatgcgagctatgatgcccgcacggttgttttcgaatataagttgaacgacacgtgggtgaagatcgccgaatgttcgcagggcggttattcggttgtcgagacgactggacctttgatagtgtccggtggtgaaggtacgtattcttttacgcttacggggtacttgccgtcggagggtgttgagatccgcgcgatctccgacggagagacgctcgcgaagggtcgggttacggctttggatgcttccgggtcgctggcccttccggccaatatgacgggtcaaatccgcttcatagacttcgaatacaaatggaagacaagttgggtaaaattcgattcgaatatacagcgtgtgcttgatgtcgggcatttgtacggcggaggtgttgtttattgggtcaatcccagcaatgcgaaggatttccgcgttgtggcgatggattatactactaagttgaagtgggccgccaacagcaattatgttttgggttccggggctcagagcgagacagcgcgcaatggggccagtttgtggaaaatagctaaaagttattcggacaataagactggcggtgcttcgggtaatttcgctacggattttcccgcgtttgcctattgctataacaagaccgatgggggtgttgcgaagggtacgtggtacctgccgtcgttgcaggagttgaaggaattggatgctgtcgtagataagatcaaatatccattgtcctctaacgacgctatgaacatagttggcgtcgctcattgggcggctaccgagaggagcggcaataccagttacgcgatggtcgagaggatgttacatctggaacagtcttattataataagacgttaacaaactatacacgttgcgtaagaagcaaatagcccgtcgtggggcgggggcttcggctccctgccgcacgcgggacggggcataaagagataacgagatatgatgaaacgaaataaagatacgaatatgaaaacacggtttaccatggctgcctgcctttgcgtggcggcgttcgccgtggcgggcgctctttcgctgacgggctgtgtcaaggaagacgcaggcatgtgcggttcggacggcggttccgctgctcccgacggagccgttacggttggctggcaggccggcaggcttacggtcgccggagcgtccgacgataacggctggaacgccatgggcgctaagggcgtttcttcgctttcgcgctctgcgggagcttccacgcgttcgggccttccccctgcggggatggtcgatggtgcgttccagatcggtgacctgtgggttgacggcaaccgcggcaaaggcgtggagaaggagatgacgtggccggaggccacgcaatactgcgcggatctgggtcttcgccttccgacctatgacgagatgcagcagatcatccagtatgtccgggccaattcgccgctgcccgacaaccggaagttcgagttctggaacttcacatgggaggaaccgagctatcgttactggacctcgacgccccgcgtcgataatcccgattatatttggcatgggcttatcgactacgcccataatctttggaacatggacggttggtctgccgacgacggggaagaactctccgctcgttgtgttaaccgcgacgaaggggggcttcctcccggtcccgatccggggccggatgtcgataatcccgacggtcttcccgtgggcacgacgttccgcgtggtggtctacgaggccggcgccgacccgcagagcgccagcccggtggatcagaacacttacaagatcgccgacgccgatggcacgatcgtggccgcggctgtcgatgagcgtggcaatgccacggcggacgctgcgcgggagctggtgctccgccgcggggcgtacgatttctactatttctccccggccgtttcggcgaacaccgcgcttccgaatccgggtacctatacgggtcttgcgaacggtgccgactacatggcgctggcgcaccgggagacgatcgacccctcgaaagggtcgaagcactatattcccgaggtgtgcttctaccgcatgggctcgtacatcgacgtgcggatccgtccgcgtgcgggcgaggtcgtgaggacgctggaggtcacgggcgacggtttgcagctgtggggcctgcccgcttcgggccgttacgagatcggcgactatccctaccgtctcatcaccgagggccgcggcggcatggtggagttcgctgcttcggatttcgcggcagaggagggcacgacggccacggcgtcgacgctcggtgtgggcggcggtcgcgccgtgctgccgggatatgccggagagctgcaagtcaaggtgacgctaacgagcgagggcaaggagatgaagctcgacgcctcgcttgcggggcacaacttcgcgccgggctaccgctatgtcgtggagctgggcgttggtcgcatcgccgacaaccccgaactggacatcgagatccttccgtggaacgaatacgactggggcgacggcggtatcggcgggggaggatatctcccgatcgacacgggcggcagcacgctgctcgaacccgaactggaggagctgggtacatggcagcaggctgtcgactactgccggggcaagggcgacaactggcgtctgcccacggcgaacgagttgtattattactggtgcgtcgaacccagcgtgcgcgtactcgacccgtttatggaggcgaattactggtcgtcgacgaccaatgcgtcgaatgcggatcaggcatggacgttcgatttcggctacggcatagcgtataaaaaagaaaagctgacgcggaattatgtgcgatgcgtccgggacaaagagtccggtgcgggcacgaagtatccgtatgtcaaggccgagggcgatgctaccctcgtcgtgcttcgcgacgctgcgggcggtctggacaggaactctctgttcgcttcgcggcctacggccacgctgatcgacactaagcgtagcgggaacaaccgcatgtcggcgatgcttcaggtgcagcgtgccgatcccggctttctgaactggcgtccgtcgatcgactattgcgacaatcttcgcgaggaaggctatgatgactggcgtcttccctcccagcgtgagctgatgatgatatggaccatgggcggcaatgaacatgtcgagtcgctcgacatcgataactcgtcggacagcccggtacaaagaccggtcggcaatgcgcggctgcacagtctcgccggctttaccgtacttcccgacaacgtgctcttcagtgcgacatgggatgaggatgatccggataattatcctgacatcactgcgatcttgcgaatttcgggtacggacgggcgtgtcaataccgatgccatcgacggggatcatccgcggtccttccgatgcgtgcgtgactggaacgggtcggcgcctgactatacggtctcggaaaatgccgtgatgccggccggggatatccccggtgagggtaagacttacagccttaccctgataggaaacataccttactctggcgtggatgtccgcgcccagtccggcaatacggccctcgtaagcggtacggtcaccaaatccggcacggcggtttcgctggccgtcccggcgaaccagagcttcgatgcgcgcacggtgacgttcgagtacttgtggaacggcacatggacgaagatcggcgatagccgttcgcaggcgggttattccgtctccaatgccacgcacaacgctcctgcgacgatccccggtcagggcggttcatacaatgtcacgctcacgggctaccttcctgcagcgggcgtcgatgtccgggccagcagcggcggcacagcgctcgtcacgggcaaggtcaccgcttcgggtaccgccgtctcgctgacgatcccgggtcagctcagctatgatacccgcaccgtgaccttcgaatacaactggaacgggacatggaccaagatcggcgctgactgcactcagcagggctggcacgtgaccaaagccagcgtctcgcccgcgggctacatcccggtcgcaggcggcacctacaccgtgaccttggagggctggggcggctaccagatccgggcgatgagtggcagcgcgcagttggtcataaacaccaacgcacccggcaacagcgcagactattcggcatctattacaataccagccaacccctccgctgcaactcggagcgtgacgttccagtactttctgaacggtacatggcggactatcgaaagccggacacaagatttagaccagtccaacggcatttcttgggagacctgccaagatcgttgcgttgctctggggagaagcttactgacccgaaatgagatgctggaagctagttgggacgggtggccgctgtacagggggagcgttccgctggtttactggtcggaactcgattcggaagacggcgcatggaactatgagccagccggcggtcaatttttggtgtatccaacgtttgtcatcgacaccacgatgcgatgccgatgcacgaacgaataaaactgacggcccgaccaaaataaatgcctgttaggaccctgatcaaatcatcggttcatactcgctctttccgcaacccctgagggtatcgcgcgataccctcgggttgcgggagaaagggtgaaacggatgaagaatgattaaagtgttgataatatgactattaactggtttttgatgcggatcggtaaataaaaaaccgcgaaaaactccgctccgggttgcctgaatcggatgcaaggcgctgattttcaggataaccgatatcctccacccttgcgggacggggctctgagcggggcggagggtgccggggcaatgcagatacgagcaaaaataaaataagaaacgatcgagaaaatgaaaagcgaagagacgaatcacgggctgcggtttgtgcgcacggtccggggggtgttcctcggtgttgcggcgctggtgctgttcgcaccccgcgcggatgcccagaagttggccgtgaaggccaacgcgctgagttggttcacgaccacgcctcaggcggaggtcgagggggccgtgggggctcgctggacggtgggtcttgcgggttcgtggaacccgtggaagttcggcgataacaagaagttcaagcattgggagctgcgcccgatgggccgttactggctgtgggaggcgttcaacggccactttttcggcctgagcggcgagtacgggcagtacaacgtcgggggcatgcgggccacgcctttcggcctgatgttctccgacacggacaggaagcgctacgagggttcgttcgtcggcgcgggtctgagctacggtttcagctggatgctttcgccgcgttggagcatcgaggccgagggtgctttcggctatcgttacgtcacttaccgcagttacgactgcgtgacgtgcgggcgtccgaccatcgagggcgatcccaagcagcacaagagttatttcggccccacgcggctggccgtatcggtgattttcatgattaaatagataaatgacaatgaaactggctgttctgtttctgtgcgccggattgacggcgccgatcgtacccgtcgagggtcagaat

SEQ ID NO: 12099 - DNA, 10984 bp, Unknown
  gut microbiota DNA sequence
acaatgaaactggctgttctgtttctgtgcgccggattgacggcgccgatcgtacccgtcgagggtcagaatgccgacggcatccgcacggattccgtgcgggtcgtcgcttcgggggcgagtgtcgggattcgttttcggatggaggtgccccgcagctgcatccgttccaactatacgctgcgctatacgccggtgctgttcggcggcggccgtgaggagaagctgctgcccattgcgttcacggggggccgcaaacgtctctcggaccggcgcaagtcggtcgtcgatggcgtggctctccccgccgagctggaaggtcatgccgggacggtcgtctatgagacgagcgtaccctatgcgcggtggatgtccgaggggccgctggggctctccgtcgaccgccgtctcgaaggctatacgagccgcagggagctggacggattcgaacttttggaggatatccgcatccggcatccgtggtcgatctacactccggctttggccgtggccgatacggcgtctctggtcgggagcgggcttctgatggcccgcgcccggaggtgtgccaacgacggccgctacgccgaggccgtggagatgctcgcgccgctcgcgggggacgcggatgccgacgccctgacgggtgtctggcgcatggcgcaggacagcgcggtgcgcaccgcgctcttcccgctgatcgggttggaggccgagggcggacgttatgcactgcaccttccggccgtctcgaaggccgaggtgcggagccggacggccgatacgctgcgcgccggtgttcggttcggcgtgaagggtacgcgtctcgacgtgttgcccgacacggtttccgcggcgctggaccgtatggccgtgctgatcgcggagcatgctgcggcgggcggtcctcttcccgaaatcgtcgtctgcggcgtttcgtcgccggagggttcctccggacgcaacggccgtctggcctcggagcgcgccgcttacgtactctcgtgtttgcgcgaggcctgtctccgccggggcgtttctctggccgacagtctggtgcgcgtcgaaatccgggcctccgactggtccggactgcgtgccctcgtggaggcgtcggatgacatgaaataccgccgccagacgatggaactgctggacacgacgcccgccgaaaagcgtatggatgcgctgtgggggctcaaatggggcgttccgtacacgtatgttcagcggtatcttctgccccgtctgcggagcgcctcgatcgtcgtgtcgggcggtggagctgcgctgggcgacgatgccggagaggcgatcgccgctgcggtgcgtaagatcgctgcgggcgactatgccggggcgctttcgctgctggagccttgggccggggacccgcgtgcggcgctgccgcttgccgtgagccgtgcgctgacgggcgacgcggacgctgccgtgcggtatgtggaaggttcggggcgatgaagacgctgtggctgcggatcgcggagcgcgtggagcgggccttttacggcgagcgggatcattatgttcccggcgatgacgggatgtacgtgatgaagtatatcgctccgaagcaggaaaacctctcgcggcgctccgctcggaaatcccgccgcaagagctatgtaaacgaatgataatatgatacctatggacaagagaaaagttttcggaggcagcttgtgtgcggttctccttttggttggcggtgtgtggacggtccgggggcaggtgggcgccgggatcacggtggagtatccgcatgtcgagcatccgcatctgacggccgagggcggcaatgtgcgggtgaagttccggatggttattcctgcacggaatattcagcagaacaagaccattgagatggttcctgtgctggccaaccgggacggggagtctttgatgaccccgataatggtgacgggccgccgcaaggacctgtcggatttgcgcaagcgcgtgctttcgggaacgaatatggccgtcatgatgcacgtcgtcaagggtcaggcgggcgtgctggactataacgtcagcattccctatgaggcgtggatgtccggcggcgatctcaaactctatctggaccagtccaagatcggttaccacaagagtctctttctgggccgcattccgctgcttatggcggccgcggatgcgaacgggtcggcgggtctgagcgtggagaacgtggagcagctcacggcggcggccgaacagccggcgcctgccgtcggagacgcagggcgtattgcggatgatttctattcgcggttgtcggcgttgctgtcggcgaacgattgggcggggatccggtcgttgctggagcattccgggggctcggaactgaacgggctgcgaacgttgttcggcgagggggcgttccgggagctgctgggccgcgatttctttctctcggcggacagcacgggcgtgcgggtccgcatggctccttttgaggagcagctcagtgcgtcgcgggcgttgtcgcttcgcgagacgttcatggcggatcgtgcgcagtatgagcgcgacagtctgggttttgcggacgatgccacggggctttcggtctatttcaaagccggttatcggacgatcgatcccgtctacggagataatggagcgactctggaccggattctggcggccatcgggaccattcagcgcgatccgcgctctcggttgctgtgcatacgcattgtagggcaggcttcgccggaaggcagtggtcccgtcaacgaggtcctctcgctgaaacgcggggaggctctcagggattacttgcagagccgcagcgacgtttccgcctcctgtttcgatgtcaggtcccgcggagcagcgtgggccgcacttcggaagctggtggaggaggacgctgcggtgccgcaccgggaagaggtgctggatgtcatcgaccatacgcccgtgtgggattctcggcgtcagctcggccgcatgagcgccctgtggcggatcgacggggagcgtgcttactggtatatgtatcggaatctgttcccgaaactgcgtaacgcctcctatgtcaagctctatttcgacgatgacgccgaccggaatttcgtcgtgatcggtcgcgcttcggaactgatcgccgcgggcgattacgccggtgcgctggctgttctggagcccgttcgggacgatcttcgggcgttgccggcgctggccgtatgttcggcgatgacgggcgacgcggcggcggcccgggagtacctgcgcaaggtgggtaccgccgctgcgggtgatcccgacgggcggccgtccgggtgcgacgaaacgaacgaggtggaacaagcgaaaaaataaaagccgtgaaaaatctatctatctatctatctatctatctatcgtgtatattatcaaacatataattaatgccggtcttatgggcgcttcggcgttggccgtggcggtcggcctgttgcttgcgggtcgctcgaaggggtcggacagggagaacgcttccgttcccggcggcggttcggatgagccggtccgttcgggtcatttgaaggttcagacctcggtgctgacgcgctcggcggtggacggcacggtgttgcctcaaggctcggccatcggtgtcgtggttacgactacggacggcaacgcttttttcacgccttcggcgacaacgggcggctctgccgacgagagttactatcccgacggacgcaacgtgcgcttttgtaacgagaccggtgtgaacatatggacctcgaccacggccgagggtaagccccggctgctgcttttcacgggcgaggaccgggggcgggtctatggctactatccgtggaccgatgacgccgatatcgaaggcgagggttcctcggccacgattcccgtggggatattgaacgagggtacgattgccgtggccgctgcggacggtacgacggataagcccgcctatactgctgccggggagaaggattacatgtactcttcccgcaacgacgaggttggcgctcgatcttccaccacggcccgcctcgttatggagcacgtgctttcgcgcgtgtcgttccgaatgaatatacaagcataaaacaagacagaaacgagatctatgaaaagcaagaaaacgaatcgcgtatcgcacttccgggccttcggtccggggactgcggcggtgttgctgggtgtgctgctgtgcgcctcgtgcggaggtgcggcttcttcccgtcgtcaggcggataccgtttccgcccctgcggagcgtcgttactcccttccgttggttccgggagttatcgccgaaccttcggagcgtgccgagtatgtgctcgaccgctattggaacaagttcgacttccgcgatacgacgtggctggccgacacggccgctttcgagcagacgttcgccaattacatgggtgtagccgggatggttccccgtgatcgcgcggctgcttccctgcgggaccttttcgctgcggcctccgtcgaaccctcgatgtatcgccgtttcgcggaggtcgcggaactctatctttatgaacccaattccccgatgcgcgacgaggagctttatgaaagcgtgctccttgtcctgctcgattctcaggtgttggacgaggatgagaaggttcggcctcgccatcagttgtggatgtgttcgaagaacaaggttggttcgcgcgccgcggatatccgctaccggactccttcgggggctaccggaaaactttatggccttacggttccttacgtcattctctttttccatgatccggattgcgggatgtgccgtgaggttgcgatgcgcatggacgcttctccggccatccggaaactgatcgacgcggggcgtctggtcgtgctgtgcatctatgcggacgaggacgagcaggcgtggcgcagccatgtcgcgcagatgcccctgcagggttggatttatggctgggacaaatggcagacgctacgtacgcaggagagctacgatctgcgtgccactcctacgctttacctgctgggacctcgtcaggaggtgttggtcaaaaacggcgttttccctgccatcgagcagatgtgcgtggagttggataatcccgtaacgaacgaatgaagatgaatataggggaatatatcatgctcctgtggcagtgttgcgtccgtttgtgcgggggcggttacgacccttcctgctggggttgcgttccttttccggatggccgcgattcgagtgcggaggttgcgtcgcttcgccgttgcggggtcgcgccggagcgcatctatgtcggcggggacttccggcatgtcctctcctgctgccgtgagaacgatacgctgctggtcttccttccggcggaggccgccgggcaccgggatttgctgtgcgaactgctgctggaggcttcgcgccggaaggtcaatttccgggccgtaggggcctatagattcgagatctgccatgatgagcacttgctgtgcgactacttgttgttgcatacgctgctggaagagttgtatgtgcaggctgcgcagaaaggggtttccggcgctccgaaatgccggctcaaatgctgattttgcaaacgaattttgtcatgaagaaatttattctgttttttttgctggctttcgccagtctgccggtccatgctttcgctgcggaacccgcggccctttcggccgaccgtacggagcatgatttcggcgatgtgaagttgggtgaaacgcgtaaggctaccttcacgctgacctcgtcggccgatgtcgtcgtcattctttcggcctcgacgaattgcgagtgtacgaaggcgtcgtggggccgcaagccgttgcacaagggcgataaatccacggtcgaggtgtcgtacgaagcccgtgagaagggctttttccgcaagaatatcacgatacggtatacgaccggaggcgctgcctcgacgcttcggctgacggttacgggtaatgttccctgacggcgagtcgtgaattggccgtattacgaagccgttctccgggggcggccgtggcgtggcaaggacgctgatataataggcttggaaagtattggcggcctccggggatggctttcccgcgtgcctttcgggtgcggcggggaatgtttgacaggaaatatcatggatttgttactggataaaaatgaattgatatgggcggcaggtttgtcgctggctctggtgtatttcgttgcgacctatgtacgtcttcggtattgtgaacgtcatgtcacggaatacgggcgtctgatccttcagacctatgggcgcgatatgcatgtggttccggagtccgtcctgcgctattaccggcaggatgtcggggcgtaccgcagtgcgaggcggtggtatccgtttgcttttctccgttcgggggcgggcttgctgtcggttccggcagttgtgcgggcttccggggtggggtttccgaagcgccggcgtcccgtgtttgggcgcatagtccatcctgccgccgggctgaaacgctattgttatgcttggagcatgaggttcaacgaggcttccggtgatgaacttcgctatgaaaaggatttggaccggttgcatcgggacgaatatctgaggatgctgaatgaaaaataaatgctgcatgacgcagcgatgtgataatccaattttaataaaagaaaaaagctatgaacaaaactgaactgattgatgttacggccctgaaaagcgggctgagccggacggatgctgccaaggctgtgaatgcgatgttggagactgtcaccgaaaggcttcaggccggtgaggcggtgcagattctcggcttcggctcctttctgatccgggagcgcaaggcccgtaccggccgcaatccttttacgggcgcgaagatggatatcgcagcccgcaaggtcgtgaaattcacggcaggcaacgccttgaaattgtagtccgtccgtaactattgcagagtaaagggctgtggcgccgggaaccgtgacggaggacgaagatattgcgcggacgctggcgacgatttgccgtcggcttcggcagcttcgtcttgcccgcggtctcacggtgcagcaggctgcgtggcgctgcggcgtcgagcgttcgaatctgagccgtctcgaagccggccgcacgaacgtttcggtgcgtatgctttgccggctttgcaaagcgttggatacggatatctggacgctgttcgacaggcgggacgacgctgttcccgactcgtagaatctgttctttcgaatgtcatggcagcttgctgctgtcggtgtgggaattcatagaagagctttaccgttagcgtgggctgccagctttcgggagggactgttttggcgtatgatgccggaatggcgtttcgtgccggactttgttaggaagtgagagataaatgatgataacgatgcgaataatgactggttttatatctgatgaatttttttattccgattcgggagattatgcggatatcggcctttactcgtccgagttccggtttctgggtctgctgctactgattttcctcgtggggtgtgccgtcgcaggtttcgtgatgctgcgcaggcagtggcagcgtacgcgtttgcaggatcctcgtaaggatcattaccgtcgggtgcgatgaagcgtttgtgcggatattttttgcggacgctgcttgttgcggtggtgtgcgttcctttgatcgttgccttcgtgttttcgggcgtgttctatgtgttttctaccgggccgaaacgacttgttgaaacggactgaaaattctgtgttatgtacgacctcgattatgatgctgccatgcttgaactgctgcggatgttcctgacgtttctgtcgggacttgtccttgcgtcgtgtatggtgattttgacttggtatttgcttctcagagcgtttttgcgctcttttccggtcgatgccgcaagacctcggcggcaggtccggtcttcggaaatcccggcccgacaaaggctctttgtcgttacaaggagggcgtagcgggccgggtttttccggagtgtttgcgagactgcattcgggctgttgaaccggattttacaatgattttttatacatgaaaaagttactttgattttttaattatcacgaacaactttgtatgaaaacaagtttcaggattatgaccttgctcgtgagcgttattactcttgcgagctgcgataagggctgtacgggcgatcccgatgcgccctcggtaagcgcacaggcgcaggccgccctgctggccaaataccccgcggcctcgaacgtccgctggcagaccaaaggtggctatgtggtggccgatttctcgcttgccggcacccgcgtcggcgcgcagcatgggggcagcgacctttcggcatggtttgacaacggtggagagtggtatatgacccagacggatataccgttcacgatgcttcccgaagccgtccgtacggcatttgccgctaccgagtacgccgctgctccgtggagtgtcgacgacgtggatatgctcgaacgcgagggtgtggagaccgtctacgtcatcgaggtggaaaaatacgataacgggcgcgaaaccgaaatagacctctattactccgttgacggtgtgctggtcaggaaaatcgccgacgctgctcccgactacgattacggggattatatcccgtcgaaacccgtaacgggtatcggggaatatattcgcacgcattatccgaacgcccgcatcacggatatcgattacgaaaagggcatgaccgaggtggatatcgtcgacggtcgtacgccgcgtgagcttctcttcgacggcagcggggtatggcagtacaccaagaccgaggttcgccttaacgaggttcccgaaacggtgattgcggcgcttcgcagcagcgactacgcctcgtaccgcatcgacgatatcgaccattaccggactcccgaaaaggagttctggcgcttcgagttggagtcggcccgcggcgatgtgaaggtggacatctccacggacggcacactgacgctcaaacagcccggcagcaatgcgggcggcagcctcggacaggacggcggggcgatggtctctcccgacatctccgacttccttgccgcgaaatatcccggttcgacgatcgtcgagtgcgattacgacgacggcctcttggaggtcgaaatctggcatgacggccgcgaaaagaatgtctatttcaacggtcggaacgcttgggtctataccgagtgggacattcggcgcggggagcttcctgcgaccgtcacgacggctctcgcctcgtcgcagtgggcggcgttcgagatcgacgatttggaatatgtccagactccggaccttgaatactacctcatggaactcgaacgcggcgatcgggaggtcgagcttcgcattacccccgccggaatgattctttaattgctctaaaccatgaaaaggataacgaatacgaccgttcttacggcattgttttctcttcttctgggattgtccgcctgtgacgacgaggagcgcatctcctacggcaggctgcctgccgccgcacgtacattcatcgagacctactttccgaccgaaagctgcgtgtatgccgagcgggaccgcgacgacggacaccgcgagtatgaggtacgcctgtcgaacggcgccgaaatcaaattcgacgcgcagggacagtggttcgaggtggactgtaagttttcactgctgcccgcgggtatcgttcctcagaccatcgccgcagatatcgccgcgcgctatcccggcgccggcgcctataaggtcgaacgtgcgatgggcggctacgagatttccatcggcagcggggtggagttgatctattcggccgccggaaccttcgtgcgtgaggaacgctactgatgcttaggaacgctccgcgtgtaaaacgttttcgcgcctgatgcgcttacgcgcggagtttccctctctctttccgatgaacgccttcatcgaacctgcttgaattgatagctatgaacctgaaaaatttgaagatgaaacattatgcgatgatgctggccgcgctggtcgccggggtgctgctctttaccgagtgcgcctcgatgcgcatcccttaccggcgtctgcctgccggggcgaaagcctttatcgggacctacttcccgaccgagagctgcgtctatgccgagcgggaccgcgatgacggacgccgcgagtatgaagtgaagctgtctaacggcacggacatcgacttccacgcttcgggcgattggaagaaggtggactgcgaatactcgttcctgcctgcaggcatcgtgccgcaggctattgtcgacgaccttgccgagcgcttccccggagcaaggatttcgaaggccgagcgcgaacgcggcggctataagctcacgctgggcagcggagcggagatgatctacgcggcggacggaaggtttatccgcgtggagtatgattagtgtccgccttcctcgcgtattccggtgcggtagcgggagtctcttgcgcctgtgtctggggctcgtcgtgctgctgccggtccttgcggcttggctgctttccctgcccttctggctttttgagcggtatggccggggacaatgaacgattgatttatccattaacacgaaaaagaatgaattatgaattggtatctgaaagttgtaaaagaacattatgctgacttcaaaggtcgtgcccgccgccgggagtattggatgttcacgctgttcaacctgatcataatggttgtactgaccgttatcggcatcctgttaaggtttccgtttatccagacgatctacggacttgccgtgctggttcccgcattggccgtgtgcgtgcgtcgccttcatgatttgggtaagagcggttggctgctgctgctcagcctgattccccttgtcaacctttatctgatttatctcttctgcttggagggcgagaagaagagcaatgcttggggcccgaatcccaaggcttc

SEQ ID NO: 12100 - DNA, 1898 bp, Unknown
  gut microbiota DNA sequence
agtgacacggcatgctgattcggagcatacgcggaatttgcaggccgctgcggaactggattccgcagtggacccgatgtacgacgtcgacggcaatgcgcagccgggcatgactacggccaactgctatgtggtgcgcgctccgggcacttaccggcttccgctggtctacggcaacgctgtgaaagacggcgtcaccaatacggattcctttaatccgggagctgttgccaacgttctctcggcatttcccaagcacgacgacggggcgatcgttgcgccttgtctgactgataatccgggtgtcgttccggaagacgccgtgttgctctggaacgatgggttgaataccgtttcgggcagcggtttctattggacggcgggagtctcttcggaaggaggtacggggcgatgcttctttttcaatgcgtcgtatgtctatccggcgaacgacaactattggtcgtacggtttcagtatccgtcctgtccgggaatagcgattatggagggcttgtcgatgcatgcccttcgggagaaaattctgattaacttaatattttgaatgatgaacgaaacagaattacagacgacatcctccgagcagaagggtggcttcatgagccgcttcgggcggcgcaatgaacgggaagctgcggaaaattccggaaacgaaagcgttacgggaaaggaacagactgccgtttcggaaccttcggcctcttcgtctctgcgtcgtgaggagggacagtccggacgtgacctgaatgtctttaccgaagggctcgttattgagggcaacgtggtctccgaaacgggtattgtgatccgtggaactgttcgcggcagcgtcgattgtcgcagcgacgtggagatcagcggcgagattaccggcgacgtccgggggcggaatatccgtgttgtcgggggcggcgttcagggtgacatcgcagccgcggagatgctgagcatcgaccggagccgtatcaaaggtaacctttcggctacgcatgcgcgtatcaacaaccttatcgagggtgacgttacggtgcggggctcgctgagccttcagcgcgaggccgacattcagggcaatatcacggctgcggctctgagcgtcgaggagggagcgtcgatgaacggacgtatcaccatctcgcgtgaggctccggagacggctccgccgtcgcgtccgacccgcgggcggaattccgccccgtcgaaagccgctgctggggaagaggatgccgctgtcgaactcgtcacggtctccgagggacgtctgcccctgacggaggagaaacccgccgaagtggaggcttgaggatcggagaggagatgatgaccgttccggaagagatgacattgttcggttccctcccttgcggggcggggtgcggtaaaggtactcccggagccggtgacggggctgcggaagcggagtgtctgcgttcgggtcccttcaccttgcggcggtacgcgcaggggcggacgtcggccctctcttcgcgcggatatgtcctgctgttctgcctgagggggagtgtggaactgcggttgcgcagtttcagctatcggttgacgccccgctgcgttgcagcggttgattgcagccgtttggcggagtgccgctgcggggcggatgccgaattgttggaatatcgtccccgaatggggagcttcgcatcccgcggtagttgcgatgaacttccggcctttacggtgctgccctctcggacgcgtctgaacgcttgggcagggaccgtttcccggcatatccgggagggggcggcctatgaccgggattcgtcgtgtgcggtgagggtgcagttgcgtgacctttcgggtggtgtgcttccctatcctttcgcgtgcgcagcggggtgtccccggtggaat

SEQ ID NO: 12101 - DNA, 775 bp, Unknown
  gut microbiota DNA sequence
gaagttacgaaaagagtgtaatttattggaactgagcgtaggttaattgctcatgatagtaataggttacgatttagttagttatctactgcatcatccttctgtgcgttgcgtaaccttcaaagaactcttcgtatgcaaaagtaacaataaaacgggagattttgaaatgaatctccctaatttttttcttctcatacaagtttttccgtaaaagcggttttatccgtcggcacaccatcgcccaaaaggattttggacgaacgtatgccgactgccgcataagcggagaaaagggctttgcctcacgcctaaacaacagtttagactgatgatgcaaggccaatttcttttgtgcttatgccaatgaggtgcttttacgggttcgcagacgatttcttttttcgctgttcctttgtgccgtaagcggaaagccgtgtctgaccgcccgatccataaatggaacaagccgtcacacacggcaggcaaaccgggaagaatgattttatccgtccgaccggacacgctcggccagacagacaaaatcatacttccttgccgatggtttgcccggtttcacgcttccggctgatgttccttttccttttggcgttttcccttttttacggatttctcttttgaagttttcctgtctaatctgcctccacttccgtttacctccattttcgcgcctttcagggagcgcatcaggcagtcatttccgttctgggcgcaaaggtaattccgggattggacgggaatgcaaggtcaagcc

SEQ ID NO: 12102 - DNA, 372 bp, Unknown
  gut microbiota DNA sequence
gtatcaagtacagcgtcacagcagaagaatggatgacccatcttctcttccatatgcatactgatctcattgaatttatcacgcattaagcttccgccattaaccggtgtaaagtcgtctctgtgcataacagaaggtacatgatggcttgcaatacatctccagtttgtgatacctgttgcactgtgtttgtatccgcctgaatatccaccatatggatttccctgtacatgaccgatcagaattggaatatcacagtcaaatacatatttgttcatgtataccggatcacctctgtgagtttttccaagatataccatatgctcctgatcctcactgtcatggctgatgatctgacctgtatgccagaat

SEQ ID NO: 12103 - DNA, 23327 bp, Unknown
  gut microbiota DNA sequence
aggacggagcggcaggacggtgcggcaggacggagcggcaagacggagcggcaggacggggcggcaggacggggcggcagaaaaagagggggagggcaaagccgggtcatcgcagcggacaggtccgggggcgccgcccgcacaaacaaaaaacgggcgagaccatcggtcccgcccgttttagcaccgggattccaaccgccgggagccgccggacagcgaaaaagcgcacggagaagcggcccggcatctgcaaaaggccaacgcacaggttctcaatacgctgttcggacaccgggaagggtgcaatattatccgcacggccgccgttagtaaaataacagaacgcaacttttcgatctttttacattccgatcattctttccaagtgcacagccggacccgtccgtggtctttcccgttcccggaactgtgcccggaggccgagcgggtctccgtttccgcaaatcttcgcaggcatcgtgcggcctttgatttgcggttttctatcttgtgcacgatttcacacaaaattctattctatgacgtattcaccggattcagtcggcatgcaccgacacacgtttacggggcgggccgcattcacggggcagccccgcagtaaaacgccccccgatttcatgtcctgcttcgcactccacgtcgccgagtgcgaacaaacgggaagagacggttccgccgcaaactacctgacggcataccgcatgctcgtcaaatacatgaacggccgcaaactgctgcccgaacaatttaccgccgaatggctcgaacgttacgaacgatggcttctggcaagaggactggggacaaacagcgtcgtgttccacatgcgctacctgcgggccgtctacaacaaggccgcggacaggggcagcttcatcgcatcccgcggcaatccgttctaccgcaggcatatcaggcaggtggcgacccgcaagcgcgcgctgccgcgcgaaacgctcaggcggatcagcgacgccgacctgtcagaactgcatccgaaatatgcgctggcgcgcgacctcttcatgttcagcttctacacccgcggcatgtcgttcgtggacatgatctatctgcgaaaaagcgacatcagcgacggtgtgctgacatacaaacgaaagaaaaccggccagacgctcacgctgcgcatcgaaccgcccctgcagcgcatcatcgaccgttacaacggcgattcaccttatatactgcccgtgctcgcccgcgacgacagttaccgcgcctaccgtcagcagcagcgcgaactgaacaaattcatccggaagatcggcgcgatgctggaaatttccgaaccgctgacattctatgcggcacgccattcatgggcgacgctggcacgcgactgcggcacgccgctgacggtcatcagcgccggcatgggccacacctccgaacgaacgacgcgcatctatctggcgcagctcgatcacgacgtcatcgacaaggccaatcggaaaatcatcaacctgtaacgatcaggccgattcaggcagcgttcggatttttctggtatcaggaaaaaattttgcagaagcgagaaacaaggcccattactgtaaataatgtgtcttcggaacgtaaacaattgttttataatcatttcccgtcatcggcaaaaataggattatttataatcacaaccaaacatttcatgcaaaaaaatttacgcatcacagctaattaactgacttttagcgtaataacccgtcccttgtttaaaaaatcgaaaatccggacaccgcattcgattttttctcccgcaattgtgtccgaatctgctatttagcatctgacaaccagcattttacacgaacaagacccattatttacagtaaggggtctcggagacgcagtgtaactatctgactaaaaggctggtacaaattgacactttcactcaagattttatgggcagtaaagattctgctcgcactccgcaaggcgtcggaagccggcgcccctcccatgaagagccgcgaactgatggcggcatgtctgaatccgggcgcggacacctacatgtaccgccgggtcctgcgcgaactcgtcaccaaaaccgactatgcgacctgcatcatccagtcgggcaggacctactatgaatggaaccgcaacctgcggccgacgctctacgacctgacgctgcggctggaaggcggaatgcacgaggtcacgaacggcttctggtcatacgagaacagccacctcctgcaacccttatacaaggcgaacaggcagtacgaatcgctgacgcgcgaatatctttccaacatccatatcgacgaactcgactccccggcgcgctccgcgcgcaatagggccggacagccgtacgcatacctgactgcggccgaaccgacggaacgacacatcaatcaccaataaacattaaaaaatgaaacgtctctacctcattgcattattcgccctcgtctgcggcggcgcttcggcgcaggagaacggcaaccgggatgcgcaaaaccgcgtcgtacgcggcccctacgaaaccaaccggctctccgacaacattttcgtcggcatcgccggaggtataaacctctatttcggcgagcacgactctcagggaaaattcggcaaacggctggctccggcgctggacattcacgtcggcaaatggttcaccccctcgatcggcgcgcgcgtcggatacaccggcctgcaggccaaaggctggaccaccaccggaaccatgtacgcgaaaaagcaggacggcgactggtttgaggagaagttcggcgtgtcgtacctgcatgcggacgctctgtggaacttctcgaacgccgtgggcggctacaaggaggagcgcacgtggaacttcgtgcctttcgccggcgtgggctgggcccgctcctacggcaacgacacccatgacaacgaaatcggattcgacgtcggcctgctgaacgtcgtgcgtctgtgcaaggcgctcgacctcacgctcgaaacgcgctgtctgctggtaaaccagcgtttcgacggcgtatcgggcggccgtatcggagagggaatgctttcggtcaccgcaggtttggcgtacaaattcaaccgccgcggattcacacgcgcctcgaaaccgcaggcggtggatttcacgccttacctcgaccggatcaggcgtctcgaagagaacaacaacgacctcgcatcgaaaaacacggcgctcagcgacgagaacgagaagctgcgcagcatgccgcccaaggtcgtagctaaggagaaggtcgccgcatcgcccgttgcgctcttcttcaagatcggcagggccacgctcgacagcaaggagctgacgaacctcgaattctatgtcaggaacgccatgaaggccgacaaggagaagaccttcacgctgatcggttcggcggacaaggcaacgggcagcaaggagctgaaccagcgtctgagcgaacagcggatggagtatgtctacgacctgctgaagaacaaatacggcatcgcgcccgaacgcctgatcaagaaggccgaaggcgatacgaacaaccgttttgccgagccggagctgaaccgcgccgtcatcgtggaataacccccgaaaacgaccgattcatgtcccggaccgcagcaaccgtcacgaatgaaacgccctccggggcggcgcatcacctgctggcatatctggaggaggggagggtgcgcgtgtacgctccccgccggcagagcctctggatcatgcagcagctcccgcaggcggaggagcagaggatcgaaacccagctccgcgaactgcaccggaccgggaggcggacggccgtggtggaggtgcagctccgcaggaacgaagagacgttccgcgtaagggtgctctgcgtaagggcctgatccgcacgaatcggaaacgcacgaacagataaaatcaacgccacactcatcaattaaaaaaagcaatgaccatgaaaaaacaatcaatgccctacgaagcaccggagctggttcagatctccgtgcgcgtcgaaaaaggatttgccgtaagcagcgacatcgaaccgggaaccggcggcggcgagctgggcggcacgcgatcgctctcctacgacgattacgaatagcactccgaagtcccgaaaattaacgttcaaaacaaaaagccttatgaaaaaactattcgttatagcgatgctcgccgcagccggcatgagcgcatgcagcaaagaagagactgcgacggctccggcggagacgaaatacattcaggtaaccattcccgaagatgcggtcgccggcgagacccgcaccgccgtagacggcacggagaccacatgggtgcagggcgacaaagtcgccgtattcctctacgacggctccgcgacgcggaaattcgaattcacggccgacaaaacgggcgccaccaccacctttaccggcgacgtgcccgcaggcagctactcgctggcggcggcacactatccgtacagctgcggagccacgttcgacgccgtaaacaaggtcttcaaccacacgtggggcacatcctactgtacggagaatctggccgactacgacttcatgtacacgaacgtctgggagaccccgttcgaaatcaacgaggattcgacggtgctgcccgtcaacttcaccttccggccgctgatggcacgcatcaggatgagcctcggactggaaagcaacgagacacccaagaagatcatcatcagcaccagcggcgacgtaatgccgaccgcgggcacgatcgaccgtctgggcaacttcaccgcatcgtcggtaaccaattcgatcaccattcccacggaccggaaggagtttacgatcggactgctgcccgtaagcatccattcgacgatgaacgtgcaggtcatgaccgccgacggactgacctattcggacaagtcgttcaccctcgccggcctgaagcgcaaccaccactatacgatgagcgtaccgtgcaacagcaagacggtcacgatcggggtgcccgacgcggtcgacaagaagtacggcaccgggacgtggaaggacaacggattctatttcgtcgatccccagtacgatcccgacggaatcttcgacggctggtacttctaccgcggagagcttaagaatgacaagaacgacgacgacaaactcaagaagaaccgcatccagctgcaggttccggcaggattcaacgacgacaacaacggcgcgttcgtgacggctccgatccagtgcgacggttcgaaaaccgtgaaaatatcctttgaagtagcgaccaaccgggcattggtgaatataaaatatcggatcggcgtaacgggcaacggcccgattacggaagcttggctccgcgaccggaataacattctgaacggcaacgacagggaatgcaagtcgggagttcagacccacacgttcacggtcacgaacggacagcgcatcatgctcaagatactgagtacgggcggcgcctaccacgtcgagttcgcggacttcacctacacggtcgaatagctccggcgacaagaaatccagctatcgggacggaggtgacagccgtcccgattcagctgtaaaaatacctatctgatgaaagcagcttacacaaagccggaactggagatactcacggtcaggacggaagcgggattcgcgatctcccagccccacggcggcgaactgggtccgagttcggcggattatgcggacgactgcgagtattgaccgaacgccaattcaaaccagacaccatgacacacaaacctatcttccgcctgctgatactcgcaggactgctctccggctgcggaaaggatacgacggaacagccccgtcccgcaaatcgggcggccggcggcgacgccgtcagctgccgtcttgcgatcggcaacgaccagacatccggaccggaaagcgaaacccgcacggcctacggtccccttaccgacggttatttcccgatttactggcgcaccggcgaccgggtgggaatcatcagtccgcagacgactccgcagtgggccgaagtggaggtcgccgtgtcgggcgcgaccgaaagcgaagccgacctgagcgacacgggaatggcgtggggcagcgacccgcattatgacttttacgcgttttacccggccgacgccgtacagaccaacagcggttcgatcgtcgttacggcgattccggccgtacagacctgcaacaacggcgaatgcaacatgcagtacgcctacatgtccgcctgcacgaagggcgtggagcgcggcgcagaggtgccgttctcgttccgcccgctgatgaccaccgtcacggcagacgtacgattttcggaagcggccgaggttcagaagctcgtcctgtcgagcgaaaacgatccggtggccggggccttcacgttcgacatcgaaacgcatcgggccgccgtcattgaggacagatgctccaaagtgctggcgctccacatgctgacgggagaggagccttacatccggatcgccgccggatcgaagatcgtggtcacggcgttcctgctgccgcaggacattcggggactgacgctgacggccgtcacgacggaggggaaaacctacagttacacgactcagacgacgctcagggccgggcatcgctattcgttcacgatcggcgacatgcagaagcaggcgcagcagatcacggaggactattccgactggatgaaatacctgcccgacaacgtccacctgtcgcaggtatccatgcccggatcgcacgacgcatgcacgatgtacggctcgcattatgaatacaagagcggcatgcccggcgaaaggtatcatttcaaatggctgcaaaacgtcgtattcggctacatgaacgtaaccaagatcatcaaggcgcaggaactttcgatcgaggaacagctggcggccggtgtccgcatgttcgacctgcgtccgtcggcgtcgggcagctcgctgcaggaccttccgattcatcacggcatcgccgcgctgggcgacccgacccgcggcggctacacgccgggcggttccgggcggcaggagctgccgcccttcatgctctcgcacctgctcgaccgcttcgtgaacttcctgaacgagcatcccgacgagacggtgctgatacacatgaaatacgagaacaccagcggcaccggaaaaacgggctgggacaagagcgtcgtagacctgatcaagtcgcactgcagcggacacatcgccgatttccatccccggatgacgctggccgacgcccgcggcaagatcctgttcatgatccgcgaagactacaagtccgccaacggcggccagtatctgggcgcctacctgaactggacgcacgacaaggtcgtgttcgagaccacgctccacggcaatacgggcgaaacggcgccgatcaaggtcaatgacctgtacaacatcaagaacggctcgtcggacggcgtgagcaaatacgccgcgatcgacgagtgcatcgcctacacgtacggcgcgacggacgtcacgcgctggtgcatgaactacgtaagctgttacgacacggcgcactgcagcgtatcgggcatcagcctgttcggggccgtgggggattacgactactgcgccaacctgtataacagatacacggcggacaaactgaaccggaaggacttccgcggaaacgccggtatcgtcctgatggacttcgccggagccgggaacgccacgatgacttacgggcagacctactcgaacatgcgggtatacggcgacgatctggtgaaagccgtcatcggcgtcaacaacaaatgggacctgcggcgcagcgaataaccgccctcaggccctccggaccgcatattttccgctccccgtccgaaacgcccttaacccccaaaaaacctcccggctccgacggagtccgggaggtttcgcacacacaaacattaacaatacaaacaacgcgaatggctgaattatttgttcggtacaaagatgcgggtattttccgaacagcgcaatcgccaataatggggattttcggagcggcggctcccgaattatggtgaaaaggtcggacggaaagaggtgaacagcaactttttattttgaatttcgaaataatgcactatctttgcaggcgaattccaatacgcccggcgaccgccgggattttcgaaaaaatcactttgaaatagaaatatatgcaggatttgaaagcgctcgaagggaaaagtctcgccgaactgcgcgaaatcgccaaagctctcggcatcgaagacgtcatggtaaagaagcgcgaactgattgaaaagatcaccggagactccgtgcaggagactcccgcagagaataaaggcaagcgaggaagaaagaaggaaacgcccgcggcggaaactccggccggaaccgcacctgaaacagccgtggcagaagcggctgcgaaaacggccgagacgccggcggcggaaccagaaccgatggcagcggcagttgcggcggcgagcgcgaaaccgcggggacgcaggccgcgcatgaccaaggcggagaacaccgcaccggtgcagccgcagacggcgctggctccggaaatgcccgccgaactggagttcccgacgaatggcacgcagaacgaacctgcggcgaagcccgtgcaggaaacagccgctcagccggaacccaagcggcgcggccgcaagcccaagcaggatcaggagcaggcacaagagcaggaatccgctcaggcaagtcagccggaagagactcccgcaacccgtccgtacgaggaggaggtgattaccaaggacgacttcgccggagagatcgaaggcgagggcgtgctggagatcatgcccgacggttacggattcctgcgttcggcggactacaactacctgaactcacccgacgacatctacgtttcgccgtcgcagatcaaacttttcggactcaagcccggcgacaccgtgaacggagcgatccgtccgccgaaggagggcgagaagtatttcccgctggtccgcgtgaacgaaatcaacgggctggcgcccgaatacatccgcgaccgcgtgcagttcgaattcatgacgccgctcttcccaagcgagaagttctgtctgacgggaaacggccacaacaacctctccacccgcgtcgtggacctcttttcgcccatcggcaaaggccagcgcgccctgatcgtggcgcagcccaagaccggtaagaccgtgttgctgcaggccatcgccaacgccatcgccgacaaccatcccgaagtatacatgatcgtactgctgatcgacgaacgccccgaagaggttacggaaatggcgcgcaacgtcaaggccgaagtcgtggcatcgaccttcgacgaacaggcttcgcgccacgtgaaggtggccgaaatggtgctggacaaggccaaacgcatggtcgagtgcggtcacgacgtggtgatcttcctcgactcgataacccgtctggcgcgcgcctacaactcggtgcagccggcgtcgggcaaggtgctttcaggcggcgtggacgccaacgcgctccacaaacccaagcgtttcttcggcgcggcccgcaacacggaggagaaaggttcgctgacgatcatcgccacggccctgatcgacaccggatcgaaaatggacgaagtgatcttcgaggagttcaagggtacgggcaacatggagcttcagctcgaccgcaaactcgccaacaagcgcgtatatccggccgtggacgtcatcgcatcgggtacgcgccgcgaagacctgctgctgccgcgcgacgtgatgaaccgcacgtgggtgctgcgcaaatacctctcggacatgaatcccgtcgaagcgatggaattcctccagaaacagatgagtctcacggacaccaacgaggagttcctcgcaacgatgaaccactgacaaccgatccgcccgcaacacaaatcccgaacataaatgaaaaagctgcttattctcttttcctgcgtccttttcgcccacggcgcattcgcatggggacagaagggacacgacgtcacggcctacatcgccgaatgtcatctgacgcccgaagcggcggaaaaaatcgacaaggcgctgaacggacattcgccggtatactatgccaactggctcgacatcgccagccacacgccggaatacgcatacacgaaaacatggcactaccggaacgtggacgaaggcaagacgatcgacacgatgccggagaacccggacggcgacgtgctgaaagccgttacgacgctcgtcgcagagctgaaggccggcggactgtctcccgaagaggagacgctcaaactcaagatgctgattcacctcgtaggggacatgcactgcccgatgcacgcgggacggctttcggatatcggcggcaacctgcgtccggtattgatgttcggcaagaaaacgaaccttcattcggcatgggacacggccattcccgaagccgcccgcaaatggagctataccgaatggcaggagcagatcgaccggctgacggacgacgaagcgatgctgattcaggccggcgaaccttacgactggctcaaggagacgcacgcgatatgcgtcggcatctacgaggattcgcccgaaggcacgaagatctcctacgactacgtatacaagtacacgcccgtaatcgaactgcagttcctgcgcggcggctaccggctggcacgtctgctgaacgagatttatcgataatccggccggatcaaacgacgaaattacggaaaaatccccgcagcatatgcggggattttcgtatgctgggaccggcatacaggaccgaaaggaaacatgaaccgtaagaaggtccgccccggaaatgcagccatcttcgcggcagaaaaaaaatctccggtcaatcagtcgattgaccggagatttgcgtactcggagcgggaatcgaacccgcacgaccattgctggtcacaggattttaagtccggcgtgtctacctattccaccatccgagccactgtctttcggcgaaagacgtcggcaaaagtacgatttttttacgatttaccaaaatctatgtaacttataatcgcgtcggtttcgtcgggccggaaccagcggatctcaccgtcgcggcgaaaccacgtcagctggcgcttggcatagcggcgcgaattgcgcttgatgagttcgacggcttcgtcgtacgaaatacgcccgtcgaaatagtcgaaaaactcgcggtaaccgacggtttgcagggcattgagactgcggtaggggtacacggcgcgcgcttcggcttcgagtccgtcggcaagcatccggtcaacacggcggttgatccggtcgtacagctccccgcggggcatatcgacgccgaccttcacgatgtcgaaccagcgctcgcggcgcatgccggtccgcagctgcgaatagggcagtccggtcagcaggcaaacctccaaagcccggacgacacgcgcgggattgctgcggtccacttcggcgtaataggccggatcgagcgtccgaagctcttcggcgagcctctccacgccttcggacgccagccgcgcggcgagattccgccgcagggtttcgtcggcctgcggaaggtcgtccatgccttcgcacaaggcgcggacatagagtccggagccgccgacggccacgacgtaatcgtgtgcggcgaacagttcgccgagacgcgccaacgcctgcgtctcatattcgccgcagttcaagttgtcatttatgtcatgggatgcaataaaatgatgctcaaccgcctgcaactgttcgggcgcaggctgggccgtgccgataggcagcccacggtagacctgccgcgaatcggtcgagagaatcggagcgtcgtagttgagcgcaaggcggatgctcaggtccgtcttgcccgatcccgtcggtcccacgacgacgataagccgtttgtcactcatcgtcgtaattgtcgtccccttcgaaatcgctgaattcgctcatcacgtcgtcgaagatcgagccttcgcccgaaacgacattcttggacggatcgtactggtcgggggcttcggcctgcgcatagatctcgcgcgggtaggagatgccgggcttcgattcgaagctgcccgtcagttcgaggaaataggcccggtcgccgaagatgtcgaacaggtagatgagccggtcgcggttgttgtggatgatctgccccagcgtcaccttttccatcgccagcggggcgtcttccgcaccgtcgtccatatccatccgcgtgaattcgcgcagtttctcccaacggtcgtcggccgtgaagaaggacgccatgcactcctcgtattcgagcgaacgcagaatgaaatcatgaaattcgagcaacgtcgtgtcgtacaacacttcgtaatcgcgcacgaagttgtcgttttcatcgctcaacatccggaatcggaaaaccatcgacatagctgtaggtgtttagaatatatctctatacaaatataatactttttgtcaattcagcgccgcgagaaacgcaattacatcccggtcgtcgggataatcggtcagcgccggggattgggcgcggccgaatcccgtgcggcggccgtgggaaacgcattccgaaacgacgcattgcagttcggcgtcgtgctgcgcgagccacgcttcgacttcgccgagcgttttgtagcgcgagcaggcgatgcggctcagcgcggcggggaaagcccgctcttcgacggcgacggcgctccccagatcccggaaaggacggcccgtcatcgtcagcagggctttttgctggcggtaattgttccggtatttttcgttcaccgcaggcatccgcagccgcaggtcgtacccctccggaacgaaaagcagcgacacgctgcggcacccaagccccgaataggcccaaatatcgtcggcaaggccctccaactgcgcttcggtctcgcggcccgacagcacggcgaccgactggcggctgccgcgcagcagggcggggattccggcgtactgcgtccggaaatagcggttggcgttgtcgctgcccgtggcgatcaccgcatcgaccggggaggagccatcgtaaaattcaaccgggacttccgggtcaatctcccgcagcatcccgacgacatattccgtcagcacccggtccttggccgaaggcttgaccagacagcgatggccggcggccaagacgcacaacaagtcgaagaagccgaccagcggaatattcccggccatgacgaccagcacgcggcgcggcacggcgaccggaacggggtagggggcgagccatgtttcgagccggtcgcggcgaaacatgtcgtcggcgattgcggccacggcgcggcggacatccgcaggcgtgaaccagccgttggcccggcaggcacgctccgcaacctcctgcgtaggggcgtcgccgccgaagtcggccagcctgcggcccaaggccgaaaagagttcgattgcgcttttcatggggacaaagatagtgaaagccgaacggcaaaaagaaaaactcgtttgcatttttttgcctgaggcgcatcctattttccgtaaagatcgtgaaagccgcataaaatatccaaagttgtgctatatttgtattatacggaaagtaaaactcacgactatggaaagaacattcaaagaggcgctccgccaccgccgcagttattacgcgctggcccccgaatcgcccgtcgaagacgcacaaatagaggaaatcgtacgcttcgcgatcaagcacgtaccgtcggccttcaattcgcagtccacgcgcgccgtgctgctgctgcacgaacaccacgaggagttgtggaaaatcgtgaagcgcacgctgcgggcgatcgttcccgaagatgcgttcgcacgcaccgaggagaagatcgagcgcagtttcgcggcgggatacggcacggtgctcttcttcgaggatacgaacgtcgtccgcgacctgcagcagaaatttccgggttacgccggcaatttccccgtctggtccgaacagacctcggccatgcaccagctggcgatatggacgatgctcgaagacgccgggttcggcgcgtcgctgcaacattacaacccgctgatcgacaacgaggtgcgcaaacgctggagtctgcccgaagagtggaggctgatagcgcagatgccgttcggcactccggcgggcgagccgggcgaaaagacgttcaaaccgctggacgaacgcatccgggtgttcagataagggcattcaggccggtttcgcaataaaaaatccgcagaacccgcagaaaaaatttggagtttcggattttttgtttacctttgcactcgcaattgcgaaacacgccatgcggaaatagctcagttggtagagcgcaaccttgccaaggttgaggtcgcgggtccgagtcccgttttccgctctgacaatcagcaacttacagaaatggggttgctgatttttttgtttgtctacggcagaaaacaggcttaaaacagccttttcacggccttgactctccatagactctccataaaactctccattggaaatgcgctttccctcctgcatctaacgatgcaaagcaatgacattcaaagtaataatccgaacagatgtaatctataaagacaataccagccccttgtgtctgctgtttttccatgatgggcgtaaaaaatcggtcggtttgggtgtttccgtagtccgttcctgctgggatgcacaagcacaaaaggtaacggacgattgccccaacagggatgatattcagtttcagataacagccaaaatcaaagagtacgagaagaagattaagaaactggaagccctcgaaatccccgtaacctttgaaacgctgtttgagaccatcggtaaacgtatggattgtacggtaggcgattatttcaaacaaatcattgacaggctggaaaaggtcgaaaaatacggttccgccagcaaacacaaggtaacgttggcccttatgtcgcaattccgctcggtcaatatgcgctttgatgaattggatttaacttatctgcgtgagtttgaaatcttcctgcgtcaaaggggtaacgtaaacaacagccttgctaccaagttcagcgtactgaaagccgtctataataaggcagtttcagagggcgtatttgtcccaaaatcgaatccctttcagcaattcaaagtgggtagcctatggacgaatacccgcaagcgggccatcacgaaagaggacatccacaaactgattgagttggatttatcggacagggacttttacacccaacttgccaaagacatctttctgttctcttatttcatggctggaatcaatttcaaagacattgccctgctgacttatggagacattgacaatggacgcatctactatgcaagacgcaagacgggtaagatgatgaattgctgtctgacggaacaggcacaggaaatcatcgacaagtaccacaccgaccaagtagaggaagattatctgtttccaatccttgaccgccaaattcacacgaccgagaaacaaatcttggaacgtgttaagaaaacgttgaagcacgtaaataaacgcctgcacgaattgagtgaggaaataggactgcatacgccattaacgacctatgtagcccgtcatacttacgcaaccgtcttaaagaggtcaggagtaagcgtagccttgatttccgaatcgttgggacattcagacctatccactacacagatttacttggatagctttgagaacagtcaaatcgacgcagcgatgcaacatctcttgtaaggcaaaaagaggtcgggagcctatcaactcctgacctctacaaaccttataagtgcaaagtaattcttaaccgagatactgtgtcagcatatccataatcaactgctcccgtgccataccttttatcgggtggggtgtcataatctggtctgcttggtcgcgtgtgaggtcgtttatctttcgttccatttccgctgtgaacacctcgaaatcttcatcgggcttctgttgcttgatgataaagtcgattaaatacctgttcataaggaatttatccttgaatatcctctgtgcagccgtaaaccacttgctgctggcacgaaaccatgttttatcctcaaagatttcaggcagtttcttcgtgttcagacactccaccaagtctttcgcttgcagggatttcttgccgaagcaccataacgaaatcgtggagagggggcaagccttactgtgcaggaacatggcgaaatcgaatacctcgttggcttctttgagcatcatggcaggtgcggccatgtaatccgattttttccaaacggtggtgcagatgttcatttgcgctatgacctctgtaatggataattcagcattgagaggttcgcaaatcacaaggtcattcaaatccaactgcaaattctgataagccaccaatcggtgctgaccgtccaatacggcgtaatactttcctgcatcctcgttgggaatctcaaaccctttcaaatcgactaagcgaccgcccatctgaatcaccttttcaccatcggttaccgtgataggggttagctgtccataggctttcatggatttctctttctgtttcacggttctgacgtttacaggccgattgcctttgacaaatgcaaactgacgctgtgcgtcatccattgaaataaccatctttttcatggcttttacatactctgtcctttatgcagaggggctgataatgactgcaatccccgcccaaagattgcagaccgcaaagaacacccttgcgacagggcaaaggtactggagcataggccataataggatagtgaacagatgcttctctctaaatcaataagttgtaataaaccctataatattatgtaaaataattgccaaattacttgacttttggacagatatgttgtatctttgcaaagcaattcagtaaagaatcccacactacaaattgagcagttcttataagggcagattcgtctgccttttctttgcgttgtgttaccacattttttgagtgcgaaatgaatatttcctttaataagatagtttcagaatcaaaaaatatggaatcattaaaaagtgcattcactaaaaacagccacttttaatgacacatcatgtaagagtgagaacaatttatttgtgctgaaaaacttttcatcgaaaaaacgacgcacgtttttttgcgataatttttttctcacaactcgtgtgatgaaaaactttttttgcctgtttttttattcacgcatttttgcgtgttaaaaaatatcgctaaaaaaagtattcatcttacttggttgatgaatctatttttcgtgattaaaactgttcttcatttatctgttaccacattttttgagtgtgaaatgaagatttcctataaagaatatatttcagaatcagaaaatatggaaagcagagcagaaacggatagaagatttgagagttgaaaacatgtttgctgtttttggcttatttgtaaagttgccatttaatgatggagattccattaacattagagagatgaaagattaccacattttttgagtacgaaatggatttttcctatataagtatctattcagaatcaaaaattgtggaagctccagagagattcccattaaagaggaaatagataaaaagatatataatcacaattaataatcaactatttatgaatacaaataacattgccaatcaaaattgaacaattaacgctcccgctggggcaacttacttatcagactttctaactgagattcccactaactgcctgttcaacaagaagcagacaggatgcggtgctaccgagttggccatccgcaactccattccaaccattatcgccatgccttatgtggcattggtaaagaacaagaccatctaccgcaaggatgatatttccgtactgggcgtttacgagggcatccaaaagcaggacatcatcgactatgcacagaaccattctcccttaaagatagctgttacatacgattccgtgccacgaaccattaaggcattgcaaagtatcggcatagacccttataaagatactttcctgctggtggatgaatgacacgttttgttcaactcctattcgttccgttataatgccattaagaatttgcttgcagaagccgctaaattcgataaggcaacttatatgacagctacccctattgagcaggagtatgttttagaggaattaaagcacctgcctgtttgtgaaatcaactgaccgcatctgcaagaggtcaaaatccgttcccgtcagacttccaaacctgcacagtatatcgttaaggagtgccgcaaggtattggataaaggtttaccccataacctgcacatcttcgtcaacagcgtggagtttatgaaaaaggtaaccgaccttgcaaaacttactcccgaacaagttaaagtggtttgttcagttagcggggacaatggagagaataaccaacgcaagttaggcaaggattatcccatcggccagccgtcagaccccgtaaggaagataaacttttacacctctacctgctttgaggggtgcgacatctacgacgagaacggggttacattcatcgttagcgacggcaacaagtcccacacgctgttggatatttccacgctgttcacacagatttgcggacggttgagagattccaaatacaagggcgagattatccatatctattccacgactaaatacagccgagaggtaacattggatgaatttgtgacatcgacaaagaaagtgcttgcagaggcggtaagttatgctgacgagataaacaagttgagcgatacggcacgggaaaagaccttatcgaaaatcaaatatatcaacgaacaatatgtaaggatagaagataaccgccttatcgtggataagaaccttgccaatatggacattgtgaatttcaaaatctgccgtcatatttacagaacctatgtaaaccttacggatgaactacaacgaaacggctacacgataacccgccacacgttcagcgagattatggagaagatagagaacaagaccaacgcaagggttacgttcaaagacctgttcgatgaataccaccgtctgaaaacgaccaagccattcttttcactggagagccacgaggacttatgcgctcaaatagctgttaaatatccattggtgaaacaggcttacgacgagttgggaacggacaaggtacaggcattgaaataccatgtaggcaatattaaacgagagttgatgaaacgccagccagcacctaccgagtataaaatcgtgaagatgataaacacgacctttactaagcagacacctattgccaaaagtaaggtcaaagcagaattgcaacgcatttacgatgatttggggcttcaacgaactgcaaaggccgcagaccttaataaatgatacgaggtgaagcagaccacgcctaaaatcaacggcaggacaacggcctgcatgaccataattagagataggatgattgcaaagtaaagagcaatacgccaactgaacacgctgacttaaaaacaggccagcgtgttttttttgtctatatactgcccacgaacagatacatgaactaaagccccctccccttatctaatgtgaaatcaataaaaaagccatgaaaacattggacagaaaggcgtcagaaatcctgcgtggattattggctctgcaaaaatcgaaaatcgacaactcagacggggtgtatatgcctgttcatatcgagattatcgacagaacagacaagtacacccacatttcgctggctcattacggacggcagaatggagatgccatgcgtgaccctgaaatgattatcgccttgcacaaagaaagccagcaattcgttccctactattaccgtaatgattatatgggtatggagcagtacagcgtaagatggacggaagaaggtgttttgctgaaccgtcgtttacaggcagaccacactacattcgctaatcaatggttacgcaacatagccacacaacagcacctattatgactgcacggcgattagtggagaactgcgtactgacgaatcaaaccgcagtcgtggatgaaatgctgaacaagaacctgcttcccgaagaatatatctatccctttgttggcgatgtgatggaatggtggttgattgacagctggctggctgaacgtctgaaaagagagggagaggtaatcattgaggaatacggttgctgttggtggggcaggttagcgagcggacaagctatttacatggacgccgcaatacagaagattgcaggagagtgaaaacgcaactgcatatcgacatagtaaaactgcaaattacagagattaggggcattgcaattcagtaaagaatctgctacctctaatttctgtttttatgttggcgtaaggtcgataattgagtatctgaactatctgcaattcataattacagagtttatacaggcgtaacaacaaaaacgactaacccaatttacaactaacaaagttttgaatccataaggcgtgctattgcaaggaaactttgttttagagaactttgcaactacaataccccaagagtgttgcgtattgagaaacattttctaactttgtggtgctatctgaacgggtagcaacatattgtttagtgaaagtgtttcgctaatccttaccgagaaaatttggcgatttttaagtaagcaaggataagcaatacaaacactcatcaccgtatataggcatatatcattctcgatatatactattcggtgtggggtattgtttatttgcttacgggctacgccaaatgcctctcggtagataaacgaacaactccacactttctttttgcatataacccaccgcagtaggagttgatacggtaagaatattactgtaccatgaaaattcaaaatctttgtgaacatcgtacaaatggtgttgttgattattacacagcagatttagttgaaaacgaaacgactattcccgtagagtttagcatggcagggaatagggaatatattgcttataaccttaaaacagaaatgatttatccgattgaatctgttggaaataaaaaactcgacatcaaagattggagggatggtgatgatattgtgttaggtggggttataccgagagataattgattactaattataaataataagtgttattatgaagaaactactatccctattggtgtgtggcttattactatttggttgtggcgataagtacgatgacagtgcattgcgtaatgacctgaacgacctcgaaaatcgcgtaacaaaattagaggaactctgcaagcagatgaataccaatatttcatcgttgcaaaagattgtagacgcattacaggataatctgtctatttccaaagttgaacaaatttccgatggttatattatctatttttcagatggttctactgctactattaaaaacggcaaagatagcggtgatgctccagttattggtgttaaacaagatacagatggctgttattattggacacttgatggcaaatggctgactgatgaaaagggaaataaagtaaaagcacaaggtacagacggtaaggacggagttgatggtgaggatggaaatgacggtatagacggagaagatggtgtagatggaacgaatggaaaagacggaaaggatggaattacaccgcaactgaaaatagagaatggccgatggatgctttcaatggataatggtaaaacttggactgatataggacaagcaacgggagcagacgggacggatggagaagatggtgtcgatggcaaggacggaacgaatggcatcttcaaaagtgtaacggaagataatgataatgtctatttcacattggaggacgattctgttattacaattcctaaaagcgataattcaaagtttgcaattgtatttgatacaacggatatagccattcttaatggaggagaaagcaaaacgattttctacacaattacggatgcaacggaaaatacgattgtcaaagccattgcacaggatggttggaaagtcaaggtagatgctgcttctatggataagggagcgattacgattaccgctcctaatccgattgtagaaagcgaaatccttgtgtttgctaatgacggttcctatcgtaccgtaatggtatctttgaattgtatgcaggggcaaatcaatatagcagataactctattgatgctactcccgctggaggcacacaagaaatcaaattgacaacgaatttggattacaccgttgagattccagatgatgccaagtcgtggttatcgctggcacctcaaacacgagccttgcgggaagatacgattgtttttgaggtaactgctaacgaggggattcaacgctatgcgacggttgctttgaaagacgagcaggataatacattacaaacaatcatttttcgacaattgggaacgtgtaccgaggttcatgtcgaagcgaaaggcgaactggaaaatgtgttggcagactatgattatgccaatattgaatcgttgaagattacgggtgtgttgaacgatgtcgattttctgtttatctatcacatgatgcccaatttggtggaccttgatattgcagagataaacattacggcattaccgacaaaggcattttacaattctacaaatgtcgagaagttgattcttccgaatacactgacaacgattggaaagagtatgtttacagcaagcaagcaactgaaatatgttattataccaaacggggtgactgcaattgaagacgaggcatttaatgggtgtcgtgcattgacctctattgaaatcccagcgagtgtacaaacgattggaatgggggcattctggaattctcctctggagacagtgacttttgggaaagattcacaactggaggtaattaaagacatattctcctctgaatgttgtataacctctattgtaattcctgccaatgtgaaaatgattgaagcacgtgctttcaaaggttgttcttctctgaaaacagtaacttttgagaaagggtctcagctgaaaactatcggtggaaattataataatcctaattataatggagctttctcggattgtacggcattgacttctatcgagattccagcaagtgtagaaacgattgaaaaggtggcattctcaggttgttccaaactggcaaccgtaacctttgagaaaggctctcaattgaaatccatcggtggaggtaagtctcttggagctttcatggattgtacggcattgacctctattgaaatccctgcgagtgtagaaacaattg

SEQ ID NO: 12104 - DNA, 1695 bp, Unknown
  gut microbiota DNA sequence
tttgatatgcttcgatcttcggggcgaacgtgtcgagttcctttttgttcttgcgcttttcggccgccagccgtgctttgaaatccgcgaggggttcaccgttcatttccgcgagcaggtcggcaaatcgggcctgtatttccgtgcggtcgatgttatccccgacgagggctaaaagggcagcgcgacggcctttccaatcgacgcgagtattgaaatacatcgggtcggtcagcattcggaatacgtcgtcgtttatccattccgaaatgattttgtcgtatgccgccttggttccgacctccacgccattgacggcaaacgcactttcgtgtccgacgaatcgcaggtcggacgatccgcgcggtttgctccatatctcgcgatatgtgcgtcgtagcgtctgtgtggagccgtccacgtccaatgccacctcgacgaaatgctcggcgcggtgcatcggttcgcccgtggcgtctattgtcttgatgtcgatgtcggtactgttgtgcgaatccttgccgaacagtacccacgtcaaggcgtcgaaaatggttgtctttcccgtaccgttgtcgcctatgatcgtggcgttacggccgtcgaaatcgaacgatacgtcgcgcagtcctttgaaattgcgcagggtaattgatttgatcttgatgttcatagcatcgtgcgttttgtgatgattggttattatgcggttttcctttgttctctgattatggctgcggaaagtgttacgaacgcggcgaatgttacggcgacggcgacccatgaaatcgggtctgcatccatcgctccgccgagcgcgaccaacgacagccaccacgggatagctaaaattttggttttcatgtctacttgtagtaaaaggttattttcaagccgcgtcgcagtttgcattctaccttgtccgccctgcttcggaatgctcggtcaagcaggttgtttgcgagttcactccccaccaatccgacgaaccctgtgaagcctttgagttcgtggataccgaggcccgaaaccttgatgcggaaattccggtttacctcccttgatgtgtatttgagtgcttgcatgttatttttatcgaatttgctgttttttcgactttcgtgctgttgccgtgtgttcggtcgtccggtacggtaaaggctgcgaaacggcttattttggctgctcctgctgtccgtatttgccaatgatttctgcgcgttgcaaacgttcggcttcgagcagggcgacgaattccgtgcggctgtatttgatcggtgaattcggggccgttccgaatcgcttgccctcgatcttcccacgcggggcgatatgcttatcgacccagccccgaccgaattcccgatacagcgcgcgtttcgttacgaggtcggcggcgggttgctggcgcttgatgattgcgcaagcaacgacatcggcgacgtggacgaggcaatgctgtaattcgtataattcggggagcgacatattacgaaaggcgtttaattacgatggtggatgcggaagcggtgcgggcttcgaatttcgccttgccgttcttgttgaaacggctgacggcgttcatatacgatgcgtagtcgcgccccgtcagcgtgaattcgtgttcttctccgacgggaatagcgagcatcgtcgccacgtagtcggtgcgtttgatgatcgtgccttttttca

SEQ ID NO: 12105 - DNA, 568 bp, Unknown
  gut microbiota DNA sequence
atatcgaagatttcagagaatactgtatgtcgtttaaaggagtgcacgaaaaaatgccatttccaaacgtggctgacaagtacagtcgtgacgttatatgcttttatgtcgcggataagtggttctgttttgtcaatatcgaactatttgacttctgctgcatcaaatgcgatccggatgaatccggagaattgcagaccagctacataggaataaaacccggctggcacatgaataagaaatattggattagtgtctatttcaatcaggatgttccagacgggaaaattaaagaactcgtcagcaagtcctatgatattgttgtcagaagtctgacgaaaaaagaacgggagatgctataacttcatgccttccgatacatgaccgaaatcttctgatgcataacctaaatctgatcaaagagaaacaatctttttctactgtaaccgcaccaaaagtttatttcaaaacggatacggaaatgaataaatcgcttgaatcacctctacatgagaatttaaatatctaaaattgctgtcatctgtcaccaaaagctaaataacacact

SEQ ID NO: 12106 - DNA, 443 bp, Unknown
  gut microbiota DNA sequence
accttcgttgttcgtaagatcagcttcggcaccggtgtggagcgtcgcttcccgctgcactccccggtcatcgactccatcaaggtggtccgcaagggccgtgtgcgtcgcgccaagctgtactacctgcgcaacctgcgcggtaaggccgctcgtatcgttgagcgccgcgacaactccgagaagtgagtttcaaacgcaaataaagcgtgaaattggccctcagcctcacggcaggagggcctttttctattctagaccgctatgataggggtcagtgtgcaaaccggacgataaaggaatcatgtatgaggcatgccaaagaagaaaacaatagcggcgacagctttggcttgcgcgacaccttggtctggtgcggaattcctattattatcgtgctgctgatacgcattttcctgctcggattctacgtgattccctcc

SEQ ID NO: 12107 - DNA, 626 bp, Unknown
  gut microbiota DNA sequence
tcccgaccactggctgcggcaggaagacagcagcaaactcggcggtgactacctcatcaaacggctcattggattgccaggagacaccgtggcatgcgaagggccaggtaagccgatcaccatcaatggtgtggcgattgacgaaagcgcatacattcgccccgacgtggatcccagctcattcgcgttcaacgtgaccgtgaccgaaggacacgtgttcgttatgggcgacaatcgcgccaattccgccgattcacgctatcatcagggtgattcctcacatggacttgtgcctattcccgacgtagtgggtgtcggactcgcgaaatattggccgttgaaccgcatcggcgggctcgatgcgcaccatgaagtgtttgccgacgttccggaaggaggctcggcggcctgatggcggtttccgtaattcccacattggatttggaacgtgctattgccgaacaaggctacgatgtgatcgtcggctttgacgaagtggggcgtggatctctcgcagggccggtaatggttggtgcggctgcgatttgggcgcgtgacttagacgggccggctggagcttcgcaaggaggctcgcaagaatcttcgcatctggaagtgccgaaagg

SEQ ID NO: 12108 - DNA, 1001 bp, Unknown
  gut microbiota DNA sequence
gcaacaaggagattgacgagtggggcatttcccatgcactcggcgtagccgcgttacgtgcgttggcacaggcggaggcgaagctcggcattgacggcaacggcatgctctccggcaaaccggtgaaggtcggcgcgatcctcgacggaccgaacgattacatcaccaagacgctgaacaccttcgacgcgcccgaagtgccggtgccggcgaacgttaccaccaaagtgaaaggcgaccggtattgcgccgccgtggccgctgccgcggtcatcgccaaagtcacccgggatcggctcatggtcgaactgggagcgcaaccccaatatgaaccatatgaatgggcccacaacaagggttacggttcggccgcacaccgtgacgccatcgctgaattcgggcccagcgacctgcaccgcctgtcctggcacctcgtctgacatacggcatctcatccgcagtccgcgattacgctaatccttgcggatgatgcatgccggaaggaaacctgtaagttcatcccgccgtctgatggccgggaccaatccgtttccgtaccgtaggaaacatggaacacatacttcaggcgaccgatctggtcatggattattcgacccaacaggcgacaccaaacgccacacacatgctggcgctcaatcacgtggatttcggcatccaggcaggcgaaagcatcgcggtcatgggaccgtccggttccggcaaatcgacgttactgcacgcactcgccggcatcatcaccccgacagccggcaatgtgatgtttcgcggtgccaacctagcgcggttgagcgacgctgaccgcaccaaactgcgccgcagcgccttcggcttcgtcttccaatccggacaactgctgccggaactgccggccatcgaaaacatcgcgttgccgatgatgctgggcggcgcaagctaccagcaggccaccgacatggccatgctatggctggaacgattgggattgcgccagctcgcgcaac

SEQ ID NO: 12109 - DNA, 857 bp, Unknown
  gut microbiota DNA sequence
tttcggtaaagccgcgcagacgaagctggtgcgtcaggctgttggggcggttgcccagatagacaatgtcacggtggccgagttccagcagatgctctgctgccagacggccgcctgccagattatcaatgcagaccgagttgacctcatcgccgctgacgagtgccggcgttccgagcagaacggtaggcagtcgtggagcgaaattctggatcatggttcctgcatcctgctgtgagctggcaaggatgatgccgtcaacctgatgactgatcaggaaaccgaacagctcttcggtcactttgggatcattctgcccattgcacaggatcatgttgtagccgaggctgcgtgcgtgcgtttcgatgccgagagagagttcggcatagaacggattggtcacctcgggaacgatcaggccgatgacgttggttttgttgcagatcagactgcgtgcgagtgcattgacacggtagccctcccgtcggcagatttccaggatccgctggcgggtttgctcgctcagttcaggcgaattgctgagtgcgcgggagacggtagaagtcgaaacaccggcaatgcgggcgatatctttgatggtaatgtgctgtcgcatagatgccgcttccttcccatagtagttttaataagaatataataccgtatttgccggggaaagacaaggataacggcagaaggcgggaaaaatatcagatatgttccgggtgccgaagcggttccggatggactcaggcgtaaaattccttgatatagtcgaggacagcctgttcgggaccctgcagcggaccgggggtttccattttgagcgaaacggctgcggtagcgaacagcagcgc

SEQ ID NO: 12110 - DNA, 919 bp, Unknown
  gut microbiota DNA sequence
attttgttttcttcggtcaatctttcattgactttctccaaacgctgattggtgcggtataactgtgcattcgctgtattcagcctatgatagttgtcccacccctcaaagcagcgggcaagcaccgttttgacaagttgcttcaatttccttacaaccggctctgccattttggttttatatgcctttgcagtcataaatttctctggttctggcaactgatatttcggtgcagtatcaagctctatttcaagatttgacagctcgtcttttgccttatcatagttcaatactcgttccgacaacacatcaaattcaatctgtttctgctcgattttcgcacctaatgccgccacttctttttctctttcctgctttttataatccaaaacagaaagatgtttttcgtgtgtgcctaaatgttcccactcaatcccataacgttccatcaccgccgcaagctgttctttttcggactgtatccattgcgaccactccgtatcgccacgactgccgcccttaaaaccttgcgttgcaagagcctgctttagtgacactcttgtatcaagtccacgcttgctgcctgtggtaaaaggtacaaaatctatgtgcagatgtggtgtagcttcatccatatgcagatgagccgagaacacccgaagctgtggatttcgctcctgaaaaccctgatagtattcatctaaaatctgctttgccagttctccgttttccgtatcggcgttcatatttcccttaccgcccacctgtaaaatgatttcgtggaacggtttttcctgcttggaacttcggattttttcataataatcttttatctttcggtctgaccttatctgcttggcattgtatctttccaatgcttcatcaaacaattcgtgataaactgtctttatattttcat

SEQ ID NO: 12111 - DNA, 461 bp, Unknown
  gut microbiota DNA sequence
ccttggttcggattgtcctgcatcgcggtaagcagcatgaatatccccctgttcagacactatgaattgttattatcgacactgcgctgctccaaatgccatcacatttcattgcacctgctctccgtccacaagaatacctacgagttgacatgcagccactgcgggtttcacaaaagatgtaagaaataaaaacagcggcttcgtcccgccccgaagggtcggcgatcgtttttcaggagctgacagcaaaagtacaagcacaaaaaaaggtcagacctttcgatctgaccttgaagaggcggctacctactctcccacgggaaaaccgcagtaccatcggcgtaagtgagcttaacttctctgttcggaatgggaagaggtgggacctcactgctataaccacctaaaagaacgttttcgataagcgagtacaaagagaatttattcactttgtcgag

SEQ ID NO: 12112 - DNA, 782 bp, Unknown
  gut microbiota DNA sequence
ggcagatcaggcggcaaagatcagcatggaacaggcgcagacggcggcgctggacgccgccaacatcgacgcggcggacgcggacatttcttccgcgacgctcagcgaggtggctggcgtgacctgctacaaggttgagttcacctctggcaatcatacctacgcctactccatcaatgctgagagcggcgaggtgctggaggcgagttaccgggacaagaacgccgcgcccacggacagcgctcagacggataccactgcatccggcgcgaccaccactccggcgcagactacccccaacatcaacacctctaccggcgcggtggacgaggccaaggcgcaggagatcgctctggcacacgccggggtcaaggcggcggacgccaccatcaccaagtccaagctggactatgacgatggccgtcaggtgtacgaaattgaatggtacgcgaacggcgcgaagtacgactatgagatcgacgccgccaccggcaagattgtcagctacgactacgacgccgagaactacaccccgtcccagagcaccaacaccaacgcaaatgtgaagatcagcgaggccacggcaaagcagatcgccctgtccagcgtccccggcgcgacggctgcgaatatctacaagttcaagctggactttgacgatggccgctgggagtacgaaggcgagatccgctatggcacgatggagtacgacttcaccatcgacgccaataccggcgcgatcatcgaatgggacatggaatccatctacgactgaacaaaaa

SEQ ID NO: 12113 - DNA, 1030 bp, Unknown
  gut microbiota DNA sequence
gggcaagaaggacaccgagcaggtattgaacgcctttttcagcacggtgcaggagaccttgaaacagaacgacaaggtacagatccctggctttggcagctttgaagtgcgtgagcgtgccgcccgcacgggccgcaacccgcacaccggcgagacgatcgagatcgccgcggcaaaggtgcctgcgttcaaacctgaaaagggtctgaaggacgccatccagtaaaacacagtgccctcacagagtttcatctgtgagggcacattttgttgtactcaagcatttctacagattcggaaagttgattcatcagctacagctgaatcggcatcaaacagaacgatattcgaacctctttgatcgataagtttcattcgcgtgcttggataacgaattcctgcaaaacctttattctcacaccattcagcaaaaacgtggaatgactttgatttacagtgataaggaagtattcacaaaaattaacttaacgtccgatagacagagtagcaaaataaaagcgagtgaaaagtttgactttcactcgcttttatttacttcttagatttattagctatttcagcaatctgcattaaattttgaaaagattcagggtttttaatcaactcaggcaatagcattttcatcataatagcatcagcggattcctctttttttacattgtttaggctagtttgcattattgcttgtatagtttccgtatcttttttatttacttgctcttttaattccgtaatagagtcttggatttgatacaacatagtaagaataccttgagtaaagggttgcttgttggcttcctcatcttgccccaatgtatcatcttgattttcaaaagaaaatgtttctattgtttgttctaaacgctttttggtttcttctacattatccaaatcagttaaatcatactcgaatgttcttactgtgtttacatcgaatggtatgctttcacctttctttttaaggtgaataattggcttatctgtacattttctatatcccatttcataa

SEQ ID NO: 12114 - DNA, 15671 bp, Unknown
  gut microbiota DNA sequence
ccccccctgtctgttttttatctatctttgtccccgaaaaagtaaatgcaaacaacgataaatcgaggcaatcctcataaccgaggcttataccttatttatataaaggcaatattcgacctatgttacataggacctatattacacctagaagcaacaattattaatttaaacctaaagtaattatgagaaaaacatctcagaaattctcgcagagccacatgctctgcaaagttgctctggtagccatcatgttggtgttccagacaatgttaggaatcggtgcgggtgtcctcaatgctcagacggttaagggtactgtcatttccggtactgacaatgaacctctcattggtgcaagtgtcatggtacagggaaccaagattggtgccgtaaccgatctcgatggtaacttcgctatcgaggcaaagaatggacagacccttgaagtgtcttatttgggtttcatcacccagaagatcaaggtaaccggttctgtagtgaatgtaaccttaaatgaagacaaacagtctcttgatgaggtcgtcgtagtaggttatggtgttcagaagaaaaagttggtgactggtgctaccgttcagttgaagggtgacgacattgccaagttgaacactactaacccattgtctgccatgcagggccagactcctggtgtcaacatcgtttctacctctggtcagccaggtgcagcgatgagtgttaccatccgtggtttgggtactgtaggtaattcacagcctctttatttgattgatggtgtaggtggtgatatcacaaccttgaatcctgccgacatcgagagcatcgacgtcttgaaggatgccgcttctgccgctatctatggtgcacaggctgccaatggtgtagtactcgttaccaccaagagtggtaaggaaggttcttctaagattacatacgatggatatgtaggttggcagaccttgggtcgcaagtttaatatgctcaatagcaatgagtatatgcagattatggatgaggctcgcctcaactcaggtatgtctcctgtagattggatttccctcaactctattcgtgatattgatggtaatgtatatgatacagactggattgacaaggcagttgataacggagccttgaccacaagccatagtttggcattcacaggtggtagcaagacttctacatattctatttctggtggttatacaggacaggacggtcttattggcggttctgacgtttcttattataagaggtataaccttcgtgccaattcagagcataaaatgttcaatggtttggttactgtaggtgagcatgtaggcttcgtttacaaggatagccgtggcatgaacactggtaacatctataataacaaccttcatggagcattctctacatctccacttgttcctgtttatggtgctgatggtaattacttctctacagaaggttctgattggaaccctaatgatagtaacccatacggtactatgatgatgaaccgttataatcagactaaggctacttctgtagacgctaatgtatatgtacagattgagcctatcaagaacttgaagttccgtactgtatttgctatcaactatggtggttctgattatcgttcatttactcctatttataagtttactccacagagtggtaatggtgtaaccaaggttaaccagagcgacggtagtggtatctctttggtatggaccaatactttgacatacgactttgatatcaaggatcatcacctcagtgctttgattggtagtgagactactaagtatgatggtagctataccagtagctatggagtaaaccttacagcaggtttcgatgattgggagcatgcttatgttgccaatactgatatgagccatactgaccgtaaggtaaatggtggtccttacgacccatctcgtggtcagtctttgttcgctcgtttgggttggtcttggaaggatcgttatatgatcaatgctactatgcgtgccgatggttcttctaagtttgccaagggtcatcgttggggttacttcccatcagtcagtgcaggttggactttgacagaagaggatttcatgaagtctacagcttcttggttggatttcttgaaactccgtctctcttggggtcaggtaggtaatgccaacatcaagtgctaccagtacttggcacctgttactacaactaataccaattacaacttcggtgccacaggtggtactgatgcttgggtaaatggtgcttatacaagccgtcttgccaacgagaatgtaaagtgggagacctctgagcagtacaatgttggtttggatgctcgtttcctccgtcagcgtttgtctttgaccttggatggttatatcaagaataccaaggattggttggttcaggctcctatcttggctacagccggtacaggtggtcctatcatcaatggtggtgatgtaaagaacaagggtattgaggttggtctttcttggaatgaccagattggtaaggatttcatctacagtgtaggtgctaactttgcttacaaccacaatgaggttggttctatccctacagaggatggtatcatccatggtgctaccaaccagatttatcagaatgcagaagagttctatcgtgcagagaatggtcatgcaatcggttacttctggggttacaagacagcaggtatcttccagaaccagaaggaaatcaatgagtggattgcagctggtaatggtgtgatgcagagtaatgtacagccaggtgatgtgaagtacgtagatatcaatcacgatggcgttatcaatgctaatgataaggtagacctgggtaatggtcttcctaagtatactttcggattcaatttcaacctgggttggaagggcttcgacttggctgctaacttcactggtgcagcaggtttcaagattgctcagtcttatcgtgacccaagttcatctcagggcaattatagccgtcgcatcttgaaccgttggacaggtgagggtactggcaatgagattccacgtgttacttacggtgatgtcggtaactggttgttctcagacctttatctccaggatggagactatatccgtttgcagaacctcactttgggttatgatttcaagaagctcatcgcttggaagggactctctaagttgcgtctctacttccaggtacagaatctctttactttgaccaagtatgatggtatggatccagaaatcggttcttacaatggtacagatggtaacagcagcgactcttgggtatctggtgttgatatgggttactatccacatcctcgtacattcatcgtaggtttaaatcttgcattttaatttttaaatgggaagtaatatgaaaagaaaacatatattgatgagtgccttattgttgtcagccttgtctttgacatcttgcgacgactatttggacacttcatctaagacaaatatgaataccgagaccgcctacagcactccagctgcggctgacatggatctcgtaggctgctacgatggatggcagcgtacactcagtgacgagggtgtcggtatgtatttgaccgccgagtttgcttctgaggaggcttttggtggcttaggtctttctgatgcaaagaacaataacgtcatcgaccagttcgatctcggtattgctccgtcttataatgacctttacaatacagattggaagaactattatgcagctatcttccgctgcaaccagttgattcaggcagatgctactatcaattggaatggtgataccaagacacagggacgtatcatgggtgaggctcgtgcccttcgtgccatcttgtatttcgacttggttcgtctctttggcgatgtgcctttgttgttgactccatcagaggagaacatcccacgtactcctgccaaggaagtatatcaggctatctttgatgacttgaagtatgcagctgagaatattcctgctgatgcttatcctttgaaggaccgtgattctaacgatggtcgtatcaccaagtatgcagctgaggctttgatggctcgcgcgtacctatattatacaggttattatggcgaggagcatcctgcttgttctaaggctgatgcaacagcagccatcaatgatgtagtagacaatggtggttacgagttggaaaagaattatgccgacttctggatgccttcttgtaccaaggatgcttcttccaatggcacctatgcttgggagacaacttatgcaggtaagtggtatgacggcaagacttggaaggcaggtcagggtagtttgtcaaaggagattgtcttgaacttgaaactcaactctactcatgactacagtggtaatggtgatggtaataccttctctgtttaccttggtcctcgtaacaagtgtgctaccaatgtttgtatttccagtggttggggtgcttgctcagttactccatatttcgtagagcagtacaagaacgatcctcgtttcaatgcttgcgtttggagttgtgatgaggctggatttgcagctgatgaggccgactcttatgaatatacgggttactatactcgcaagtatgctccaatgtgcttcgctgatggtacacgtcaggaagttggtttcaagttgggtgagcagcaccagaacattacttactatcaagattatacgatcatgcgttatgccgacgtattgttgatgcactctgagttgaacggtaccaattggggattgaacaaggttcgtgcccgtgttggtttggacccagaggattatagcattgagaatattcgcaaggagcgtgccatcgaattggctttcgagggtgttcacttctgggatttgatgcgctatgagaagaatggtgcttatgcagccaaggctatcacggaagctcagaatggtgtgaaggtaaagaatggtggtgttgagactactaccaagttctctaccgacaacttcacttccaagaagggcttgatgcagatacctaatacccagattactctctctggtggtgtcttgacacagaatccaggttggtaaacaggagtagattaggtaacataataaaaatatttaataatagaagatatgaaaatacataatcatatattgacgcttcttgcagccatggtgatgttcttggtagcatcctgctcccctgaagactttggctttggcaagaagacttactctccagaagacttggtggagggtaaggcttataccgtgaccgtagaaggtaacgtgttgaagctggaatctaagatatctgatgccactcctctctgggttactcctatcggccgttcccaggagcagtctctcagcgtagaacttccttttgctggtgagtatgaggtggcatttggtgtggagactcctggcggaatcgtgtatggtgatccttacaagattactttggcgcagaatgacttctcactcttgagtgacaacaagtggttctatcttgctgacaagaattataagacaggtgatccattgccatcctctgagactcttgccaagggtatcagtaagaagtggtatccttgtgatgctagctatggcgtaggtcagtgctcaggtcctgtgatgtatgtctctccatttgatcctgatggtgatggcaagggatatacagcagatgatgaggctaatgccgtttataaggacatcgtatttggtactggtaactggaaaccaaactgggaccctggcttccagagctggttggttcctgaagatgatccatacatggattcatatatgaccttcagcatggatgctcagaatggttgtgttgctacgatgtatcgtggtgaatctggtgccaagggcgcaagcacaggttccaatatggttggtaagttcaatatgaacctcaatgataagaccaagcctctcatcacattcacagattgctactctatgcacaatactggttttgatgaggtttgctctaactatactcaggacatccagattgtagagttgactccatacgttctccagttggttaccaagcgtaccaatagcgagggcaactggtacatttgctggaatttcgtttctgaggatgtaatcaagactcatggtgagtgcatccctaagtcagagcaaggcttgatagagaaggttaagccacaattgccaacctttgagaacattcatacagacttgtttacagcagatatcaatggtgacaagtatgtaggtagcaagatgacattcaatttggattctgaaaatccttatgacttcaagtggtggaatggttcacctgacgtaaaggcttgggagaatgtaattggtggcaagtataatactacttgggctcctgctcttgacgacaaggctctcgatggcttcgagttgactatctctaagaagtctgatggtggttatgcattcgagtgcggtgatgtggatggtgatgtagaaatcactgagaatacactgacattcagtaaggaaatcacagtatttgctgtatctagcgataagcgtaccatcgatttgaagggcaagaagttctatattcttggtaattctgctgatgaccagagcttgactattggtattcctgagtcaaaggacgagaatggtatggttaactcttacctcgttgctaacttggcttataagaagattgctacaggtcctgtaggtcctacaaaggttgcatttgataattcactcattcatgaggagggttattcttggatagagaatggctgcctccgtatcggtttccatcactatggtgagactggtaagggactctttaaggatgtaaagtctgtgaagttgaagaagaaccagaccatcactgttaccttcaaggtgaagggtggtgtaacttggagcaagactcctaagtgtgccttgattgataataacatcaaggagacatgggaacctggatgtttcgacctcgatgatgctgtcgctgtagataccaatggtggtgagactaccgtttcacttactaacaatacgggttctactcagaccttcaccagtacctgtcttgacctctctatccagctggatggctatggtgactatggaggtgacactggtaacatcgacatcgagattgtatctgttacaattcaataactttaatagcgtaaacttatgaagaataaaatattatacggaattatggcctttgtcatgggtatcttcatgacaggctgtagcgatgatgactattctgtcaacaagaatccgttgctcgacgatagttctgtagtaacaggttctgctgatgtaacatctacatctgctacattccatggtactgtcaaaggattggaagatcaggctgctagtgcgtacgccactggttttatgtatggtgattctgagaccaatctgagtgagaaggcatctgcttctagcgatgctgagttctctgctaccattacaggtatgcctggacaggtagtttactatcaggcctttgttactttgcagggcagattgacctacaaaggcgctgttcagcaggctgtattgacagatgctaaggctattactggtgaggtgaaggatttgacggctaactctgcagtattgcagggtagccttcagttagctccatcagaggcagctagcggtatcgtcatctctggtaaggagggacaggaaaatgtacgtgctggtgtacgtatcatggcttctggcatcaatgacaattatgaaatcaaggctgagggattgctccctaacactacttatcattatactgcttacctcgacttgggtaatggtacagtatatggtgaggagcgcagcttcactactcctaatgctgagttcaatcctgatgaggaccttgtagacttgggcctttctactaagtggtgcaagtataatgtaggtgctaccaaggctaccgacttgggtggtctcttcggatttggtgatatgactggtttccaaactagtcttgatttggataattatgcttctgctgatatttacaaaactgatcgtgatgtggctaacaaggtttatggctcttgggtaactatgccaactatcgatgagtttgaggaattgtttacagagtgtaagaaggaatgggttgaggaagacggcgtagctggttataagttcactggtcctaatggaaactctatcttcttgccagctgcaggttctcgtactcagggtgctgtttctggtgaaggcttgaatggttactatctctctggttctatcaatgctactgacaataagtttgccatggcatatagcgtcgaccagaattctaaccgtcgtaccactactcctgtataccaggcattggctatccgtccagtgtctgtagctaagaatgtgaagttcgacaagagcaagttgttgggtaagacttgggagattgacttgaaggaggatggttctcactacaagtttgatggtccatcttatttctatggcttggatgatagttgggctactgttactaacaatcagccagtagttggtgatgtatggaattggtgtcctaactttaaagacaatacttgggttgttggtggtgacgccaagaattgtagcggttctatgaccttctctgaggaggatggcaagaatgtggttaaggttcatcaaattcaatctgatggtacattcaaggattcagaaggaacatttaccattgatgagaagaataaggtgctgaatttggacattgacattttggctccaactaactatagtggtgagtttgtcagtgacaagaataccaacatcaagattctttctctcgatgatgagagcttgcagcttggcgtggttcgtacagacccaagccagaatccatgtttgcttactatcaactatgttactgctgatgtgaagtatggctttactgctaagttgacttgctatggtggtgatgacgaaaatactcctgatgcttggaactcagctatcgttaatgtactgggtggtgccaaaggcttgaagacttatactgtaaccttcaatacccagtaccctcgtaaggcaggtatggtttatctcctcgaacttgagggatattctgctgcttatccaaaggctttcgttcgtattgacggtatcaaggctgatggcaatgaggtgaaatatgatgctagcaagttcttctatggtgacttggaaggcaagggcaactaccgtgtggagatggctaacatttggggctgcggccacaatgacagctggaacggtttgaaggataccccattccacaagggtggtggtgaaacaaccaatgagacagctttggctttcaatcacacattcgaggtaacattcaccgtagtatctaacacaagtgatggtactggcgtatatactccaaacttgattaccattaacccatcttgggttggtacatggggttacaacgaaggtcagaccttggaagtagtgaacgaaggtggtaagtactctatcaagggcaacaaccagtttgacatcacttataagagtgatgctcacaaggatggttctatcatgaccttcattgagattgctgacctctatggtttcttcccaggcactcatgcaactctcgatgaattctatcttgatggcaaggctgtatcttacgataagtctaaggtcattgatagcaatgaaaatcctaagtatcgcttggagttgtggaactgctttggtgctactaagagtgcaggctgtgcattcggtactccagagggtgatgtgatgaagagccttgctttcaatgagtctatccgcaccaagtttactgtacatagcttgtttgctcagcctcagtggtaaattaagatagttaacagttgatagttcatagctgcttcgccgtgtagcaagttagctataaactatcaactatcaactctaaactaaaattattgcaatgaagaatattaaatatttatttctattgttgatgggactggtagtaggctttgccttcaccgcttgttctgatgacgatgatgatcctgtcagattcaaagtgctcaatcctgagcttacttttgaaggagtgggaggcacacagactctctctgtacaatctccagagaagccaactcttaccattactgagggttctgacttcttgactttggcagaggctagtgtagagggtgatgtctataactatgatgtcactttagctgccaacccaggtgaggagtctcgtaccgctagcatccgtgtggttgcaggaactagtcgtaaggatgtagcaatctcccagaatgtacagccggttaaggttcctacaggagagatgactcatagtgccaaggaattggctgccttgatgtatgctggtatcaacattggtaatactatggagtgtccagctgatgagggtgcttggtctggctataaggtaaacgaggagtatatcaagggcttgaaggctgctggctttaatgccgttcgtattccttgcgcttgggattcttacatcactgacaagacttcatttgaaatcgatgccaagtggctcgaccgtgtggcacgtgtcgtttcttggtgtattcagaatgatatgtacgtagttctcaactctcactgggacaatggatggttggaagacaacatcttcgatgcttctaagaaggatgccatcaatgcagagcagaaagccatctggactcagattgccaacaagtttaaggactatgacgagcatcttctctttgcagcttgcaatgagccaggtatgaacgagacttctagcaagggcaagaagtggactgatgctgaggctgtggctcgtgtagtagagtatgagcagaccatgatagatgctgttcgtgcaactggtggcaacaatgctaagcgtaccttgatagttcaaggcttgggtacaagcattgcagaaaccaatgaccatatgatagctctccctactgatgcagcggaggatcgcttgatggtagaggttcacttctatgagccatatcagtttgccttgatggaggaagatgcttcttggggcaagtgctattacttctggggcaagggcaaccaggtagctggttctgaccgcaatacaccagatgcttttgctgaggcttgggtagatgcttctatgaagaagatgtacgataagtatgttagcaagggcattccttgtatcatcggtgagtattctgccatgttccgcaacttgtctgagaatcaggatattcatgacaagtctgtagcttactatggtgagtatgttactaaggtggctaagaacaatggttgtgttcctttctattgggagacaggttctgttatcaaccgcaaggatggttctgtcaagaaacaggctgtcgtagatggtttgatgaagggtgctcaggaaggtaagtatccttggtaatagttagattcctatcagtcattttatatttaaggcaagaaagactagcactttcttgccttttttttcacttgtaacattttgtgtatataaatgaaacatattgttacatacctgtagcggaaaaagtgttaactttgcaatagattaactgcactagtaatctaagaagacaatcacatggtaatacattaatagaatgaagaaagtacttatgacagcattggctgtagctcattttgcctttgctggtgctcaggtaaagcctgagaatcctaaaatggctaagatgggacttactgcaactcaattggcacattatatggctccaggagtcaacctgggtaatacgatggaggcgtgcgactggaatgatgtctttaccaatcaggcaggactgaagtcagaaacttcatggcagaatgataagactactgagagctatatccggagtttgaaacagcagggattcaacagtcttcgtattcccacctcctgggtggctggtcatcttacggataaggagaatatgaccatagattctgtctggatgaaacgaatcaaggaaatcgtaaactatggtctcaatgccggtctctgtgtcatcatcaacgaacactgggatggcggatggatggagcatgatgcctttaccagtggggcgaatgtggcagagcatgaggagatgttccgcaagctgtggacgaatatagcaaaggaattcaagacgtatgaccagcgggttctctttgctgccctcaacgaaccgggagtgggaggtgccagtccgcaggttcaaggcgacatgctggctcctgatagtaaggagtttgccgaccgtctcctggcatacgaacaagtgtttatcgatgccgtccgtgctaccggtggtaataatgccagccgtgtgctcatcgtacagactccaaagaccgagattgatttggctgcaaaggattcttacgacatcacccgtctgaaggataaggtgaagaaccgtctgatggcagaggttcatttctacgatccttatatatttaccctgatggacaaagatgccgattggggcaaggtggctctttattggaaaggacatgcgcctgctgacgatcagggacgcaccgtcaacaccatctggtataacaataagaatgtggatgcctaccagcatattatcaaccaggtgatgaagatgaagaagaagtttgtggacaagggttatcctgttgtcatcggtgaatatggtgccaaccgtaaggatgcctctctcttcggtggtaatcaggagaagcataatgagagtatgatggcatggtatggtgctgtgactgccgaaatgatgaaggcaggacttatcccatacgtctgggatatcaatgtgcagcctcttcctcacatgaccatcttcgacagaaagaagcaggtggtttccgactcctatatatttaaaggtgtgatgcagggagcagccgaagggatggaagattacctgagaatctatccgaaaccttagaaaaaagcagaaaaagcaataataaataagcatagtttagatttatatgtagaaagggcaaaaaagtatcatgcttttttgcccttatttagtatctttgcaaccgaaaatgaatctttaaactgtaaacttaataaataaatgaagaagacatttgttttattgatgatggcattggctacatgcaatatctctgcgaagtcaaactttgtgcaggtaaaggacggacatttcgttcgtgatggtaaaccttattattatgtaggtaccaatttctggtatggtgccatcctcggttcagaaggacagggcggcaaccgtgagcgtctctgtagggaactcgataagatgaaggagatgggcattgataatctccgcatcctggtgggctctgatggaaagcgaggagtgaagaccaaggttgagccgacgctgcaggaagctccgggcgtttataacgatacgattcttgccggtctcgactatctgctgatggagatgggcaaacgcaagatgctggccgtgctctacctgaacaactcctgggaatggagtggcggttatggctattacctggagcaggctggtttgggtcaggctccccgtcctaacgaagatggatatcctgccttcatgaacttcgttgccaaatatgcatcctgcgaaaaggcgcatcagcttttctatgattatgtgaaattcatacttacgagaaccaacagatatacaaagaagaagtataaggatgacccggctatcatgtcatggcagataggtaacgagcctcgtgctttcagcaaagagcagttgcctgctttcgaaaagtggctgggtgaagcgagcaagctgatccgttcgctcgataagaatcatctgatttctatcggtagcgaaggcaaatggggatgtgaaggagaactgaactgttgggaacggatctgtgccgacaagaatgtagattattgcaacattcatctttggccatacaactggagttgggcgagaaaagaccatttgctggaagatttgcaaatctcctgccagaacacaaaggagtatattgatgaacatcttgaggtatgcgcacgtatcaggaagccattggtgatggaggagttcggctatcctcgtgatggtttctctttctcaacttcttctacaacagaagcacgtgatggatattataagtatgtgttcagtcttgttggcgacaatgcagcatccggcggttactttgccggttgcaacttttggggatggggcggctttgccaatcctaagcatgagcagtggcaggtaggtgatgactacaccggtgatcctgctcaggaagcgcaaggtctgaactccgttttctctaccgataaatctacattggatgtagtaaagacgcaggtagacagaatgaagaagattggtaagttataagtttagtgaaattgttagttgttttaggagggtgtgccatcagtttatggtgcaccctcttttttctggctttttcgtgttgtaccactttggggaactgctacaagtatgctgcccctcaaaaagtagacacagaaaggtggaaaactgatggaaaatgattacctttgcaagcagatagagttgtgtgccctgtagagagggcgtagcccgaacgtaagggcacacaacttgccgaagcatggttatcttatcgtcaagtattcaccagaaaggaaactttttatggcaaagcatttaaatccattggaaaaggagttcttgattcgtaagttcaagggaaactccaaagttaagctcagtgatttctgcagggcaaacaatgtctcggaaacttcttttaagaagtggctgaagcaatatgaagaagcaggcatagaggggttggctcgtgctgatgctgagattgggaacatacttcctgagggcattgacaaaaccaaggaggggtataagcgagaaatcctacgcttgcgtattgagaatgaacggctcaaaaaaaaatatctggtgaggcagaacgaggatgggcaaacggagtatgttcgtttaaaaatgaagagttcaaaatagtggacatgctatcgcacgagtatcctgtcaaggatatctgcaagatgatgggagtaagtcggtcggggtattacaagtggcttagaagagagccttcatcccgtgagatcaatcgtgagttcatggtgggtgtggttgaggacatacactcggaacaccctacacatggctacaggtgggtggcggcgtacataagaatcaatttacagttgagtatcagcgacaatttctcttataaatgcttccaatatcttggtattcagtcacaaacgagacacaagatacattacaaaccacgtaaagtaaaggataagtaccccaacctcatttattccacgtgggacacggtagacagacctcgacaagttatcgtctctgacatgacagtcatcaaatactcttggttcttctttgagttgaccatgtatttcgatgtctttacgaaagaaatcctaacgtggcatgtggctgagagacgtggacatagagaccagtacattgatgggctaaatgatgtcatcaacctgttgaagggcacagatgagccaactgttcttcatacggaccaaggtagcgtgtatgcttcactcgcctataatgagctgataaaggacacgttgattgtgaggtctatgtccagggcaggaaagcctacagacaaccctgtgaacgaatccctcaacggatggataaaagaggaattgttcatagact

SEQ ID NO: 12115 - DNA, 44627 bp, Unknown
  gut microbiota DNA sequence
gggggggtatgttttggttaatcaattacgtataaaatgttgcgcaacctacattttttaacgaaaaagcaccaaaatgtagcataaaatacattttggtgcaaaaatagtttaattaatatgatattttatcaaccccggcatcggagctttcaaaaactgggaaatcttgagatgaaactcatcctccatcacatttctcaaaggtgattcaaagtaatgagctatgcttccaacaaaaccaagcatcgggatttcttcttcctgggatgaatgccatgccttcatgcctggctccaactgacttatatcttcggtgctcgccttgacatatttaatataaggtgtgagattctttgcgtagaactgattgaaactctccagtatcatacgatagagagccatcgcttcattcagttcgtcagtcccgttctcgtgtttctcaccttctgctatctgttctgagataaaaggacagatggaagcaaggaagcgattggcaagcggctgtctgtacaccttattaataatagtaggataatccaaacccgaccaggcaagatatttattctttagcgaaataggcaatgtgcccttgaagataccattgaggaaaagtttgccgattactgccccactaccctcatcgcccaggatatatcccaacggaggcgtgttcatcacaatcttctctccatcgtaaagacaactgttggcaccggttcccaaaatacaggcgatacccggtttcttgccaaacagggcacgggctgctcccagcatatcaccttctgcctcaaccttggcttcggggaaagactgctgcaagagtgatttcatgcgagacttcatcgcctcggttactccactgccataaaagaaaacctcctgaggctgctctgacagaacaagttccttatacaatacatccaaaatctcggcatcactctgatgaatcggactgatgccctgcgtcttacaggtaaccatcacgttaccctgttcatcaaccagagcccaatcggtcttggtgctgccactatctgctatgagtatcttcatattccaatctgattaattaacgtatcctttgacgttgcaaatgtaatcaatttatatgaaaaatgcaaaggataagcctaaaaatcgaacgtaaaggtgctaatatttcaaaaaaggggaatttctctttgctttttcacgaattattaataactttgcagtcaaatttactaaatatgaagaagagactatacatcataattctgctgatggtggcattggcactgccaagtaatgctgtgctcaaggaagccaacctggacacaacactctatatgctgcgcacagaattgaccaactatcacatagacttggagaaacagaaccaagctgccaaggctcaacagttggcggtaattcaggaactcatcagtattgtgaaacaggctgaccagaactccatcatgctctattcgcaacgcaacgggtatattttcgacatgacgtatgcctgtcatgaagctacagagcagtttaagaagtttaaatcgaaggctgttcctttccgccagatgatcaagaagaacaatgttgaggtggcgcgtttcgattcactcatcaactatctctacggcatgagcaccatgtttctcagcgaagaagcacaggtgaaccgaaacgtagacctgactctggctgtcaatatccgccgccagctggtagagaaacagaaacagttgcaagcctatgtgcaggcttacgaccgaaccgaccgtaagttacaggcactcaacgactatgccaaccgcagatacgaagatatccagaacagcatcttcaataatggaggcgacaactatctgcgtatactccgcaacttcagcatgaactataaggaggcgaagacgtctgtaaccgagaaatacaagcccgtaccgggcatgatgtcgcaatgggatgttcgtatcatcttcatcctcttcggtatcatcatcttctggggtctcatctccatcttcctcaatctctttaccatccgcatcgtaattacccaactcatgaagcatggtatgttcgagaacagaaaggaaagttttatggcaaaacgaccatgccttatcatggctatgacagtagtaaccttcgcagttattctcggtatcgtaagaatggcggttacccagaacttcgtgattatggcaagccagctgctggtagaatattcctggttggttggcgtcatcttggtatctatcttgctacgcgtagacaacgataagatcaagaataccttccgtatctattcgccattgatgctggtaggtttcatcgttatcgtgttccgtatcatcctgataccaaacgacctggtaaacctcatctttccaccagtccttctgctctgcgctctctggctgtggaatgtgattggcagaaagcacaaccaggtattgcgtaccgacaagacatacgcattcatatcgcttgccgtattcggagtaagtaccatttttgcctggacaggtttcacactgcttgccgtccagcttatcatctggtggaccatgcagcttacctgcgtgcttaccattacctgctgcgagggatggctcagcgtatatgccaagcgtaaaaagctggcagacaaggcgattaccgataaatggctgtatcgctttatctacaaggtattgctccctatttcaggtgtactttcgttcatcatctctatctactgggcagcagatgtattcaacatgagtgatacgacttgggagatattcaacaaggattacatcaagaccagcaacttcactgcatcgcttttcagtatttcagaggtagcttgtctgtacttcctgttcaactacatcaacattacttctgtagatttcatgcgtcatcacttcgagaaagcagacccggcgtcggctgcttcaaagattgtgatgttcaaaaacgtgatgcaggtgattatctggggtatctggctgatgatagccctgaacgtattccaggttggtaaatcatggctgcttgctatctttgccggcttatcaaccggtctgggttttgcatcaaaggatattctcgaaaacatctactacggtatctctctgatgatgggccgtgtgaaggtgggtgactatatcatctgtgacggcacccgtggtaaggtaagcagtatcagttatacctctacgatgctggaggctaccgacggttcggtcatagccttccagaactcgcagctcttctcgaagaactacaagaacatgaccaagaatcatggttatgagctggatattctggaggtaggtattgcttatggcagcaatgtgaaggaagtgaaacagattctgattgatgccctcatgaaactggactgtatctatcaggacaaaggggtgaaggtattattgaaaagtttcgatgacagctgcatcacactcagaattgtggtatgggtgaacgtgcttacccaagccatcgacgatgccaccatcatggagtgcatctacgatacgctcaacgatcacaacatcgagattccgttcccacagcgtgagattacaatcaaacaagttaataattaacaggttatagtttacagttaatagcaggttagccccctattaactataaactattaactataaacttttaaacatatggcaacattcatagcaggtccttgtgtcatcgagtcaatggaactattggaaacagtagctcaggaactcgtccgcatcaacgaaaagttaggaacccaaatcatattcaaggcttcattcgacaaagccaaccgtaccagcatccactctttccgtggtccaggactggagaaaggactccagatgctgggagatatcagggagaagtacaaccttcaggttacaacagatattcatgagagttatcaggcttcagcagcaggcgaagtttgtgatattctccagattccagccttcctctgccgacagaccgaccttctggtttctgcagccaagactggtaaaatcgtcaacatcaagaaggcacagttcctgagcggtagagatatgaaatatcctgtagaaaaagcattggagagcggtgccaaggaagtttggctcacagaacgcggcaactgtttcggttataacaatctcgtggtagatttcagaaacatccctgacatgaaggagattgtgccaaatgtcatcatggactgtacccatagcgttcagcgcccgagtgcaggtgacggcaagaccgtaggcgaccgcaagttcgtaccagcaatggcaaaggcggctaaagctttcggagctaccggctacttctttgaagtacatcctgacccagaccagggcaagagcgatgcagccaatatgctggaattaaacaagttggaatcacttatagaagaactcctgtaagtgaagaatgaagaaacaacgttcggcgtacgaatggaaagccaattcaaatgatttagaaatgaccgataaaaataacaatatagatgataagattgttcgcggttatggcgaacaggctcttagagacgaggcgcaggccatcctcgaccagataccttatctggacgacaactttgagaaagctgtagacatgatgtatcattgccaaggcaagattatcgttacaggtgtgggcaagagtggacacgtaggtgccaagattgccgctacacttgcctctacaggcacaccagccttctacatcaatccactggatgtctatcacggcgacttaggtgtgatgaccaacaaggatgtggttctggcactgagtaacagcggtcagaccgatgaactgcttcgtttcatcccgatggtactccacatgaatattcctatcatttccatcaccggaaatccagattccctgctggcaaaatactccaaccatcatatcaccgtaaaggtaaagaaggaggcttgtccgctgaacctcgcccctaccagcagtactactgcagcattggctatgggtgatgcactggctatcgccctgatgcaggtacgccacttcaagcctcgtgactttgcacagttccatcctggtggagaattaggcaaacgactgctgaccacagcagaagatgtgatgcgcagcgatgatatgcctatcattcctaaggaaatgcacctgggcgaggctatcatccacgtaagcaagggcaaactgggattgggtatctcattggatgaagacaaccacgttatcggacttattaccgatggtgatatccgacgcgccatggagaaatggcaggcagaattctttaacaagactgtaagcgacatcatgaccaccactccgaaaatggtgactccgaagacgaagatttcggagattcagcgcatcatgcacaagtataaggtgcatacggtactggttgtagacaaggataatcatttaaagggcattgtagatcactatgcctgcatggtgtgattttaattaacaatttataattaataatttatagcaaatagattattaggagttgacatgagactcagagagataataacaacgataacactgatgcttgccagttcgctgtgcagcgcacagaccagcgattcattgatcgttaatcagcttcgtgggaaaggagtcagcttttctcacgataattcagtaacccttctgatgaatggtcaggaaaagtttgatgatatgttccaggcaatccgacaggctaaacatagtgtacacctggaatacttcaactttcgcaacgacagcatcgcctccctcctcttcgacctgctagctcagaaagtcaaggagggtgtgaaggtgagagccttatatgatggtttcggaaactcttccaacaataagcctcttcgaaagagacatctcaagaaaatccgtgccaatggtatagagatttatgaatacaagcccctgaagtttccatgggtacatgcaatcttcaaccgtgatcaccgtaaaatcgttgtcatcgatgggcagatagcctatacgggcggtatgaacgtagccgattactatataaaaggtacgaagattgtaggagaatggcacgatatgcactgtcgcatcgatggcagtgaggtaaataccctgcagaagatattcctcaaaatgtggaataaggtgagcggacagaatgtgcacagcactgagttctggagatataagaagaaggattatctggtagagaatctcaagccagatacgacagcaacagcctacagaaagatggtcggcatcatcaaccgcgaaccgcatattacaaaagatatcatccgatatttttatgtgaatgccatcaatgatgcacaggacagcatcaagattatcagcccctacttcaccttgagtcataaactcaaaaaggcattgaagaatgctgtgaaaagaagagtgaaagtagaaatcatgctctctaccaagagcgacattccgctgactcctgactgtggtttctataatgcgcacaaactgatgaaggcaggatgcaatgtttggatgtatacgccgggcttccaccataccaagattattatggtagacggcaagttctgtaccgtgggcagtgccaatctcaatgcccgaagcctgcgctgggactatgaagagaatgcagtgattgtggattcttgcactacacaacaactggtacagctctttgatggagaaaagaaagacagtttcttactcaatgagaagaactggagagagtggcgtacgggctggcaaagattcaaaggatggtttgccgcaaaggtactcactccattcttgtaaaaacaagatataagtataactcaactatcactagcagaagtaaaataaacagagatgaatgaagaaatgatgaaagccatggctggcaaacagatgccggaaatggcaatagtagagagcaatacactcgccgcaatgggactcagacaactgcttgagtcggtgatgcccatgatgaaaatctcgaccttcggttcgttccgtcagtacgaggcaaacaatccagatcactttgttcatagctttgtatctatgcacattgtattggaacaccgttacttcttcacacaaggcaacaggaaccgccacgtgatcgttctgacacccagcaacgatcccaattcgcaacttgcagaatttcattgtctctgcgtcaatgtaccagaaggatacctgataaaagagcttctcaacctgcagcattccggccatcctcatggcgagcatatccctgccatgccccctgtcactcaggaaaaagttttgtcggatagagaaatagaggtattatctctggtagcacaagggaaaatcaacaaagagatagccgaccaactctgtatcggactgactactgtgattacccatcgcaagaaaatacaggaaaaactgggattaaaaagtgtgtcttcactcaccatttatgctgtgatgcatggttttgttgacatcaatatgatttagccttcaccacaaatagtgatgcagaatcatcacatacctaaatataatgatagcgccttcccctcatgtgagaggaaggcgctatcatttttaaaaaaaataacattatttaaactgatattctacagataaactacagctttacagaagaaatatcaaccaaattgttcacgatggcataaattgtaagacctgcaggagaatgaatctgaagctttcgggcgatgtttctgcgatgcgtaatgaccgtattgatagagataaacaggtggtcagcaatctccttgttggtcattccctgaaccaaagcaacaatcacgtctttctcacggtcgctcaactgttcgtcacccatcggagtctgactaatcatgctcgaaatcttggcactcacatcgttctgcttcagtttacgctctgcatttcttacagcaggaataaagatttcttcctcaacctcagaatgatgtttcagccattcctcattattatatatatcataaagagtggcgctgagctgattgttatgcaagccatcagaaggcaaatacttgataatgatactcttgagctcctttaacttcatatccacctgagcatgatgcttcgagaaggtttctatatcaaagtttgcattggcattaccatctataagtgcctgaacataagggaataccatcttttcctcatacttcatgtgattggtaatgctatgggcatagtcatcataaagcttgaggataaggcgtgccagattatccttttcatccagcgcttcaaccagttccttacggataaacggcaactggaaatctatgtaataggcatgcgatgccttgagataatgcaatagggtcggcagcgacaaacggtcggcattgtcatactccttgtaaccattaatcgtcaagtttaccacggacaggaaagtataagtatccaccttctgctcgtcgcaaacctcacgcacagtcttgtcgccaaagcccaggttgatgccaaagctaccgaggctctgcaagatgttgtaattgtctctaatgatgctgatcatcttgtcgtcagcttcatacatcttctgatttttcatcttcttttatccttaaatgaaaacatccttgtatcaagaacattcataatgtttctattttgggtgcaaatatacaaaaaagttttgaaactcgcaatacctagaaatggggatgccgcagtttaccgatttttaggtattgcaagatattttaaaactccgtacctttgcacccgaaatcgagaaagagcgcggtgatgattgccattctcgagcggcagagctgcgtaattccttatcaagtcagattggctttaaggagatactaggcctctaaagtatcgagaccgcaaacagacatccgcgctcttttctttatataaaattatacgaaacaataatttcaaaatattaaagatgaacagtttaagaattggattgatgtccgctgccctcgttgccggcttggcaacggcaagtgcacaaactgtggctgccgatagtgtgatgcagcatgtaaacggcaagcgcctcagcgtgggcggttatggtgaggttgccatgagccgcaacttctacagcgaccacgtaagccgttacagtttggctgacgagcacaagaatgaccctagccatggtcgttttgatattcctcatgcagtaatttacctgggttacgacttcggaaaaggttggaccatgggtacagagattgagtttgagcatggcggtgtcggtatggcttacgaaaaagaagatgaagaaggtggcgaatgggaacaggaagtagagaaaggcggagaggtcgaactcgaacagttctggattcagaagtcattcggtcgttgggcaaacatcaaggctggtcacatcgtagttcctgtgggtttgaacaatgcttaccatgagcctttgaatttcttcactgtctatcgtcctgaaggtgagaatacggttctcccaagcacctggcatcagacaggtgtcagtttctggggtaagacaaagggctggagatatgaattgcaatttctggcaggcttgaatgccaacaatttcaccaatacaggttggatcaataaagggccaggcagtccaatggaatttgaaatagccacaaaatacggtggtgcccttcgtatcgacaactacagcatcaagggattgcgacttggattgagtggttattacggacatagcattggcaacgcatatcctgtgaataaaaatggcgtggacgctcaatacaatggtgtagtagctgtaggttcatttgatttcacttacaacgaccacaactggattgttagaggccaagcagactatggttaccttggcgatgccgagcaactgaaatacatttcagaccgtcgtgacaacaaatcaccataccaccataccgtatccgtatcaaagaatgcttttgcgtatggtatcgaagcaggttatgacgtgttctcgcaaatagaaaagctacaccaagacaaacagaaattctatgtcttcggaagatatgaacactataatccatacgcgtctaaatcaaacaacacttcatacgattacaccaatgtgaagcgaatggcatggggtatcaactacttccctatcaaacagattgccatcaaggcagaatactcacatcgattcttggataagaaatacaacaacgagccatccatcaatatcggcgtagcatacgaaggttggttcctttaatcaaaaaatcgacaaaggtatcaaaagatagaaaaaattattttttaaattaaaaaataaaagacaaaatgaaaaaggtatttaaaagtgcagtaatgctcatggcagccatcatattgcctatgggattcacttcttgtagcagcgacaacaatgaaggtgatggtagcgagtattctaacaaggcttacggtaatgcagccatcaatgcttgtactgatgtccagaacaacttggcaaaagcaaaacaagctatccagaacgcaaaccttacagcagatcaaaagacatatcttgacaactgcatcaaaggtttcgtaaacgacgtagtaataccaacatacacagaactaggtactgccgttgaagagatgcacacagcattgggtacattgtctgaaacagagattactcagaagaatgtaaatgatgcatgcaaagccttcaagaaggcacgtaaactttgggagcaaagcgaggctttccttggtggagcagctagcgacttcagcgttgacccacacatcgactcatggccattgaaccgtacagctctcttgagctatttcaagaatccaactgcaaaaatcgacgacgagtctatcttaggtttccatgctcttgagtttatcctcttccgtgatggtaacccacgtaacgtatctgagttcaagggcaatgatacttacaaaggatttgagaacattagtggtgctgacgaattgaaatatgcagaaaccgtaatcgaagatctcttggctcacgtatatgaattgcaatgctcatggcaagacacaccagatgcagcacgtcttaatgtagtaacagccaaaggtttagcttacagaacacaaaactataacaagtcatatggttggaacatccagaactatggtgacaatttgagtactttcccaacattggaggctgctcttgagcaaattctatcagctgacgagggtagtggtttggccattgccaacgaggtaggtaacaaaaagattgccaatccatttaccttgggtgacattagctatgttgagtctccatacagctacaactctatcacagacttccaggacaatatccgcagcatcgagaacgtatggtacggtggtcgcaacggtgcttcttcaaacccaacatacagctttcacaaattctttgtacagacaaatcctactgtagccaaagctgtagaggatgctatcgcaaatgccatcaataacattggcaagatgccaagcccattcgtgaagtatgtcagcgtgctttggaacaagaacttcgttgacgcacctcttgtagattacggagatgagtaataaaagctctgacgaatactcaaaccaagcgcatctcaccatttgctttagtaaaaggtgagatgcaatttgtgtttaaattgaatctatacaaaatacattataaaatgaaaattatgaacaattttaagaatttaaacaagatggctatcatggcattattggtagcccctacattagtaggttgttcttcagacgacccagagtcagacaacggcggtggcggtttaggtcctctgacaccaggcaatacagaatttggaaaggccacaggtaatttcactgccgcagaatggtttcctggaggcgaattaggaacaacaacaaaccgtagctactcagcctctacaactcctgttgatgatgatgctgacatgttggcaagcttcaaccgtggtgaggatatgtttgagaagatttacacaatcaccgatgctccacgcaaaggcttaggaccggcgtgggttcgcaatggctgtatcaagtgccacccatcatacggccatggcaagcgtcagacagagagccaaggctataaggcttcttctgatgacaacggttatctgctcgtagtttatcatccagagcatgccaccacttctgatggtgtggaatacactactaataattccaaatatatttcagaggttacaggtatgccacaaacagcagccatggcaccattcaaggcacctatcgaggagagtggcatccacttgacttggcctacagtaaccgatatgccaagtggattggcagaatacgcaggcaatggtacattcaagttccctgacggagagacattcagcctcatctacccagagattaccattgacgaaagcgccttcaacaccaaccctaagccatccaactatgaggttcgcctggagtcaaccatcggtatatatggtacaggtttactggatgccatagaccaagatgagatgaagaaacagtatcagtctgaggcgaaatacttagagttgaacccaggcatgtgggacaaggcaaagaatgattgggctggtgaccctaaagcaaaaaaatcaaatggcgcctggtacaaacttgccgatggcacaatggctgtgaagaagtttacttatgctatgacccgtgcttccctgcaggatggtcctggagcaaatgccatttggaacatcaccaacgtgacacgttcagaccgtcattacctctacactacctcagcatgggcaaaagcaatgtctgaagataatgacgtaatcagctacatcaaggccaacggtaaagacgaaacttccattcttcacccttattgggctaatggtaccgacgaagaaatcgctaaacgagtaaatgagattttgagttgcaacacggctccaaaagcaggtgaagaaaacgcatttgagaaatatcttttcaagggtgcgccttacaacagcgaggaagagcaaagtgacaaggactattatgacttcatggtttggcaccgtggcttggcagtgcctgctgctcgtgaccttggcaatgcgcaagtacaacgtggtaaggaaatcttcaaccaaatcggttgccaatactgccaccgtccatcctggaagacaggtgaagacaactactgggttgataacgccatcaaggcatacgctcagaagattggcaaagatcctaacaccatgttacctaaatacgccaaccaaactatttggccatacacagacttggttcagcaccgcttattcatgaagaacgacatccgtacaggttggtgtcgcactactccactttggggtcgtggtttgtctcgacagctaacaggtgcagatgaccgtttgcacgactgccgtgctcgcacagtcatcgaagccatcatgtggcatggctacagcaaagacagccaggcattcaatgctgccaagaagttctacaacttgccaaaagcagaccgtgatgctgtagtagcattcatcaatgctatctaagtctttacaagaagaaacaaaaataagaaaagctgccaggctatcaaaagcatttggcagctttttttatcagaatctacaaatatacggattaactcttgcatgtttccgaataatatcgtaattttgcagcggaaattctatcaaggttccaactaagtatggttaaaaagattatattcattctttacattcttgtgctcgtatgcatggctgccgccaccatcgtggaaaaaagccagggcacggattatgcccatgcccactactatggagcatggtggttcattctaatctgggcagtactcgctgccctaggtgctttctacattatcaaaagaaaagtgaagtgcgcttctacgctggcactccatctctccttcatcatcatccttgccggggcattgctcacacatatatcggctaaacggggcatgattcatctgcgcatcggtcagcctacagatacttatatggctaaagacgaggagcagggcatgaaggaagagaaactgcctttctcgctctgcctgcagaagtttgaagcgaagatgcacgatggaaccaacgccgtggctgactattcttcaaaattcaccgtaatagacggagatgataagagcgaaggcgaagtttcgatgaacaacatctattcccaccggtcttaccgtctttatcagtcatcttacgatgaagacggcaagggaagcgtgctcgctatcaatgccgatccatacggcataccagtcacctatactggctatgcgctgctcttcatctccctcgtatggatgctcttcgaccctaagggcggttatcgcaaactactgaagagtcctttgctcaagaagggagccttgataacagcactcatcctcagcatgggcaatatacagacactgcatgcagaatctgcaacaggcaatctccaaaatgctgtattgccaaaggaaactgcagagaagtttggcgagcttcatattctctacaacgaccgcatctgtccggtacagacctttgccctcgatttctgcaagaagatatatggagccaggagctatcagggattgactgcagaacaggtactctccggttgggtattctatggaaatacttgggcaaacgagcctttcatcaagatcaagagcggagaaatgaaaacagcgatgaatctgccagactatgcttcgctcaatactttcttcaatcgtgaaatgggtggctataccatcggacagtatgttcaggaatactacaatgggcagcaggacaagttccatcagcaagccgccgatatcgatggcaagatacaaatcatcatggagttgcgagaaggtatctcattgaaagttcttccttacaccttcaccaagaacgtgaaagctaccaaggatcatcctttcatcaaggcgggtactaccacgtggttttcaccggtggataagttgccgcaagccgtagagcagcagcatgcgctctatatcaggaatgtattctcactgctgaatggtgatgtaaaggcaggaaatatcagccgtgtaaatgagttcttcgtcaagatgaagaaatatcaggaggtaagtagtggtaactcgctgccaacaaatacccagtataaggcagaacgcatcaataatgcctttccttttgccaccattctcttcatggcaaacctcacattgggcttcattgccctcttctacaccatctatcgcatgacgaagaagagagaaatcaaggcattgaacatcgctttacctatcttgcttggcatatctttccttgcattaaccttcggattggcattgagatggattatcagcggcaacgtacctatgtctaacggatatgaaagtatgctaactgtagcctggttcgtgatacttatcagtattttgatgcagttgcgcatccgcatcgtgatggtattcggcttcctgatttcaggattcttccttctggtaagtcatatcaaccagatggatccggctatcggacagatgatgccggtattgaacagtccgttactcagcatccatgtcagcatcatcatgatgagctatgcactgctatccttgactttcatctgtggcatcatgggcatctgcatgcgctctcatggcgacgaactgcgggatttaagccgtctcttcctctaccctgccctcaccacgatgggattcggcatcttcatcggagccatctgggctaacgtgagctggggtaattactggagttgggacagcaaggagacgtgggcgctcatcacctttatgatttatgccgtggtggtacatacgcagagtctaccggtcttccgcaagccgctggtataccacatttacatcaccctggcattcatgagcattgccatgacctacttcggtgtgaactatttcctcacgggcatgcactcgtatgcataacccatcagaagacagaatatatttagtcttaaggtaaaatttattttcccttaaggctaattttattttcccttaaggataaatatatgatggtgttgacatcaatctaatcaagaagtattccggactaacccagaaacagatagaaaaaatccgttcccccacactctttttatatttttttaatatcctacggtcacaattgttaccataggagtatttttaaagccgtaattttgcagccggaaaccaggaatggcagattgccgcctggaagaaaacattaaaataactcattaatttatagcaatatgacagaaaacaagatgttctgtttccagtgtcaggaaacagctaagggtacaggctgtaccatcaagggtgtttgtggtaaggaggctacaacttccaagtggcaggatctgctgctcagcgtggttcgtggcataggaaccatacagcatagcataggcgaagagccgacaccagaggtaacccgtttcctcacggatgcactcttcaccaccattaccaacgccaacttcaacgaccaggatatcctacaaaaggtagataagggcatcgtactgaagaaacagctgctgcaaaaggcagcaagcatgaatatccacctccctgcctatcaggaggtaatctggggtggcgagaagacagactatgaggcagagggcgcccgtgaatccgtgctccgccacgagaatgcagatatccgctcgctcaaggaactcaccatgctcggtctgaagggtatggcagcatactacgagcacgcagcccatctgggagaagagaacagcgagattatcagctttatctgccgtgctctcgccaccatcagcaaccctgatgctgatatgaacacgctgctgggcgtggtgctcgaaacaggaaagtacggcgtggatgtgatggcactcctcgacaaggccaacacccaggcatacggtaatccggaactcaccagagtgaacatcggcacaggcagcaatccgggcatcctcatctccggtcacgacctgaaggatatcgaagatctcctcatccagaccgaaggcacgggcatcgacgtctatacccatggcgagatgcttcctgcccactactatccgcagctcaagaagtacaagcatctggtgggcaactacggcaatgcgtggtggaaacagaaggaggaattcgagagcttcaacggtcctgtagtcttcaccaccaactgcatcgtaccgccatcgccatcggcaggctacaggaaccgcgtcttcaccaccaactctactggtttccctggctggaagcatatccaggcgggcgccgacggccacaaggacttctccgaggtgattgcacttgccaagacctgccagccacctaaggagatagagacaggcgagatcatcggcggttttgcgcatgctcaggtctttgccctggcagacaagatagtagaagctgtaaagagcggagccatccgcaagtttgtggtgatgagtggctgcgatggcagaatgaagagccgcaactactacgaggagtttgccaaggcgctgcctcaggatgtagtgatactcaccagcggctgtgccaagttcaagtacaacaagctcaatctgggcgacatcaacggcattcctcgtgtgctggatgcaggtcagtgcaacgactcctattcctgggcggttgtggcattgaagctgaaggagatctttggagccagcgacatcaacgaacttcctatcttcttcaatattgcctggtacgagcagaaggcagtcatcgtacttcttgccctgctgcatctgggcataaagaacatccatctgggtcctacgctcccagccttctgttcaccagccgtactgaaggtactggtagatacctttggcattgccggaaacggaacggtagaagaggacatcaaaaaatatataggataagaacagcagctactgagttaagggagaatctgtaaaactcggggaaaaaaacaaaagataagttttcatgtttaaaaggcactttgcaataacactctcgatagtgttgcaaagtgccttattttttgagcgaacaataaatcgggggaaaatgcgttattgaatataaaacttaaaagtatgaaagaatcaatattcgttaccttgcagaaatgcacagtgtttgaggggtttactccagaggaaatcagagaggcactgtcgatggtaagctacaggatggtggagcttgctgccagggaaacctatgtgctggcaggaatgccctgcagatatgccgacatcattgtcgagggggagatgatagcccgcatgtcgggattgtcgggcaagcaggcccaaatagagcggctgggagaatcgatgctgatagcccctgcctatatcttcgcacatcataacgagatgcccgtaagcgtggagacaagcaagaagactaccctcctgcgcatgaggccttcggaactgaaactgctgatagataccgacgaacgcatacgctggaacttcatccagcacctgtcaaggatagatatcttcctttcgcagaaaatgcgcatgctctcccttttctccgtcaaggagaaggtggcgcaatacctcatcaagatggctaccgaacagcagagcagaaccatccgactggatgtcagccgccaggaaatggcggatatcttcggtatccagaagttctcgctcctccgctgcctctccgaattcgaggagaagggtgccatcaggattgagggcaagaccatcaccatactcaactcggatgaaatgaaataaggagcaggaatgaatattcaatcattttttaacagtttattaagagttttttttgaaaaaaaagcgtaattttgcagtgaaactagatgttgaactaaacgaatggcgtatgaaacaggtagaagaaagatacatcagcttgctgaccgacttcggcttcaagcgaatattcggaacggcaatgaacaaggatttgctcatctgcttcctcaacagcttgtttaatggcagacaggttgtgaaggacgtgtcgtatctgaatccagagcacgtaggaggcaagtaagatggcatatcgtgatatcaaaaactctattgatacggcaaagcaagaaggtaagaatgagaaagccttggaaattgccaagaacatgcttgccgatggtgttgacatcaatctaatcaagaagtattccggactaacccaggaacagatagaaaaaatgaaataactaatagaataaaaaaatgaagaaaaaaatcaagttggtaggctgggcatcttgggaatcctgctcatagctgtagcaacattactgttggcacgctttgttttcaataaacaagtggaagcttatctttgccattcgctgaagaatgaaatggtagaaaaattaaaagacgctggcaaatatgtaccagatactacgtcctataattttgcatatcagaaagattctgtccaatcacaaaaaatccgtgaatatttcaaactcgatacagttttatcttccacaatgccaacatgggacaaggccatttcactggcacgttttgtagcggaaaacattcctcatgccaatcaaaagattaatccaaagagacgtaatgctatagatctctggaaatacactcgatcgatagagcctgcattcaactgtcgattacactccatcctcttacacgaactattgctgtctgagggtattgtaaaccgctttgtaacttgtcatcccgcagattccgaggattccgactgccatgttgttaacctggtgtggctgccagaattacagaaatgggctatgctagactcggatatgaatgcttgggcagaagatgaaaaaggcactccactttctcttgcagaaatgcgtgagcgatatattgacggcagagaaatcgtttaccgtcctctcttgaattcagataatgattttgtttattacagggcatattgggcaaaaaacttatactggtttgatacttgggagacaacaggctatggtcgcgaagataataatcctgcttatcgaaacaagaatcgccatatcgtgcttgttccttttggattcaaaggttttgaacttcccgaccattcagtacagacaacagatgcttcacgtttctgggcagctccccaaaattagtaactgccatttactagatctaccccaggaacaaatacaataggcttcgatggcaaatgaagcctattacattgactaacgaaagtagtttcatgcgcccatgaaactactttcgttttttattgctttttctactatattttataccataaaaacggagcgccaaagactgtagcgggcttcggggttcaactgctccaactgctggaagacggcttgcatatccgaacggcgggtagtctcttcgtaaggacacaacgccttctgcttagtgaaatgcgactcttctgccaccttacggatatccgcctcatgcaccagacaaagggggcggataatggtgagcggataatgttttaaaggaagactgggctgcatggtggaatgagaaccctcgaaggtgatattcatcagcagggtaacgaggatatcatccatatgatggcccaaggctatcttgttaaaaccattatttaccgcaaactcgaagagcgtcttacgtcggttccaggcacagaggaagcaacgggtcttacggggatcggtggattcatcaaacgaactatgaaggatatggagcttgatgccattctctgcacagaaatcctgcagataagagcggtcggtctcgtaaggaatgttatccatgatgatatgagccgcctccacttcgatatgaggtttatagatacgggcacgctgagccagcaaacggacaagttccaatgaatccttgcctccactcaaggcaataagaatacggtccccatcctccaaaagatgatagtcaacacatcctttattgaatcgctttaatactttctgttctgctttcatcatattctgaaaagggaaaagaaaagccgcaccctataaacagagtacggctttatcaagatacatctctctaccttgcagaagagaaacgacaatttaaacttcaaatataattctatcttacttagcgtaagctacactacgagtctcacgaatcacagtaatcttaacctgaccaggataagtcatctcattctgaatcttggttgcgatttcatcagaaagcttgatgctctcttcatcgttcatcttatccgcaccaacgatgacacggagctcacgacctgcctggatagcgtaagtcttggttacgccaggataactcatggcgatagcttcaagatcgttcaaacgcttgatataagcctctacaatctcacgacgggcaccaggacgagcaccagagatagcatcacaaacctgtacgataggagccaataatgtgttcatctccatctcatcatggtgagcaccgatggcattgcagatatctggtttttccttatacttctctgcaatcttggcaccatacaatgcgtgtggcaattcactctcctcatcaggcaccttaccaatatcgtgcaaaagaccggcacgcttagccttcttaggattcaagcccaattctgaagccatgacagcacagaggttagctgtttcacgagcatgctgcaagaggttctgaccataagaagaacggtacttcatcttaccgatgatacgaatcaactctgggtgcagaccatggatgccgaggtcgatagctgtacgcttaccagtctcgatgatttcattatccaactgtttcttcaccttggctaccacctcctcgatacgggctgggtggatacggccgtcagcaaccaactgatggagagccagacggcaaacctcacgacgaacagggtcgaaggctgagataacgattgcctctggagtatcatccactacgatttctacaccagttgcagcttccaaggcacggatgttacgaccttcacgaccgataatacgtcccttcacctcatcattgtcgatatggaaaacgctgacagagttctcaatagctgtttcagtagcaacacgctggattgtctgaatcacaatcttcttagcctgctggttagcattgagtttggcatcatccataatctcattcacatagcttgcagcatcgagtttagcctgatctttcagactctcaatcaatctctgcttagcctcttcagcactcagaccagaaagttcttccagtttagcctgctcctgtttctgcatcttatcaagttcctgctgcttgacagacaagagtttcttctcgttgtcaacacgctgctgatactgatcaatctccatcttgcgtcgaccgaggtcttcctgacgctgattgagagaaatctcgcgctgcttcaacttattctcattctgctggatgcgagaattacgctgctgcacttctttttcgagttccgccttcttgttgaggaatttctccttcacttccaaaagcttcttctcttttactacttctgcctctttgttggcagcttctatcatttcattatattttcccttaatgacataacggaaaatgaaatacccagcagcaccgccgataacaagcgccaccaaggctgctataatagttactatcattatattatatatatgtttattaatattcttatttcaaagcgtcttcaatctcggaggtaagcttctcaagaatatcatcataaggtttcgtatcattccgatccgattccttctcatatctcaatgccacatcaatgagcgccatatacaggatttccttatcgctctttctgcctttgaaaatcttggtatatgagtttacaatatcatctatcagcttagctgatttacgataatattcctcgtcttccctaggtattcttaccgaaagatctgtatcatagacgtgtaatcgtatgagtaatttatcttgttcttgttctgccatcgttccgatttttacttttcacccaatagtgtgatacacttattgacatctctgatgagcttggcgatgcgcttctgagtagcttccatatcattgtcagaaatcgtcatcatctttgccatcttcaagctgtcgtaatcactctgcgcttgagccaacttttcctccaatgccttaattttggcatcgcgctcatccaccatcgcatagagttcagcattctcttgcttgacctcgtcaaacttaagaatcatctgccttactcttgtggcaaacgtattaattgttttctcatttgcactcatgactattatttttggctacaaatttaagagaattatttgaataaaacaaatattctgctattttttttcattttgggcgcaacatttgttactttcccatcttctgctttgccttttctacgtcttcatctgatggacgtggctcttttttggcaagcatcaatacctggaaggtaaagtcggttacccattgctggctgaacgccaagcgcttgttgaactggcgcaactgaagcacggttttcagcacactggcatcagagaaatcgttcttggtaaagatatcttctacagttttagcagtcatcttatatagcgaattcttcatgaagctaggcaaacggagtttaaacttcatcagattgcccatcagcatcatcagatcctgcgtaaagttttggaactggataagatatacattgacatcctgcagtttgtggcagttcttacggatactggaatctatttccttgaagaaggcatcatccgtatcatagatattcttcatcattttcttcacctgtgctttttcgccaatccccagacgattgttgaccgtcggaacatgcagacttgtcttgaagacacgcaagtctggcaacatggccaaattggtgatacctaactgagaagcaagtgcagcctgaaagtatacacggaccaaggtcatgtaatcttccattccacctacctttttatcgtcgtccttacgaccgaatagtttagcaaaaattcccattcctttattattttattttctatatctatttaaattgttctgcaaaaatacaataaaatcagtaaatacccaaatcaaagcgacgttttttatataaaaaggtgctttttttatcaaaaaatgcatttttatggcttatgatttcactcattcaactttttttagtaactttgccgcgtttttaagataagactatccaacttcattatattagaaatagagaagatatgaaaggaatcgtattagcgggaggttcgggtacaagactttaccctattaccaaaggtatcagtaagcaattgataccaatttttgataagccaatgatatactaccctgtttccgtgctaatgttggcaggaatcaaggagattttgattatatctaccccattcgacttgcctggtttcaaacgtctgttaggcgacggcagcgaattgggtgtacacttcgaatatgcagaacaaccatcacccgatggtctggctcaagccttcatcattggcgagaagtttatcggtaatgatacagcctgtctggttttgggtgacaacattttctatggagccggttttacgggtttactcaaggaaagtgtaaaagctgcagaagaaggactggcaagcgtatttggctattatgtcaacgatccggaaagatatggtgtggcagagtttgatgaaaacggcaactgcctgagcatagaagaaaaaccggaaatgcctaagagcaactatgcggttgtaggactctatttctatccaaacagcgtggtgcatgtggctaagaacatcacacctagcgcaagaggtgagttggaaataacaactgtaaaccagcactatctgacagaaaaggctctgaaggtaagaaccttacagcgcggtttcgcctggctagacaccggcacgcacgatagcctttcggaagccagcacctttatagaagtcatcgaaaagagacagggtctgaaagtggcatgtctggaagaaatcgcattcaaacaaggatggattgacaaagaacagttgctgaaacttgcccaaccgatgctcaaaaacggttatggacagtatctgaaagaactagcggcaagcagatagcacagattctatcatttatcttatacaaatataaaaaggtgtaaacacaatagaatataaaataatggaagaaacaaagaactttgatttaggacgtgatcaagagcaggaagaaaagtcatctattgacttccagctgatttattctactcttatcctcaactggaaatggttcgttctatcactcattgtatgtttgggattgggatatctctacatacgccatgcaagaccgcaataccaggcaaccgctaaggtactgataaaggatgatgaccagagaaagaacagaggaatgggtaacagcatgattcaaaatgctgcaaacctcggttttatttcaaactcaaacggtatagacaatgagattgaaattctttcggctcaagacttggctaaccaggctgtagtagacatgaaatgctacgtgaactattaccataaaggaaccttcagggatcagctagtctacaaagagcaggaggtcagcgttgacttagacctggctcatctcaagaagctgaatgctcctatcaagcttcttatagagaaaactggcagccagtatcaggtaacaggttcatactacatacctgtagatgccttttcctatcagaaggatcctgtaaagattgaaaagactttagctggtctgccagcaagcatcaatacacgtgtaggaaccctccacttcactcagaacggcaaatacgcattaaaagacggtgagagcctgaaggtgattatcgtgtcaccagaaatggcggctaagggctatacaaaagcactgactgtcagccagacttcaaagactacaaccatagccgaactggtgatgaaagatgaagatcctcagcgcagcattgactatctgagaactctggtaaatgtttataaccgccaggccaacgaggacaagaatgaaatttctttccgcacagaacagttcatcaaccagcgtctggagaagatcaacaacgaactgggcaatacagaaggccagctcgaaagctacaagaagcgtaacaatgttgtagagatgaagctcaacgcaacagctgccatcgctaactcagacacatacgcccagaaactccaggaggctaacacacaggttgaacttctgaatgagcttggcaaatacatgaacgaacctggcaacagatatcagcctatcccatcaaacgtaggtctgactgatgaaagttcaacagagttgattaacgaatacaacaagatagctctgaaccgcaaccagatgttgcattctgccagtgagaattctccaaccgttacaccattatcagcccagttggatgacctcacaaaatctatcaagcgcgccatgcgccaggctaagcttggtatggaaatccagcgtaacagcattgccaaacaagctgccatgtatgccagccagataggtaactcgccagagcaagagcgagttcttacacagattggtcgccagcaggaagtaaaatctggtctttacctgatgcttcttcagaaacgtgaggaaaactccatttcgctagcagcaacggcagacaagggtaaggttatcgatgctccttcattggaaggaaaggttagtcctaagaatcctatcattatgctgatagcactggtactgggtattgcaatccctgccggcatcctcttcctgaaagaattcttcaagtacaagattgagggacatgaagacgtgctgaaactcactcagatacctgtcattgccgatattcctgtggcaagcgacgctgccaagaaggaaggaaaggctgacattgtggttcaccagaatgtaaacaacctgatggaggagattttccgtggcctgcgtaccaatattcagtttatgctgaaagaaggtgagaaggtgatgatgtttacctcttctacatcaggtgaaggtaaaacattcgtggcatccaatatcggtatctcgctcgccttgctgggcaagaaggttatcatggtaggtctggatatccgcaagccacgtctggcagagctcttcgagattgacaaccaccataatggtatcaccaatctgattgtacacgaccataatacatgggatgacattcagaaacagattctctcttcgggtgtcaacagtaaactcgacctccttatggctggtcctgttcctcctaacccaggagagttagtaaccagagcaagccttgacgacattatcagtcagttgaaggaacattacgactatgttatcctcgatacggctcctgtaggtcttgtaaacgacagcttgcagcttggacgtctggctaatctctgtgtatacgtctgccgcgcagattatactccaaaggctagtttcggcatgatcaatggtttgaaagccgagaataaattgcctaacatgtgcttagtactcaatggcgtcgacctctctaagaagaagcacagcttctattatggtgtcggtaagtacggcaaatatggtaaatatggcaactatggttcttatggatcatatggaaaatatggcaaatatggaacttacggccagtatggcagctatggtaactatagcaacagccactatggcaatgccaacgacaacagtatcaagaagtaatcaagaacatacatacaacaaagaaaagagtctttctatccagataggaagactcttttagattttaaaaacattaagactatatggcaacaattgcagtagattttgatggtacaatcgtaacccacgagtacccaaagattggtacagagctacctttcgccacagaaacattaaagatgttgattagagaccaccacaagcttattctatggagcgtacgcgaaggaaagctcctagacgaggcagtagaatggtgtagagaaagaggagttgaattctgggctgtaaacaaggattatcctgaagagagtctggagaacaataaccacttctcccgcaagctcaaagccgactggttcattgacgaccgaggtatcggcggtttgcctgattggggggagatttatcagattatcaccaaccataccagttatcgcagagtactgaaacagaagttcggcgaacagcaggaagctcccaaaaagaaacattggtggagccgcggataaaaggcttctccaaaagatattcttgtagatacgataaaagatatcccaataaataaaaaaggtgtattgctcattggcaatacaccttttttatttattggaaatttactagtcttgaattagaagaacaagtagcggttatctactacatgagcgttcagataaagctcgttcatgaagttacctgcatactgcatagccttctgacggcacttctgctcgtatgtcttgtcatcgaacttaacaggacggttagtcttgttagtaacctggaagagataaacacctgcgttacccttcactgcatgagcagagaaagcacccttcttagtacctgcaacagcaccagagagagctggctcgctagcgccagtagctgcgatgaatacaggagcagcgaaagtaatctggtttacagaagaaaccttaccacccttagccttagcagctgcgatgttcttaacaccattcaacttagcctctatcatctcagccttcttatccttgagcacctctgccttaacagtctccttgacaactgcatcattcaaatcacgataaccgatatgatgaatcttatcaagaaccacaaccaacaggtggttgttgtcaccacactcatagagaggtgaaatctcaccttccttgctatcgaagatccacttcaaagcctcgcgtgtagaatggatgtttgctacatagtgaacagaagttgtaatatccttcaagtcctgaaccttgtaaccttccttagctgcattcttcaagagatcctctgacttaggattagcacttacgaaactagagaacttgttgtaagctgtacggtaagtaccctgagagaagtcgataggcttcttaataacggcagcagtatacttgctgaccattgccttgcggtcaagaacctgaagaactacatatccctgacccaactgaagctggttcaaagagttaactgctgcagtattcaatgtattgatgaatgtcttgttgtccttatccatagactgggcatactcatactgcttggtagtcatccaagccttgtcaccagtctggccatacttctttgcgatagcctcgaaatcagcaccaccggcaatagcgccctgaatagaatctgccttagtcttagcctcagctactgagttagcagcaacctgaataacacgatactgtactgaatctggcaattcctgcttagctaccaacttaacgatgttcaatgtattgtcaccggcattagcctttacagtagaggtagaacctacagccatagaatcaagctgagcagcgatatcacgtgggaaagcatcctttgaaacaggaataccaagatatgctacagtagaagctgacttacgtacaacctctgtaggatctgcagcagcagccaactgtgagtgataacctgcaaattccttgttaagagcagcacggtctgcatttgaagcctgaacctcgatatcaacgaacttgatgtcacggctctcaacaggctgcttgaagcgtgccttgatctcatcatacttagccttcagatcgctttcagaaatctttaccttatcatcctggatgtcagagtaagggaaagcagccaactgaatctggctctcttcattctcctccttgaaagccatctttgcctctacagggtttgacaggaagcaaccggcgagaagagcctgatacttctgagccaaagtctgctggcggagagtcttctcgatgaatgaccagtagttgtaaatcttggtatactgatccatcatctgtgcgttagcagatgggttagccttctgtaccttgtagtctgccaagaacttctggagagaagatgcatcgaaacgacctgtctgctgattaacgaaaggagtctgctgaagcatagggtttgtacctgtcttcaagatgtcctgaagctctgcgtcggtcacagtaagacccaacttgctagcttccttagcgataatctggttctggatgtaggtattccataccatatccttcacctgattcatctgctcttcaggaagattttcctgaccctgttgcattttaataacttctgaatactcatcaacgagcttctggaaatcctgcacgctgattttttcgcccaaaacctcaccaatctgctggcgctcattattctttgctgaatcgcaagagcggaaagcttcctcggcaataaaggcgaaaaggccgaaactgatgatacaaaccagtatcacgcctctttttctaattgttcctaatgctgccattacgttttaattattattattatttttattttttcctaagtttagattgaaccacttttgatgctagtagccaattgtctgcaaaaatacaaaaataatacgagaaaagggaattttttgctatcttttttgactattacctcaaaaaaaagcaaaaaattcccttttcccgctcagctatttgatgatgtggagtttaacaagctctattttacgcgatgttgacttgataatcttgaactcaaagttatcaaacttaatcacctcgttgagtttaggaaaactctgatattcatgcaatatcaaaccgcctacagtcatatattcatcactttccggcagttcaagaccaaacatatcgttcaccttgtcaatctccagtcgtgcagaaaggagatagtcaccatcatcggttttcttagctacatatttggctgagtcgtgctcatcttctatatcaccgaagatttcctcaacgatatcttccagactcaccaaaccgctggtacctccaaactcatctacaacgatacccaaagacttcttctgctgcaaaaaagtctgcatcagtttctgtgcctgcatcgtttccggcacaaaaggaagtgtacggatatgatcctgccaacgtgaaggatgatggaacagttcggaactgtgaatatatcccgcaatatggtctatatcctcttcatatacaatgattttcgaattaccactctctatgaatttctgctgcagttcttcgagagaagtatccatttcaactgcctgaatctccgtacggggcaccatacagtcgcgtactttagtatcggagaaatcaagggcattctggaatatcttcacctcatcattaatttcatcttcattggtagcactatcgatacttgactgcacaagataatcaaggtctaccttagaaaagccttcatctgtcccctctgcatccatcttcatacccaccagacgcagcaggcacttactcaagaaagtactgaacttgctgataggccacaataccacatagcacagataagctatcggactgaagatagaaagcaagcggttcggattagacttgaaaagcgtctttggcagaaactcacctgtaaagagtactatcagcgtagacagaatggtatctgcaggcaccgtaaaggctgcatcaaaacctgcgaaaatcgtattgtcaaaaagacgggctatcaggataccataaactacaagggctatattgttgcccacgagcatggtactgacaaagccattcggatgattataaaacaaagataacagtcgttgcgtaaggccgtttttctccttatccatctccgccaacatacggttggaagagacgaaggcaatctccattccgctgaagaatgctgagaagaccatcgtaatgagaatgcctacgactaaactcatatccacctgttcattcattatatctttttctttttaattagtgcatgataggaatcgtagtggctctgacaggtgtagccggctgacggaagttattcttgacagaatcaggctggctgctcaacgtatcggcagcaccaccacctcctgtcaggtcgcccttttcaaagctacccttcgaattgctcacataatagcgcgtcatcttttcatcactccagaaatgagaaccctgtagtgttctttcaggagtaacaagtttactgaatacgttacttgacaattcgtgcttattctggtcccaagtaagttgctcactattgaagcgcaaaccatctttggtcaggatgctcaccctaccataaagcttccatatcttctgctgatcataataataagctgtatcacactggatataactattaatatggaatttctcatcaaactgctccagcaaaagtcccttatcaaagatccacaaagatggattcttgctggtattcacctcccaccgttctgttacgatgcgatatttcataactccagagtcgcttaccaatgtatttacgccatacgacgtcatcatcgccaccgagtcttgcggacggatggcgggcgcagtatgttctacctggttctggcaaccagccaaaatcaggaacatcaggataccgacaacataagagccttttattctatacattattatatagagattctatacattattatatataagtggaagattaatccatcttccacttcttaaaccaatcctcgttgaatgtgaatccgatattgatacggaaagaattttccttaatcagatccttagccgaactcttcacccactgaccgctgatattcagcatagagcggttgttataagagttcatgataggaataccgaaaccggcacttacagagatttccttcggaccatcaacaccattcatcttataataaggtgtggcgtagctggcacctacccgatactgaacacgcttgaagaaagcacggctgcgttctccatagcaatactgggcaccgagattgaacttgcttctatccttgtagataccatttttcaaggcgtagttggttccatcgaaactaggatagcccaagctaccccacttctgcagactgtaatcaaagccaaccttccactggttgttatgattccacatcacacccgcaccaatcatggtaggcaacttgtaagccttgccgatagagtaagcggtggtatcggtaacaccgttctgggtatcattagaaatgattttcatatcagcagaagccccgagaccatgtcctggcgagaaggtgacacccacggtagcccaatctttctttgagaactgatgggtatactgtacaccgaaatcaaccttatagctgttcacctgcatagaatagtagcgggtgagggtcttgtaataagaattgctgtagctgtttgctacacttctgtctatactaccccagagatatgagaagttggcacctacggccaagcccttgaccggttcccaacccgcaccgatgtatgcctgatgcaaaccaccatcgccggaataagtattagtatagtaagcttccttgtcagcattcacccattctgatgcagaataattatagccaacattggtaaaaggaatgataccgaagctcatacctacatgtggcagcaagcggaagcctgcaacaacatactcaaaatttgagttgttggcattcttcttcacaccattctcttcaaaatttgtcacctgaccagagataccggcatcaaggatgaaagtcatcgaatcaatcgaagcataagatgcagggttgagatagtttacctgattatgctcatgaaagccaagaccgactccattcataccgcgattaaaaccagaagtctggtccgacaagatgccaagaccatactggctgtatggcgaattagtaccactttgggcattaaccataagggctgaacccaacaatagggttgctaaaaaaagctttctcattctttaataatcattcaaaattatattcagagtgcaaaagtattaaaaaaaatctagaaaaaagaaggataattgaaaataataaggtatttttgcatcgtgaaacgttttaagcatatttttagtgccattttagcagtaattttaatcaatttaactactgaagtggctgcacaggttttttcaagagacaaagactctgatatttctgtgcagaacagtcgtgtcaatgaagaagctactgcgtggctcgattctgttgacatttctctcctgacttgcggaccaggtcaggaggtgtggtcgtattatggacataccgctctacgcatccagaacaaagctatgggaacggatgttgccgtcaactggggtatgtttagttttaaccaaagttgcttcgtactccgttttgttttcggactcaccgactatcagattggcatctacccgatgagcgacttcattgccgaatatgcacatgaaggcagatgggtaagacagcagcgcctccgtctctcccgtacagagaaactgggaattctgagaagcatcgacaagaatgcacagccggagaaccgcgtataccgctacaatttcttctatgataactgtacgacccgggcacgcgagatgattctctccaacattgggaaccagagtaccaactttaaagatacccctaccacttttacctacagggaagagattcacaaactcaacggacagcaccgctgggcaagattcggcaatgaccttcttttgggttgtcaggcagaccgccctatcacacaaagagaatgggaattcttgccagacaatctgagcaaggactttgccacagaaggaagaaccgactttattgatgcatctcagactgcagacggcaagaccaatgcaacaagtgccagcggctatatcactctggtagatgaaacatccgatattatcccagcccaggcacaaataatagacgatactcctgttacaccacaaatgatagccatagctctggcaatcatcatcataggaacaacggtaagagaatgtgtaaaaaagaaaaactactggtggtttgatgccatcctgcttgtcctgacaggattaccgggactgattctctttaccatgatcttctcgcagcatcctaccgtacagataaatttccagattctgatactgaatccgctcaacctcatctttgcctggaagactgtcaagaggatgaaagcaggtcgtcagtattggtatttcgaacttctgggatggcttctgctcattgccctgttcatgcagatatggcagaactatgctgagggtatgagtattttggcactttctttgctagcgagatactgcgtcaaatcgaccatgatggatttaagtccaaacaattatggtttgcagaagcatatcgtaaagaaattcagaaagaataaatagacattaaaatatacgtaaggaaacgattggcacaatatcgttttccgtacagaagaagaagataaacaacaatgatggtaaacagatatatcacagcccttttggttgtcctggcggcaaccggcatggaggcgcagacttatcagcaggcgctgaagtttgcgcttacggatatatcctacgatgaattcatccagcaaccggaggcgaaggcattggaggaggacattctctgcgtgctcaaagccatcaaagcggcatcagaagatgagagcatcgcaacgcatcatcctatcctggcggcaacacttgccgccaattcttctgacattctgacagacattcattcacatatttattatgaatcccctacggagcacagacacaaagttccgtatgggagtatcgttattcgaggtccagactgctgattttatgctttcagtaagcaaaactcagaagatttgccataaaaacaggtaataattggcaattccttgcagatttacagatatttttagtaaatttgcaagctagtaataaacaacaggagattttactcccaaacatcatcgaataataataaaaaataaatatacaatgaactttaacaaaattctccagtcattgtttggcaacaagtcaactcgcgatatgaagttgatccagccaatcgtagaaaagatcaaggcagagtatcctaagatgcaggccttaagcaatgacgaacttcgtgcaaaaacaaaagaacttcagaagtacgtacaggagtacgccaaggaagagaaggctaagattgctgaactcaaggctaaaattgaagacactcctatcgatgagcgtgaaggtatcttcaaccagatcgacaagttagagcaggaagcactcgacaagtatgaggaagccctcaacgaggttttgcctcaggttttcgctatcgttaaggatactgctcgccgtttcgctgagaacgaggaaacaatagttactgctaccgacttcgaccgcgagttggcttcaaaccctgctaacgacttcgtaaccatcgatggcgacaaggctatctatcacaaccactggactgccggtggtaatgatatgaagtgggaaatgatccactacgatgtacagctcttcggtggtgttgttctccatcagggtaagattgccgagatggctaccggtgagggtaagacccttgtaggtacaacacctatcttcctgaatgccttgactggtaatggtgttcacgtcgttaccgtgaacgactatttggctaagcgtgactctgagtggatgggacctctctatatgttccacggtctctctgtagattgtatcgacaagcaccgtcctaattccgacgagcgtcgcaaggcatacctggcagatatcaccttcggtaccaacaacgagttcggtttcgattatcttcgtgataacatggctaccaacccagccgatctggtacagcgccagcacaactacgccatcgtcgatgaggtcgactcagtattgattgatgatgcccgtaccccattgatcatctctggtcctattccaaagggcgacgaccagatgtttgagcagtatcagccattggttgagaaactttatgaggtacagcgcaagcaggctacagaattgctcgccgaggctaagcagaagattaacgaaggtacaaaagctaagaatcaggaactccttgatgaaggcttcctcgcactcttccgttcttacaaggcattgcctaagaacaagccattgatcaagtatctttctgaggaaggtatcaaggctggtctgctgaagaccgaggagtactacatggcaaacaacaaccgtgagatgcctaaggctacagagccattgtacttcgtagtagacgagaaaatgaattctgccgaccttaccgataagggaaccgactggttggctaagcaggtaaacgacaaggaactcttcgtattgcctgatatcacaacagaaatgagtgaactcgaggcacgcacagaccttaccgaccaggagcgtcttgacaagaaagacgagatgctggctcactatggtgtacagagcgaacgtgttcacaccttgcagcagctcctgaagggttacaccatgttcaataaggacgacgaatatgttgtcatggacggacaagtgaagattgtggatgagcagacaggacgtatcatggaaggccgtcgctggagcgatggtttgcaccaggctattgaagctaaggagcacgtaaaggtagaggctgctacacagacctttgctaccatcacacttcagaactacttccgtatgtaccacaaactcgcaggtatgaccggtacagcaagtacagagtcaggtgagttctgggatatctacaaactcgatgttgttgagattccaaccaaccgccctatccagcgtaaggacttggatgaccgtgtatacaagactgcccgcgagaagtatcgtgcagttatcgacgaaatcgaggaaacacgtaatgctggccgcccagtcttggtaggtacaacatctgtcgagatttctgagttgttgagcaagatgttgaagatgcgcaacattcctcataatgtattgaacgctaagctgcaccagcaggaggctcagatcgtagccgaggcaggtcgctcagtaaacggtaagggtgccgtaaccatcgctaccaacatggcaggtcgtggtaccgatatcaagctgactccagaggtaaaggctgcaggtggtcttgccatcatcggtacagaacgtcatgagagccgccgtgtagaccgtcagctccgtggtcgtgccggtcgtcagggtgacccaggttcttctgtattctatgtatcattggaggataagctgatgcgtctgttcgcttcagagcgtatcgccaaggtaatggaccgtctcggtttcgaggatggcgagcgtatcgagagcccaatgatcagcaagagcatcgagcgtgctcagcgcaaggttgaggaaaacaacttcggtatccgtaaacacctcttggagtatgatgacgtgatgaaccgtcagcgtaccgttatctacgagaagcgtcgccacgccctcatgggtgagcgtatcggtatggatattgccaacatcatctgggaccgcgtattgaacatcgttaacaacaacgacttcttcggtgccaaggaagagttcctgaaagttctcgctatggagattccattcaacgaggatgagtatgagaacggcagacgtgaggatttggcagaacgtgctttccaggaggctatggctacattcaagcgtaagacagaccgcatccaggctacagctatgcctatcatcaagcaggtatacgaaaaccagggtgctatatacgagcgcatcatggtgcctatcacagacggcaagcgcatgtacaatattccttgcaacctcaaggaggcatacgagagcgaggctaagaacgtagtgaaggagtttgagaagagcgttgttctccagattatagatgacgactggaaggagaacctccgcaagctcgacgaactgaagcactctgtacagaatgcaagctacgagcagaaggatcctctcctcatctttaagttggagagtgccaaggtttgggatgccatgatcaatgacatgtacgaccgtattgcaagtatcctgatgcgtggtcagattccagtaatggagcaagagcagccagttcaggaggcagctcctgagcagcacactcagcagaactatgtagagagcaaggtagatttggatgcagagcgtgaggcacaggaggcagctgctaaccaggatacccgagagggcgcacaggtaaaccgcactccttaccgtgcagagcacatgccacgtcctaacgacccatgtccatgcggaagcggcaagaagtttaagaactgccacggcagaaacctgtaatcacaataaatgatgatgctcttatatatataataaggtataagaacattcatcatcagaaataatgataagaatacctagatttgatgatactctcatcatttctaggtatttttgttttaaaactacattattgctaccaagttgcaaaaaattattagtatttttgcagtcgaaaagaaaaaagagctgacaatgaggtcatgccccaaagaaaagaacaagattaaaacaaggaaagatatatgaaattatcagaacttaaaacaggtgaaagcgccgttatcgtcaaggtatcaggacacggtggcttcagaaagagagtcatcgagatgggattcatcaagggcaagaaggtagatgtactccttaacgccccactccaggacccagtgaaatacaagattatgggttacgaggtgtcactccgccacagcgaagccgaccatatcgaggtggtttccattgatgaagccaagaacgatgcaaagctcagcaaagcggaagaagaagaccgccaacaggtaattgactcaaaagtagtagattccaacgatagcgacgagcaggcgctcggcgacaagatgctcgtagctgaaagaaaagacaatgccagcaacgaagccctggctgaacaggaagcagaaagactccaccacgtcatcaacgtggcactagtgggaaatccaaactgcggcaagacttccctcttcaactttgcttcgggagctcacgaacgcgtaggcaactatagcggtgtaaccgtggatgcgaaagtaggtgaagccgatttcaacggctaccacttcaatctggtagatttgccgggcacctattccctctcggcttattcgcctgaagaactctatgtgcgcaagcagctcatcgagcatacgccggatatcgtcatcaacgtcatcgacaccagcaacctggagcgcaatctctatctcaccacacaattgatagatatgcacatccgcatggtctgcgccctcaatatgtttgatgaaaccgagaagcgtggcgataacatcgactacgacaaactgggcgaactcttcggtatctcgatgattcctaccgtcttcaccaatggccgaggcgtggacaagctcttcgagaccatcatcgaactctacgaaggcaaggaagataccagtgctcactatcgccatatccacatcaaccacggacatgagatagaacatggtatcgagcatatccagaaatatctgaaggcagatgattccatccgccagcgctactctacccgatatctttctatcaagttgttggagaatgataagcatgctgaggaatacgtaagtcatctgaaatcggccaaggaaattttcgcagcccgtgacgaggcagccaagcgtgtgaaggaagagaccctggaggatagcgaaaccgccatcatggatgccaaatacggttttatccatggcgcattgcaggaagcaggctatgaaccgggcaaggcaaaggatacctatcaggtaacccacctcatcgacagcatcctgaccaataaatatgtaggcttccctatcttcatcctcctgctgttcatcatgttctcagccaccttcgtactgggcgagattcctaagggatggattgaggacggcgtggcatggctgggcgagttcatcagcaatacgatgccggatggaccagtgaaggatatgctggtagatggtgtgattggtggtgtaggtgccgtaatcgtgttcctgccacagattctgattctgtatttcttcatctcctatatggaggattcgggatatatggctcgtgctgccttcatcatggataaactgatgcacaagatgggcttgcatggcaaatcattcatcccgctgattatgggattcggatgtaacgtaccagccgtgatggcaacaagaaccatcgagagtcaccgttcgcgtctgattacgatgctgatattgccattgatgagctgttcggctcgtctgccaatctacatcatggtcatcggaacattctttgccatccaataccgttcactcatcatggtatcgctctatctcatcggcatcttccttgccgtgatattgagccgcatctttgccagtttcgtggtgaagggcgaagataccccgttcgtaatggagctgcctccttaccgcttccctacctggaaggcgataggccgccatacctgggaaaagggtaagcagtacttgaagaagatgggtggtatcatccttgtggcaagtatcatcgtatgggctttgggttactttcctcataatgaagaacttgataaccaggctcagcaggaacagagctatatcggcagaatcggtaagaccatcgagcctatcttcaccccacagggtttcgactggaaactggatgtgggcttggtttccggtgtgggtgccaaggagattgtagcctcaacaatgggcgtactctacagcaacaacgacagtttctctgatgatcaggattacaacgatgaagacggaaaatacgaagtcttgaagaagcagatgacttcagacctgaagaagacctacggttacagcgatgccgaggcagcagcgaaggcaacgctcaccgcctactgtttcctcctctttgtattgctctacttcccttgcatcgccacaatcgctgccatcaagggcgagacgggcagttggaaatgggcaggcttcgccgccggctacaccacgctcctggcatgggtagtatcagccctggtcttccagataggatgtttgtttatctaatcaaggtgtctgctttaagaaaacaaacaaagagagcgcacaacacctgaacgacagccgcacaacagctgagcgacgcttgcacaacacctgttgtgcaagcgcacatcagctgttgtgcggcttactatataatatatccagaagacttattctatatacctgaaagacttcaagtaactgttcggaagattttagtcatatactagaacgttatcagtcatatacctgaacgacatcaatcatatcattagaagacatcaaccgtttccttattcaggataatctctttcctacctttgcggcaacaaacgctatcatcagacccaggcaggcggcaatgctgatggcaatgcggagaccggtagcctcagcaagccatccgataaccggaggtcctaccaggaaaccgaagaaactgatgctcgaaacgatggtaatagcgatgctcgccttgatggttcccaattttccagcaatactgtaacagataggaaccgacgaagaaatgccgaaacctaccagcaggaagcccaaggtggcaggaatgagataaggcaaggcagcagccagccacaaaccacccaatatcaaaccaccacaaaccttcaatactctggctgggccgtatttcgtaacaaacccatcagccatgaatctacccaacgtcatcgcacccataccagccacatagcccgcacggataaaagcctcatcgggttttactactgatgaaaaatacacaccactccaatcataaacagtaccttcacagaacatgccggcaaatcccatcaatcctaagagaaacagaatcgggtcgatggtcttgaaagagaacttcggaacatcctcctcttctgctttcgccatggcatcattaacaagaaagcggaaaccgacagcaacgatgagaatactcagagccagaatagttccaaagtggacatctatcgggagtaaagtattggcaaagatggcaccgatgataccaccggagaatccacccagactccacagaccatgaaacgacgacatgatgttgcgcccatacatcttctctaccagacatgcctgcgtattggtggcaatgttcatcagattcgccatcattccgaaagcaataagactcaaaatcagatgaaaaaccgtagtactgctaccgatgcagaaaagaaccagaacatagagcaactcagagaggaccagcatcttcttgctgccaaatctactcaccaggatacccgagaaagccatcatcagaagttgaccgataggaatggcgaaaagcaccgttcccaactggccgttgctcagatgcaacatctgttttacatccggaatacggcttgcccaactggcaaacactactcccggaacaaaataataagccgcaaccgccactcgcttgcgcgccaaatcacttaaattactcaaattactcaaactgactgtcatccttaataatatacctattataaatactcatttctattagcggctgcaaaattacaaaaaaaaacagaaaaagactgatatttgaacaataaatgttgcgccgtttgagatttttgccgtacctttgcactcagaaaaagaattaaaaacaaactagcaatgaagaaacaaacaatgattaccctggcactcgccttgactttggcgatgccaaccctacccgccttcgcccagaaggcgatgagcaagaaagaaatcgccgaaaaagaaaaggcattcaagaaccttcagcatccttggaagggaaagaaagtggcttacttcggcgactccatcacagaccctaacatcaaggcatcaaaagtaaaatactggggattcctgcaggattggctcggcatcaccccttacgtttatggtgtgagcggcagacagtggaacgatattccccgtcaggcagaccaactccagaaggaacatggcgatgatttcgatgccatcctcatctttatgggtaccaacgattacaacaacggtgtgcctgtaggagaatggtacacggagactttcgacagcgtgagagtagcccgccacaagccaagcgaaatggtacagcgccgccaccgccacttctgcatggacaagaatacattgaaaggccgcatcaacatcgccatgtcgaagttgaagcagatgtatcctaccaagcaaatcgtggtgatgactcctgtgcatcgtgctctctttgccagtggtgacaagaacatccagccagatgagatgtacgagaatgcgcgtggcatcttcttcgatgaatacgtgaaagctatcaaggaaacaggcaatgtctgggcggttccggtcatcgacctcaactctctttcgggtctcttccctctttacgatgctggtgcgcagatgtttaacaagccggataccgaccgtcttcatcctaatgatgccggtcactcccgcatggctaagaccatcatgcagcagctatctgcattgccttgcgtattctagaaatccgtaagcggctccgcgtttataccttgaataattaaaaaaaaa

SEQ ID NO: 12116 - DNA, 70564 bp, Unknown
  gut microbiota DNA sequence
gggccaaggcccccggccctcgtccccgggaggggtttccaaaggggagggccgcagcccgcccctttgtgccacgagggggcatgggggacgggtggcgtcccccatgtttcgggtgggggtctaagggggagggacctttgcgccaaaggccccttccccttgccccgtagtgggaactgccctctgcgggagcagacggttttatctgatttccagataaagtaaaaatatcttatttcaagatacatatactcattttaggtgatgtatatgcgaactgagatattgaaatacggaagaatccgagatttgcgaaatgacagaggactcacgcagaaagacgttgcgaacgtgctccatgtcagccaaaacacatatagccaatacgaaattggcgtttcacggtatccgctggacgcaatcatcaaattggccgaatactatggcgtcagcatcgactatttagttggcctgaccgacgaaccgaagccttatccacggaagaaaaaatgaacaggttttttgaatctctcatcaatctcttcttccctccgaaatgccccttttgcggcaaagtcctggacgctgtgggcatctgctccaagtgcgagaaggacctgccgtggcttccggaggaacaggtggtcatgaccgacaaggacctgacctgcgccgccccgctctggtatgagggcgcggtgcgggaggctttgctgcgtctgaaattccggggcggctccgctctggcggagccctttggtgagcttttggcccggtgtgcggcggagcggttcggtggagaattcgacacggtgacttgggtgccggtgagccagaagcgtctggaaacgcgcgggtatgaccagtcccggctgctggcggaggccgtctgccgccattgggacacccggccggtgcaactgctggtgaaggtgcaggacaatcccgcccagtccggattgcagggagaagccgcccggcgggccaatgtgctgggcgtttacgatcctgcggacccggaactgatccgggatcgacgaatcctgctcatcgacgatatccacaccaccggagccactttgtccgagtgtgttcgggtactgcgggacaatggggccgactccgtcctctgtctgacggcagcaagaacgccaaaacgggagaaaaagggaaaaaattcatagatagcgtcttgcaatcagggaaaagcacacgtataatagaaaatgtatgattgtgtgttgaaaaaacgcttataatagatttgcagaaagtgcagcgaggtgtcaatatgacgtttgcaaaagatatcggtatcgatctgggtaccgcttccgttctggtatatgtaaagggcaaaggcgttgtcctcaacgagccctctgtggtggccatggacaagaccacaggtaagcttctgaaggtgggcaccgacgcccaggccatgctgggccgtacccccggcaacatcatcgccatccgtcctctgcgggagggcgtgatctccgactatgacatgacggagcggatgctgaaggaatttatccacaaggtggcgggcttctccttcttcaagccccgggtcatcatctgcgtgccctccggcatcacggaggtcgaggagcgcgccgtcatcgacgcaggcattcaggctggcgcccggaaggtctacctcatcgaggagcctgtggccgccgccatcggcgcaggcatcgacatcacccagcccgacggccacatggtggtggacatcggcggcggcacggcggatatcgccgttatctctctttccggtgtggtggagtctgcctccatcaagatcgctggcgaccagctgaatgaggctgtggtgaagtatatgcgccgcaagcacaacctgctggtgggcgagcgcaccgccgaggaaatgaagaagcagatcggctgtgtcttccccaaggatgaggaagagaccatggacgtgaagggccgctgcctgctgacgggccttcccaaggtcgtgaccgtcagctctacggagatgatggacgccttcgaggagcctgtggagcgcattatggaggccattcactccgtgctggagcggacgcccccggagctggtggcggatgtgtccaccaacggtattatcatgaccggcggcggcagcctggtgtacggctttgacaagctggtcaccgcccgcaccggcattcacaccactgtggcggacgacgccatttcctgcgtggttctgggcaccggcaagagtctggattccctgaacgccatgcaggacggcactatgaacctcagccgccgcaagcaaatgacctaaccagcctctcccccggaattccgggggagtcttcatctggaccggaaactttttcttgaaaaagttgcaaaagcgactgtatcgtccgcccgtttcaggcgtatgatagagaaaaccgatcaaagcgaggatttatgctgacatttaaaaacgttacggtgcgggacgcggccatgctgcggcgctattatgaaaactgcgattacgcgctatgcgaatactccgccggtgtcaagctcatgtggcggagcgcgctgcgttatgcctgggcggaggcggcaggctgcctgatcatccggtgcgaaagcgagggacgggtgtccttcgattatccggtggccggaccggagggggatgaggacgcggctctgtccgccattgaagcctactgcatggaaacgggtattcagccggaaatctccatcgtgccggaggaaaaagcccctgtactgctatcccggtatccttatgtgcgggtgagcaacatccgtacttggcgggactacctgtactacaaggaggacctccagctcttcgccgggcggcgatactccggccagcggaatcacatcaaaaagttctacgcccaatggcccaatgcggagttccggcccattagcgtcaaggcggacgccggggctattgaacagttctgggtagattttaaagcggaatttcccaaggacagcggcagcaaggccatggcggagctggaactctccaaaaagatgatggccatgccggacaagccctggctcctgcggggcggcatgttcgacggggaaaagctgattgccctgtctctctgtgaaaaatgcggtgagaccctcatcatccacattgaaaaggctctctattcctatgccggcgcatatcccgccatggtacaggcggaggtggctgcctttggtgacggctgcgcctatgtgaaccgggaggatgacgccggggaccggggtttgcggacctccaagctgcaatacggccccgccaagctgtctcccaagtatcattttctgcctcagaacgagctgctgcggcacgtttccgcgatcccggaactgaaaaccgagcgactgaccctttccgccatcacggaggcggacatccctgcctataatgcattggtgctggacagtgaccgaaaccgctggtggggttatgacgatgtgggtggtctgggcgcgcctgtgacagagcgcagcttttatgacgtggcccgccgggattttgaaaatcggatggcggtaaacttcgccgtgcggttgaatggaacgctcatcggtgaggcggtgctctataactttgactaccggggcagcgcggagttgggctgccggatcgataaggcctatgccggaaacggctacggcaccgaagctttccggtgtgctgcggaatggggtctgtatcaggtgaatctgagccggatcgtggcaaagtgctacaaggaaaatgaggcatcctacaagatgctgtccgcctgtatgcggcggaacggagaggacgagaccttcttctattttgaaaagctggtctgactgaccaacatgctcaatgccatcaaaaaggtccctgcgtactatgtacgcagggactttcctatatggcgggacttttctttacgccagttcagcctgaccggtgtagagttggtagtagcggccgtgctgggccagcagattctcgtggtcgccccgctcaatgatactgccctgctccagaaccataatggccttggagttgcggacggtggagagccggtgagcaatgacgaacacggtgcgccccgccatcagccggtccatgcccttttcgatgagcttttccgtccgggtgtcgatggaactggtggcctcgtccaaaatcagcacaggcgggttggcgcaggcggcgcgggcgatgttcaaaagctgccgctcgccctggctgaggctgccgccctcactggtgaggaccgtttgataaccgtcaggcaggtggcggatgaagccgtccgctcccgccagccgggccgcggcctccacctcctcgtcggtggcgtccagacggccatagcggatgttgtccgccaccgtgccggtaaagaggtgggtatcctgcaggaccacgcccagtgaccgccgcagagagtctttctggatgtcccggacgtcgatgccgtcgtaggtgatggtgccggactggatctcgtagaaccggttgataaggctggtgatggttgtcttacctgcgccggtggagcctacaaaggcgatcttctgaccgggcttggcaaagagggaaatgtcatggaggatgatcttccggtcatcgtagccgaacaccacgtggtcgaaccggacatcgccccggaggggtaccagggtgccgtccggctttttccaggcccaggcgccggtatcgtaatccgccttggacagggtgccgtcggcgttttcttttacccgttccagcgtcaccttgccctcgtccacctccggctccgtctccatgatttcaaacacccgctccgcgccggccacggcggagagaatggtgttcacctgctgggagatttgggtgatgggctggcttacctgcttggtatactgcaaaaaggccgccagcccgcccaggtcgccactgcggatggccagcagaccgcccacgcagcaggtaatggcgtagttgatgtggctcaggtttcccatggcaggcatcatagcgcccgcataggcctgggcctttgtggccgcgtcccggtaggcctcgttcagtccggcaaagccggctttggcggcatcctcgtggttaaagaccttaatgaccttctggccctcgatcatctcctcgatatagccgttcaccgcgccgatggccttctgctgggcggcaaagtaccggcggctgcggccgccgatggtcttgaccaccagcagcatcactgccagcatggcaaaggtgatggccgtcaggatggggcttaggacgatcatcatggccaccgtgcccaaaaaggttagggagcaggagatcaggctggcgaaactattgttcagcgcctcagacacggtttcaatgtcgttggtgtaccggctcatcagttcgccgtgagtgtgggtatcaaaaaatttcaggggcagcttctgcatcttgttgaacagatccgcccggagctttgccacagtgttttgggccacatggaccatgatccgcgcataaccgtaggagcacactgcccccacaacatagacccccgccatgacacagagcattttggcaaggccgataaaatcgccggggaggatataatcattgatgaggggcttgatgaggtaggagcctgccacggagcaggcggcgctgataaacagcaagatcaccacgatcaccagcagcgccttataccgccccagatagcccatgagcttgcttagggtgccccgcagatccttgggctttcggaagccgccccggggtccaccgggaccgtggcccggtccgcgtttcgtattgttctcagccaccgatgctcactccttcctgctgggattcgtagacctcacggtagatctcgcaggtcttcatcagttcctcgtgggtgccttgggccgccaccgcgccgtcatccatcaccagaatcaggtcggcgtccatgacggacgtcacccgctgggccacgatgagcttggtggttcccggcagatcctgccggaacgcctgacggatcttcgcatccgtggcagtatccacggcgctggtggaatcgtccaaaatcagcaccttcggttttttcaaaatagcacgggcaatgcacagccgctgcttttgtccgccggagacattgacgcccccctgtcccaaatcagtgtccagaccgtcaggcatccgctccagaaattcgtcggcacaggcagcgcggcaggcggcccaaagctggtcctccgtggcgttgggatcgccccagagcagattttcccggatggtgccggagaacagggtgttcttttgcagcaccacgctgacggactcccgcaaatgctccatggtgtagtccgccaccggccgtccgcctacggagacggtgccttcttgcgcctcgtacagccgggggatcaggctcatgaggctggtcttgccactgccggtgccccccaaaatacccaccgtagccccgctgggaatgtggatgttcacatccttcagcacccactccgggctggtttcactgtatttgaaaaacacatggtcaaagtcgatgctgccgtccttcacggcggcgtccgccttggcgctgtcgtcggtgatggcgggccgctcatccaaaacctccacgatccgcttggcgcaggcgatggaccgggtcatcatcatgaacatcatggaaaccatcatcaggaacatcaaaatctgggtgatataggtgaagaaggcggtcaaatcgcccaccggcagcgtcccggcgtagaccattttgccgccgaaccacatgacggcgatgatggtgctgtaaaccaccagcatcatcaccggcatattgatgaccaccatgccgaaggcccgcatggagctttctttcagatcgccgttgcgcttggcgaacttctcctcctcatagtcctcccggacaaaggacttcaccacccggatgccggtgaggttctcctgcaccacaaggttcaaagcgtccgtccgctcctggagggaccggaacagcggccccgctttggtgaggatcaggacgatgacgatcagcagcagggggatcaccaccagaaatacgttgctcaggtcacggctcagtcggatggacagcaccagcgccgccaccagcatcaccggggcccgcaccagcagccgcatccccatcatcagcgtcatctgcatattgttgacgtcattggtcagccgggtcacaagggacgcggtagagaacttctcgatgttggaaaaggcaaaatcctgaatgtgctcatactccgcccgccgcagctccgcgccgaaaccctgtccggcaacggaggaagatgccgcagcccccagtccgaagcacagggagatgacggccatccccaccatgagaaggcccttttgcagaatgtagttctgattcgccgtttcaatgccgatattcacaatatccgccatcaccagcgggatcagcagttcaaaaatagcctcggcagcgctgcacagaacgcccaccgcgatccatttggaatagggccttgcgtatggcccgagttttttcagcatgtagttcggtcctcctctaaattctcgataacgcggtacaaaagcagccgcagagcctcagtctcctccagccgcagccccttgaccatgaccgcttccgcctcctgaaaggcagcctgcaccagactgttcagttcccggcccttctccgtggccgtaacctgcttctgccgctggtcattttcatccgccgtacggcggatcaggcccttttcctccatccggtccagaataccgttggcagtggagggccgcacccgcagatgctccaccacatcccgctggggggcggtgtagccgtggctgctgagatacagcagcgtatgggtttgggagggggtcatgtcataccgggataatcgggcatccatccgttcccgtgccagatgggccgcgtggcccagcaaaggccccaaaaagtccggtccgcaaacaggcttcatatcggtatcagctcctttgtatttagtgccctaatttttagtgtactaaatattatcacactcaaaaacattcgtcaacccaatatttcgcctccatttttgaacattttatgaacagatttattctctttgttattctgtgaacaatttatgaagttttaatatcacctgttgacttttccggtttcacaccgtatgataaagccatagaagcaatcccaaccaatctcattttccctctcttttctctatcttacacagagagacggacggctcacgccgtccgtctttctacgtattttcccgcaaaaaacaactgcctgtaccggttctcaaaacccggtacaggcagttgttttttattgatccaacggtctcagctccgcgcgttcacggccgctccgattccgtcggcgcaggtgcaggaccggcttcttccgattccgtctgcgcggacgcagattcccccggtactttccccgctacgctgtgcgtccggagatagttcagccaaagtcggcagcctgcccggttcagatgaacgccatcgaagctcaactcctccggcagacagccgtcctctccggtgagggccttcgccacatctacataggcgcagccgttttcctctgccagctcccgccaaacctgattataggccaagattcgctggttattgacataggagcctttggtgtcctgttccgccgagaccggcagcagagactgaatcaccagctccgcgtcgggatggtctgccttcagtcggcgaatcaggttttccgcatggccccggaagatgtccgtccccttccagcccagttcgttgacgcccagcatcaggtagatccttccgcagtctgcggcggccacggcctctgccagagagacctttttcccattttcgcccttccagttttccagttccgtagcggaggccactgtttctccggtaacgcagaaatatgtgcctcggttcaatccgctgtaaagccggaagccatcagtccgggagtcccccacaaaagccacatcgtcaaaatagctgtcatccaccggcgccgattccgccaccggcccccagggtttctccgggacagggtcttcctccactggttcttccggcaattccggtaattccggttccgcggggatcaccgttacggacggctcctcctgtgccggctcctccggtgggaccgccgccgtctgatgggaatgcaccgccagcaggccagcagccgccaacagcagcaccgcagccagcatccagccatgcggatttttcctcatacgcttacctgtcacggacacattcccccctttccttcagcgcttgacattatgtaaacgcagtgtatctcctattagacactttttaccgaaaaaagtcgatacaatttggaaaaaattcaataacaatttggtgacaaatttttcacaataaagacatcagcccggaagcgggaccgccgtcctgcctccgggccaatgggtattcttctattcagtcccgcagagagggcggatacacgccggactcgtggagctgccgcaggtcctccgccacacgggcccggtcctcacggtaggtcatgccgaaccagcggtccttggaatggagcacggaaacggtcatgcgccccgccttcacctcctcgcccaccatcagcggcagcaggcactccgccttcaccgcgtcatcaggcagcccccggaggaagttctcaaaataggtccgcagcgccgggaagatcgagggcatgaagccccagaagttcatggagaccaccgtatccggggccaggtccgtgtcggtgtccagatccgtcaggtgtccgtcgggataaagctggaccttcagcgcctcctgaatggtgtccagcttcccgtccttgaccttgcagacgccccgggacacggtgccgtggagactggcagtgtttttcagcagatagcccaccatggttcccttgccctcggcaggcagcttgaccaattcctcataaatcgtccggtaggcgtccaccccgtaatagtcatcggcgttgatgacgcagaaggggccgtccactgcgggttccgcgcacagcagggcgtggaccgtgccgaagggcttggtgcgtccctcaggaatgtgatagaagtccggtacggaggtatagtcctgatagacgtaggccacctgcaccggctggcccttcgccgtctttttctccttgagatagcccaccagctcgtccatcatctcccgcatttccggcttgatgatgaacaccaccttgtcaaagccggcccgcagggcatcgtgaatggaatactccatcagaatttcgccgttggggccgatgccgtccacctgcttgctgccgccataccgggaaccgaggcctgccgccatgatcaccaaagaaacagccatattgcttctcctttatttctcttgtctattcgatatttggcccggcggcactgccgccgttctatatttccctctaccataccttattttttgaatttttgcaacggtcttgacagatttgtttttccggttataatatgaaaacgataatcattttcatattggaggcaaggatggcttatcaaaccaaacagcagcaggcggtactgcgctgtttacagctgcgggcggaggaatgtctctccgccgccgatctttctgaggaactgcggcacggcggtctcaccgtagggctggcaaccgtttaccgccagttggacaagctgactcagcaggggttggttcataaggtcaccacggaggagggggcgctctatcaatactgtccccaggccggacatccccacgactgctttctgctgcgttgcgagggctgtggccgaatggtccatctggactgccggcacctggaggaggtctgccgccatctgtcctccgaacaccactttcgcattgacccccgccgcaccgtgctgaccggactctgcgaccactgtcaggaggcaaagcatgaaggataatgaactgatcgtctgccgagacgtttccctcggctatgaggggaaatcggtgcttaccgatctggaccttacgattgcaaagggggactacctctgcgtggtgggagacaacggctccggcaaatccaccctcatgcggggtcttttagggctgatccagccacagagcggcaccattgagcacgccccggcactgaagcacggggccatcggctaccttccccagcagacccgggcccagcgggatttccccgccaccgtgctggaggtggtcctctccggctgcctgaaccggcaggggctgcactttttctacaccccagcccaacggtccgaagccatgatgaatctgggcaagctgggaattctggagctgaaggacgcctgctaccgggatctctctggcgggcagcagcagcgggtgctattggcccgcgccctgtgcgccgccagccagcttttgattttggatgaacccatcaccggtctggaccccgccgccgctcaggacctctacaaaacgctggcctacctgaatcaaaaggagggcatggccatcgtgatggtgactcacgatttgaaggcagcgctgaaaagcgcccgcacagtactgcacatcggacgaaagggcctctttaccggcacggcatccgactatttggcgagtccccagggccgccgcttccgggaggaactggaatcatgaatattttacagatgttttcttacccctttatgcaaagggccttgatcgccggtgtgctggtgagcctgtgcgccgccctgttaggcgttccgctggttctgaaacggtactccatgatcggcgacggcctgagccacgtctccttcggcgcgctggccatcgccgtggcgctgggagtaatgccgttgtatttctccattccggtggtcattttagcggccttcttcctactgcgaatggccagccatcctcactggaacagcgacgccgccatcgccgccgtcagcgcttcggcgctggccatcggtattttggtgatctcccgcaccaccggcatgaccaccgatgtggacaactatatgttcggcagcgtccttgccatgacaaagggagacgtggccctgtccgtgatcctgtcggtaacggtgctggcgctgtacctgcttttttaccatcagatcttcgccgtcacctttgacgagagcttctcccgggccaccgggttgaaggtggacacctgcaacaccttgctggccatccttacggccctgaccatcgtgctgggaatgcggatgatgggcgctatgctcatctcctcgctggtgatcttcccggccctgaccgccatgcggctgttcaagagcttccgtggcgtgatcctctgcgccgccgtgacctccgtggtgtgcttctgcgtggggctcaccatctccttcggcttttctaccccggtgggggcaacggtggtggcggcggacctgactgtttttctggctgcctgcctgctggccgctctccggcggaaatgacggttcactccccttaccggagaacaaccaagcggctcccaattttcaaaaatcgaaaactgatccggcggggcgaagcagcagtttcgccccgtcggctttttcctgctaaaaatctgcgaaaaaatgccgtttctttctctgtttctcacattgacttccccggccgccgcgcataaactgaggattgctttttaccgaggtgatcgttatgaatctgattgtagaattttgtatcgtatttctcatctgtatggcaggtgaatggatcgcggcgctgctgccctttacgctgcccgccagtgtcatcagcctgatcctgctgttgatcttgctgctcagcggcggggtcaaggagcggacgatccaggggacctcccactttctcatcgacaatatggggctgtttttcattccctccgtggtgggaactcttgaatatctggacgtgctgaagctgcagtttgtcccctttctggtggtctcccttgtcagcacaccgctggtgtacgcggcaacagcctggagcgtccggctgctgatgaagctgtttcatgcaaaggaggcgtcccatgattgatacgctgacttccacgccctttttcggtctcggcgtgacactgctctgctggtatctggccgtccggtttcagaagcggacggggcttctgatctgcaatccggtgctggtggccagtctgctggtcatcgggatcatgctgctgttccacatccctctggacaactacaacgccggcggcagcattatcaaactgctgctggctcccgccaccgccgttctggctctgaacatctaccagcagcgggccattctgaagcggaacttctggccggtggtgctgggctgctttgtgggtagtctcgtgagcatgctattggtacaggtgctctgccgcctgtttcaagcggaggcctccctgctgaattctctgctgcccaaaagtgtcacaacggccatcgccgtcagcattgcggagagcagcggcggtcttccggctctgactgcggcgtcggtcattatcaccgggatcgagggcgctatgctggccccgctgtttgccaaggtattccatgtcaccgatccggtggtggagggcgtggccatcggcgcgtgcagccatgcggtgggcaccagcaaggcgctggagattggtcctcttcagggcgccatgagctccatcgctctatgtgtctgcggcatcatcacctccattctggccatgttctttaccgcgtaaagcagggcggaacttcttttcagaagttccgctctgtttttttgctttcgtgcggaaccaaaccgctctttttcccgtctatacaggtagaatggggtcaacccctcggtttattgaacagaaaggagctcttctttatgaaacggtttttcgcagcgcttctgacgctgacctgcatgctgagcctgtcagcctgtcgggaggaacaggccgccgccaagcctgtgatctacctctatccggagaaggagaccaccgtcacggtaaagctggactacgccggaacgctgacctgtacctatcctgcctacggcgatggctggacagtgaccgcctgtccggacgggactctgacagacgatgccgggcagacttacagctatctctactgggagggcacggataccatcgcgtatgacttctcccaaggcttctgcgtggcaggaaccgacaccgctgcctttttggaggatgcgctggcccagttgggcctcacccggcgggaggccaacgagttcatcgtctactggctgcctcagatgcaggagaatccctataatctcatcgccttccagtcggaccgctatacgcaggcggcaaagctgaccatcgacccgcccccggataccctgctgcgggtattcatggcctggaagcccttggacaagtttatggagatccccgcccagagccttaccgctccggagcgcaccggcttcacggcggtggagtggggcggctgccgggtgcgttgactgtttttcggcggttccggggttttttctccggaacttgccgaaaattgtgaaaaatcagcgtgattttttcaaaaaagtccgaaaacgcccttgcaatttatcataaagtgtgctatcttaatacatattaaaggagtgtaagttgtgagtggaccgcaaggtccgctcttttttgtggcatccgcactccgttgcaaatgaaaaaccgaaaggagaatcccatggaaaaggtcaccgatctcaccgctcgtctggcggcacccatcgtggaagaacagggctgctccctgtgggacgtggaatatgtgaaggaggccggcacctggtacctccgggtcctcattgacaaggagggcggcgtggatattctggactgtgagaatatctcccgcgccctcagcgatctgctggacgaggccgaccccatcgaaggcagctataccttagaggtaggctccgccggcgccgagcgggtgctgaagcgtcccgccgacttccagcggtatctgaacagccccgtgctggtgaagctctacaagccggtggacggccgcaaggaattccccggcaccctgaccgcctacaacgaggccgacggttctctcaccgtggacctcaacggcactgcctataccttcggcaagaaggatgtggccctgtgccgcctgcgggtggaattttaatctgttatccctgtctcaaaaaaagacgtataaagtaaaaaggagaatcgcaatgaaaggcaagaaaaaggtgaaggaacccgcgggtatgaacatcccggagatcttcgcagctctggctatgctggaaaaggaacggggcatcccccagaccttcatgatggataagatcatccaggctgtcaccaccgcctacaagcgggaccacaaggacgtggaaaacgtcattgtggacgtggatgaggaacatcagcggctgaagatgtacgtgcagaagaacgtggtggcggaggaggactatgtggaccccttcaacgagatccccgttgaggaggccaagaccatttccgccagatacgagatcggcgacgtggtgaacatccccgtggacaacacggagtttggccgcatcgccgccggcaacggcaagcaggtcattatccagggcctccgggaagcggagcgcggcatggtgtatgacgagttcaactccaagcagcacgagatcctcaccggcgtagtgacccggatcgacccccgcaccaacgccgtgtccctgcggatcggcaccggcacggagtccaccgaggccctgctgctctccggcgagcaggtccccggcgaggagctggtggagggccagcacgtgaaggtgtatgtggtggacgtccgccgctccacccgcggcccccagattctcatttcccggacccaccccggcctggtcaagcgcctgttcgagctggaggtccccgagatctatgacggcaccgtggaggtgaagtccatcgcccgggaagccggcagccgcaccaagatggccgtctggtctgctgacgagaacgtggaccccatcggcgcctgcgtgggtcccaagggccagcgtgtcgccgccatcgtggacgaactgcggggcgagaagatcgacattatcaagtggagcgaggaccccgcccagttcatcgccgctgctctggcgccctccgatgtggtggacgtcatgatggcggaggaaggcaaggcctgccgcgtcatcgtgcctgacgatcagctgtctctggccatcggcaaggagggccagaacgctcgcctggccgcccgtctcaccggctataagatcgatatcaagccggagagctatcagggtgaggacgatgaggagatcgtggacgaggaacccgtccagtgacacagttgagtttctttctctgcggcgtggctgcgggtatcgcagtgctgtacctgcggcgcagcagaagaaacagaaggagataaagcccggcgcggtccgccgcgccatgtgtaagggagggctgtctgaatgcagaaagtgaaaaagatcccccagcggcaatgtgtgggctgccgggagatgaaggataaaaaaagcctgctgcgggtggtcaaatccccggagggcgtggtcagtctggattttgtgggcaaaaagcccggtcgtggcgcctatgtgtgccacgatgtggaatgtctgaaaaaagcccggaaatccagagcgctggaacgtgctttcagcacagccatccccccggaggtctatgacgccatggaagcggaattggagggacacaatgaacaggaatgaacagtttctctccctcattggcctgtgcctccggggccggaacctggaagtaggcgaagaaccggtggaagctgtggcccgcgccagagacgcacgggtgctcctgctggcgtctgatgcggcggacaataccgcccgccgggtgcggcactttgcggaagctggtcagtgtgtgtggctgcggatcccctttaccaagcaggaactggggcaggccaccggccgtggctccgccgccgtggtcgctattacagacatcggccttgcagtcgccgtggtccgccgtctggcggaaatggacccggagaaatatgacgaagatcttgccaagctggaactgaaggccaagcgtgccgcagagcggaaaagtgaagccgcccagcacgaaaagaacctgcgccggggcatcaagcgtcccaaaaaacaggaagcgcccgatgcgaaagaggtcagacccgcagacgtctccggtaagccgtccggcgagaagcagcgccgcagcgcaggagtgtccgacaagcgcgcagaaaaggccggtccccgcagaaccgccgaaaacggcggagcggcaaaatcctttgccaaggatgaccgcaccggcaggcccttccgcaagagcgggtcccgcccttccaaaagcaaccgccccaaacccaaggggaggccgaatccatacgcccacagccgcccggtgaaaaagggcaaaggctccttccgcaagaaggaaagctgatacgctgtcggtgttttcatagatgaacgagcccagcccccgggttggagagtgtaagaggtgttttgattggctattgaaaaatatagagtaagagatgtggcgcgggacttcggtatgcccgccaaggtcatcacagaaattctggataagtatgccactgcgcccaagagcaacatgcaggcgctggaggaccatgagctgtccatcgtatttgagcatctgacccagaacaaccagatttccaatattgctgccatttatgctgacgagcctaagaagccggaagccccccaggcggaagcgcctaagaccgaggttcccaaggctcagcctgccgcggcacagcagaccgcaaagccggcacagcagccccagcagcgtcctgcccagcagggacagcagaagcccgcacaggcccagcctcagcagaagccggtccagccggtccagcggcccgcgcagcaggcagccccccagcagaagctcaacaagtccaccgccaccgctcagcccaccacccgcgtgcctgagaaaaagctggtggatacccgcaagggcggcgacgtgaacctagccaagtatgaccagcgtctggaagagctgggcggtcagcggggtgagcgcatggcccagaagggcggcaaggagaagtttcgcaacaacaagggccgtcagggcggtcaggtgttctccaacaagcgtcgtcaggacgaggccgagaagatgcgcaagctgcagcttgagatcgccaagaaggcccccgtcaaggtccagatccccgatgagatcagcgtgggcgagctggccagccgcatgaagaaaaccggcgctgaggtggtcaagtgcctgatgaaaaacggcgtcatggcctccctgagccagatgatcgacttcgataccgcctccttcgtggccgaggagctcggctgcaaggtggaaaaggaagtggtcgtcaccatcgaggagaagctcattgacaccaccgaggaccgtcctgaggatctggtcccccgcgctcccgtagtggtggtcatgggccacgtggaccacggtaagacctccctgctggataccatccggaacacctccgtggcttccggtgaggccggcggcatcacccagcacatcggcgcgtatcaggcgcaaatcaacggcaagcccatcaccttcctggatactccgggccatgaggctttcacctccatgcgtgcccggggcgccatggtgacggacatcgccattttgatggtggctgcggacgacggcatcatgccccagaccgtggaatccatcaaccacgccaaggccgccaatattcccattatcgtggccgtcaataagattgataaggaaaatgccaaccccgaccgggtcatgcagcagctgacggaatacggtctggtgcccgaggagtggggcggcgagaccatcgtgtgcaagatctccgccaagaagcacatcggtattgagaacctgctggaaaatctggctctgctggcagaggttcaggagttgaaggccaaccccaaccgggccggtcagggcaccgttatcgaggcccgtctggacaagggccggggtcctgtggccactttgctggtgcagaacggcactttgaagcagggcgacatcatcatcgccggcacctccgtgggccgtgtccgcaccatgctggattaccggggcaaccgcctcaccgaggccggtccctccgtccccgtggagattgcgggcctgtccgaggctcccgtggccggtgcgcccttcttcgccgtggctgacgagcgtatggcccgcgagctggtggagcagcgcaaggcagaggagcgcgctaaggccgccgcacccgtgcagaaggtctctctggagaacctgttcgaccagatcaagtccggcgagcgcaaggagctggctctgatcgtcaaggctgatgtgcagggcagcgtggaggctgtgaaggcctctctggagaagctctccaacgaagaggtcaacgtccgggtcatccacggcgctgtgggtgcgatcaacgagtccgatgtgacgctggccgccgcgtccaacgctatcatcgtgggcttcaacgtccggccggattccgctgcccgtgaaagcgccgcccgtcagaacgtggatatgcggatgtaccgcgtgatctatgacgccatcgacgagatcgaaaccgctatgaagggtatgctggctcccaagtaccgggaagtggtccttggtcacgccgaggtccgggagacctacaaggtctcctccgtgggcaccgtggccggctgctacgtgcaggacggctgcctgcgccgggattgctccgtccgtgtggttcgggatggcatcgtggtccacgagggcgtcctcggctccctgcagcggttcaaggactccgtcaaggaggtcaaggagcgctttgagtgcggcctgaccgtggagaagttcaatgacatcaagctgggcgacatcatcgagggctacaccatggaggagatcccccgctaaaccctctcaaaaaatctgttccaactgaccccgggcggcggcatagccgccgcccggttttcatctcccactatcagaaaggagaatttttatggcatctaaccgtatcggacgcatcaatgaggagatccagcgggagctggcagaccagcttcgccgtctgaaggatccccgcgtctctcaggtaggcatggtctccatcacccgtgtggacaccaccggagacctgcgctattccaaaatttatgtcagtgttctggataagaatcaggaaaaggacgtcttgaagggactgaagtccgcctccggcttcctgcgccgggagctgggccacgccctccagcttcgctacaccccggagcttcagttcatcgctgacgattccatcgcctacggtgcgcacattctggaggtcctccgggatccggagaaggtaaagccggtgaaccccgacaatgacgccgttttaccggaggaggaataagggatgctgaccgtttccgaggccgccgcgctgctgcgctcctttgaccgcatcctgatcctgacccatatccggcccgacggtgataccgttggctgtgctgcggggctgtgcgccgcgctgcggaccatgggcaagaccgcttacctgctgcccaatcccgggttgacggagaataccgccccctattttaccccttacagcgctccggcggacttcgtgccggaaaaagtggtatctacggacatcgccacggtgggactgttccccgacaatgccaagtcttacgcggataaggtggatctggcaatcgaccaccacccctcctttgagggcttcggcaaggccaacatcgtccgtccggaggccgccgcctgcggcgagctgatcttggacattgtccgggagctgacgcccctgacgccggagatcgctttgccgctgtatgtggccatctccacggacaccggcggcttcatctactccaacgtcaccgccgccacccaccgggccgcggcggagctgatggacaccggcatcgactaccgcgccgtcaacaagctgttcttccagacgaaatcccgcgtgcggatgcagctggaggccgccatgctggcggaggcaaaattttatgacaacaaccggacggcggtgctatctgtttctcggtctctactggaaaaattccacgctacggagagcgatgcggaggagctttccgctttaggcccccagatccagggggtggactgcgccgtgaccatgcgggagctgggagacggcgtttggaagttctctctccgcactggcgagcgggtcaacgccacggaggtctgccgtctgttgggtggcggcggccatgcccgcgccgccggagccacgctggagggcgttacccaggcggaggcggaggaaaaaatgctgaacgccatcgcccggatcgtcccggatttcaagaaatgaggaaccgcctatggccagcggcattgtaataatcgataaactctccggatggaccagcatggatgtctgtgccaagatccggggaattctgaaggaaaagcgggtaggccatggcggcacgctggatcctatggccaccggcgttctgccggtgtttgtgggacaggctacccgtgccgtagaattcgcggaaaacggcgaaaaagagtatatcgccggtctgcggctggggctggtcaccaacacccaggatacgtccggggaaacgctggagacccatcccgtcactgtggaccgggcggcgttggaagccgtcctcccccgcttcaccggccctatcgcgcagatcccgcccatgtattccgccatcaagatcaacggccaaaagctctatgatctggcccgaaagggcaaggaggtagagcggaagccccgcaatatcaccatttttgagttagagctattggaacaggtcagcgagacggactatctgctccgctgccgctgctccaagggaacatatctgcggacgctgtgccatgacatcggacaagcgctgggctgcggcggcactatgttcagtctccgccgcaccatggccgccgggtacacactggcggaggcagtctcccttgaggatgtacaggcccaaggagaagctctgctgcggcctgtggaatccatgttcacagcctatcccctctacaccctgccctctcccggcaaggaagcccgggtccgcagcggcaaccccattacggtgccggagctggcggacggcacctatcgggtccatggcaaaaacggtgaatttctctgtctttcttgtgccgaaaacggcacactgacatctatcaagaacttttttggagcataaaaccatgtccattcaaccaaaagtcattgctctgggctttttcgacggggtccatctgggccacggcgccttgctgcgccgcaccgtggaggaagccaagcgccggggcgtccgctctgcggtgttcacctgggcgcagccgccgaaggaggtagtcaccggcgtaccggtgcccctcatcaactccccggaggaccgggcctggctggccaaaagtctctacggcatcgacgatgtcatcatggtcccctttaacaaggagatgatgactacctcctgggaggatttcgtaacggaaattctcatcaagcggtatcacgccgtccatctggtggccggtcatgaccaccgcttcggccacaagaaccaaggcactccggaactgctgaaaagcaagtgcgccgagttgggtcttggctgcgacattatcccggaggtcacggtcggcggcatcaccgtcagctccacctacatccgccgtctggtaagccttggacaggtggagcgggccatggagtatctgggccatccccatatcctgacccagacggtgcggcacggtcgccgcatcggccacaccatcggcatccccacggtgaatctggtgccgccccctcatgtactggtgccgggagacggcgtttatatcgcccgtgtctgccttatggacggcagcagctatgccgccgttaccaatgtgggtacccgccccaccgtcaacaacggcagcgacctgacggtggaatcctggatgctggattttgacggggatctctacggccagtccatccgggtggaattctacaagcggctccgggacgagatccgcttcgactctctggacgctctgaaagcggagatccgccggaacgccgatgatgcccgggcctatttcgcaagcaaagcctgatttgcttatcatttcagcagcacatacgaaagaatccgctttgacatcatgtcaaagcggattctttttgtatacaggctttaccggactgccagccgtccccgcagggcagggatccggggcatgacctccagcagaagcaatcccagtacacagcaggcgatggcctcgccgatgcccaccgtcagggcattgtaggcgaacagggcggggaactgggcggagaagccgccctcataccacgcgatcattgcgccgatgatgacggcgttgcagatcaccggcggcagggtcgccaaaaatttgttgggcattttcgccgtccacagcgctgccagcagcgtagccatggagccgaaaatgatatccagcgggccgacggtgctcatcaggttggtgacaaggcaccctacaaacaggccggggaccgcctccggcaggaaaaagggcagcaccgtcagtgcttcagaaaagcggcactggatggggccataggtcaggccgaaaattgaggacagcagggacatcaccgtgtaaagtgcggcgatgatggcagcagtagcgatctgccgggtagaccatttggacataaaaaaacctccatttttttgtttagagaacggcgggcctatgttggcttgccgaacgaacgcccggtcaaaggcgcttggacagggagatggcacctgtcgaaaaggcagtatagcataattcaagcaaaaaagcaatgccttttggcattgctttttctgcatttccgtttacgcggtttattcgtcgagcatttccagccagatctggtcgctgtcggtgtcctctgttttcagtgtcacaccccggtcggccagcttcgccgccaagtcctcaaactcctgccgggtcagcagataccggcacacgcccggctttacctcggtgggttcccggtcatccagcagctcgcccagatccgatttgctgaccgtcaccgtggggaggtcatcctgagcggaggaaccgtcggtcatagctgccgtgctgtcattctccatagtggtctgatccggcggcagagcgcaggcataatacgcatccgtctttttactttccgtgttcgtatcggcaaagctgtccgagccgttgtccccgccagcggcggtcaggcaccgttcctcgggagcactttccgctgcggcggcctccatcggggccgtatcacaggcagcggaggtattgctgctgccgctgatgctgcccaacgtgccgtgctgcatcagtacgatcaccgccagacacgcggcagccgccgccagcttgccccagggctgccgcttcttaggccgggactgaggcgtttccgccacagccttcatcaccgtttccgcaaaatctgccgacagctccgcatcgtcctccgtggggaaggacgcccggatcgccagcacgtcatccacataggcccggcactccgggcactcgtccagatgggactggacggaaatcatttcttcactggtcagctcgccgtccacaaaggcgtccagcagggcggtgttttcatggatattcatttcacagccccctttctgttttgttagacgcagcggacgataaaaagttcccctgtttcagcaaaaattcccgtaattgccgccgtcccctgttgatccgggattttaccgtccccaggtccagcgataaaacgtcggcgatctcatcgtagcttagctgctggatctcccgcaggatcagcacctcccggtgctccggggacagcgtttgcagtcccgcctcgatctgccggcgcagctcctgctgctccaccgccttctccggcgtgggggtggggtccggcacctcggcgctgacggtctcatcgtccagggatggtccctgatggcggttttccttccgcagaagatccacgcaggcgttggaggtcagccggtagagccatgtggcaaaggcggaatccccccggaaaaagggcaggccctgccacgcggcgaggaatgcctcctgcgccgcctcctccgccagttccggcgtggggcacatccgcaccgcaagggcgaacacccgcttctggtactgctgcaccagctctccgaaggccgcctgatcgccgttccgggccgcttgtatcaagttgtgttcctgatcgttcatggcccctcctaatcccgcagatcccgttggatgcctttcgtaatgcggtcaacatcctccagggtattcatctgtacgatctgttccttatagtaattggcatgggggatccccttgagataccagcaatactgcttccgggcctccagcaccgccacccgctcgcccttgtagcttgcagccatgcggatctgccgcacagcggtctcgcaccgctctgccagcggcggcagcggggacaccggctgtccctccagcacggctttggcctgctggaagatccagggatttccgaagcagccccggccgatcatggccatgtccgctccggtgtggagcagaatccgctccgcatcctccggcttccagatgtcaccgttggcgatgacggggatggacacagcctccttcaccgcccggatgcagttccagtcggcggtgccgccgtagacctgcgcccgggtgcggccatggaccgctacggtggccgctcccgcctgctccagagtctgagcaaactccacacagttgcagtgacccagatcccagccccggcgaaacttggccgtgaccggcacgccgggcagggccttcaccaccgcctccacgatgcgtcccgccagctccgggtccttcatcagtgccgcgccgtcaccgttgttgacgatcttacccatgggacagcccatgttgatatctaaaatatccgccccggtgtgttccatggcgatctgggcggcctccgccatacagacggggtcgctgccgaagatctgcacagcggcgggatgctctccgggaaactgggtcagcagggaaaaggtctttttgtcatggtagcacagagccttggaggagatcaactccgtaatagtgtagcccgctcccagctcggaacagatctgccggaaagcggcatccgtcacccctgccataggagccagcgctaattttgaagagatctccacagttccgatgcgcatgatgcacacccctttccgcagcacattgattttaatagtttagcggattttcggcaaaaatgcaaggataacagaaattgcgtcccccgatcctgtttgcgacgcttttcttcccggacaggctgtaaactgggactataaccttccgtttacacaaaaggaggaatccttcatggagtatggttctatgagcatccaacggctccagtccggccgatggctgaactggggcatccgctttttcctgacggcggccctcaccgccagccagaccgccggcggctatgccccctttgccttgggctgcatagcggcagccggaccgggggcagacggggcagcggcgctgctgggcggcgtgacgggggcgctgctgtttctggactttcagcaggtcctggctttggccgccgtaggcattttgatcctgactgccgccacggcgttccgggacactgcctttctgcaaaagccctgggtgctgccggtgctggcggccgggatggtactggcggtgggcggtatttatgtgctgcaatccttagacccgctgagccacgccgccccctgtgccgcggcatcggccctgacaggcgtttccgcccacttcttcacccggctgttccagccggaggaggaccggctggccccggaggggctgctgtttttaggggcggctctgacgctggctttaggagacctgaccatcttgaatgcctccgtgggccgggtcctgctgtgcgccctgctggcctacactgcctatgatcaaggtcccatgaccggcgtgacggcggggctgggactgggactcatcacggacctctctgccgggaccagcggactgttcaccgccgcctacggcgtggcgggactgtgcgccgcgaaatgcagacggcgaagtatggcggcgcttgccttcttttccggagcagcagcggccatgctgacctcccgggaggagttggcccagacgcttcttctggaaacggtggccggttccctgctgtttctggctctgccccggcggatcttcggtggaaagcggcttctgcgggaagcggccccggacaccacccagcgcacggccctgaaaacccatctcaaccgggcggcggaggcgctccgggagctatatgacagcatgagccgcaccccgccgccacaagaggagaatcccgccgtcatcttcgaccgggcggcggaaaaggtatgccgggggtgcgcgttgtgcgaactgtgttggcaaaaggattacaccgccaccttcaacgccctcaatgacgctactccctacctcctcgagcggggcaaggccaaggccaaggacttccccgttcacttcgccgaccgctgcatccatctgtcagaattgctgcaggccatcaatggggagttgtcggcctttctgctgcggaagcagtaccgccgccaactggaagaaacgcgccgtagcgccaaggggcaatacgcccagatgtcggacctgctgacggcggcggccgccggtctcagcggggcggcccccgcctttggagagatccctgcctgcgttatcggcgcggctctgcggcccaaggagggggaaatggtctgcggcgacaccatggaggccttccgcacggacagcggcctctggtgcctgctgctggcggacggtatgggcagcggggacgccgcccggcgggagtcctccctcacctgccggctgctgcggcagtttttggaggcggacatccagccggaggctgccctcactaccttaaattccgctatggccctccggggtgcggagaccggcagctttaccacggtggatctgtgcgttttgaaaggctcggaggccaccttctataagttcggtgccgcccccagctatctgaaaaagaacggcgccgtccgccggatcaccggcagcagcctgccggtgggactgcggggcactcctgccgcaccggatataaccaccgtgacgctggagcccggcagcttcgccgtgatgatcagcgacggcgtggcagaccccagccgggacgaatggctccaagacctgctggcgggctggggtggggacgatcctcagacgctggccaatctgatcctctctgaaagtatccgccgggaacggctgcaggatgactgcgccgtgcaggtgctctaccgcttgccggagccggagcagccggtatgaggaaaattttcaaaaagccgccgctggttagtatagacatccctcctttgcgggaaaatggaaacagatcaactgaggaggacagcacgcatggtaaaaggcatttcccggcgggtcgtggtggtagacgcgccggagcatcgtttttttgaacaggccatcttcatcgtccgcaatgacgcggcgggagaagggatcacctcccgggagctggtggaggaagcccgacgggtggcccacaattacgcgtccagcgggaccagccgcttttccaaccggtggcggaccctgaaccccatcgtatacaccctgatcggcgccgggaccatcggtcttgcttggctcattgcggcgctggcctgaaaaaagcacgttctctttcaaaaagagaacgtgcttttttgtgtgaaaatcatctgtgcagcttggccttcagcttcgccttggcctccggagacaacagctttcccgccgcccgcaccggcagactgggaagccggaaaaactgtctgcggacctcctcaaaaggctctaccgcatagctggcaaagaaggatgcccggtccgccgccgggccgatgggccgcgccagccggggatttcccgccacggcccgctccaccgggaagggctggcagttcagcttgagctggtcgaagaggtagctgccgtggggtgtgttcaccagcagcaggctgacgcctgcgtgctgctgctccggaaactcatccggccgcaggccccacagatcccccaacgtaaaatcgccgggacggttcagatttgtatattggcaaccgtggcagctctggcgcagaaacagcgcccggccaaaggcccggccaaagcctgtggcaaacaagggtgcggaatccgcagtgccatcgtcatatacagcggtaaagtggctgttcttccatccctccaccttattgcggaagcggacatttgccagccgccgccgtttatttccttcgataaaccgggcctcgtcctcccacacaccgggggatggtacgccgtggcacaccagatcgcaggtggtgagattttccgggcggcaccctaaaaagcggtacagcccatccacctgacagggtgtaccggaaaacagcaccgggcgggtcttcagcacctcccggatctcccggaacacgccgtccagatcgctctgaacgtacttggctccccgcagccgccacaggtcctctttccggaagcaggggatgtgccgcagatgctgatggccgtccatggcagcgccgtataccacgccgccgccctccagcacatattccgcaatggcagtgaacgcgccaccggaggtagagtccttccggacggcgtcatcccggttccaggcggcgaaggtagcgggcagatgagccgccggaccgcgctcctgcaaaactgggcacagccgggtacagcgtccgcaatggacgcatttttccagatccacttccgggaaatcaaagccagttttgtcccggaccatcgtaatggcgtcatggggacagcctgcggcgcaggcggtacagccggtgcagcggctccgctctgccagcttcggggcaaagctctgaggagaaagcggtgcttccggcgcatagggccggtcttccagcgctgcctgcaaataattcagagaatccttccgggcggcagtcaaagccgcttcggcagcttcccagtcaacggggtccagcagctccgccgtatcccccttaccgatgacccggttggcaagacccaaccggctcaggatgctcaccgtccgggaccgttccggggcggacagctccgccggggagaccgtggtgaaaaagggccggtggaactggacggagaacaccgtgccatggaaggaattggtgacaacataggcggcattctggaacaggcccaaaaattccgccggaccggcatccatgatctgcttcgccttgggatggaccttctggcggatgccgcaaagctgcaccaccggcagtcccgtctcctgatggagccgttccagatagggtgtcagcgcaccggggcggctgatgcagtagcagaggatgtagccgcccttggggtaattggacgggtgatcggccatggagtcccactggtccgccgtcagcagcagggtggggtccagcaccaccggggcgtccttcccggcgatatcccggatgatggcgctcccctgagtctccctagcggagaggtgggaaaagccgtccagatagcccttcagctccgcctgcatcccctccgggatggtgggaacaccgaaggatggtgcgtaggcaatgcggcgcttctgagaaaacgtaccgaaaaacaccgggtcgaaccggccgtccgggaagatcttggggttccagatctggtcgctgccggagaggatcaggtcatagggcagcggcccctcggccagctcgtcaaagcgcccatagcggcgatctgagatccgcagatggtcccggctgaacttctcaaaccgccggtaacgctccgacagcgcctgatagtgcagggccgtgtgagcgtcatgggcggcggaacccaagccggtgggccgcttgaacagggcgttgtcctgattgacgaagtagtcaatgatctcgcagtcccagccaaagcgctccacagcccgctctgtggccgccgcctgaagtaaagcgccgtaatggtggatatgatagaaggtaacaagtcccgccttcaacgaaacgacttcctttccgcagatctcctgctcatttcaggtccatgaccacattttccggggtcagcagatcatcctctgcgatccacgcctccacggggaccacctcgaattccgtttccgtccggcggatcaccacccggtccagacccgcattgatgatcatgcggcggcacataaggcaggaggtggcatcattcagcagctccccggtggcagcgttgcggcccaccagataaatggtgcctcccgccatgtcccgccgggaggcagaaatgatggcgttggcctcggcgtggacgctgcggcacagctcgtaccgctcgccgcggggcaccttcatggcttcccgggagcaatagcccatgtccacgcagttggcccggcctcggggggcgccgttgtagcccgtagaaatgatctcgtcatttttcacgatgatggcgccgtagatccgccgcagacaggtggcccgctccaagacggtctcggcaatatccagataatagttttccttgctgatgcgctccatagacagtcctcccgccggattctaaaaatttgataaaatattttatcatacccggcttcggatagcaagagggcagcctgtcattctgccgtcctcaaaggcagtccgctttgtttttacaggttgggcaccgcctttgccagcgtccggcggaggaccggcaccagtgccgtcaccacaacgatcttcagcgtgtcgccgggaacatacaccagcatggccgccagcagcgcaggaaaggtcttggcagactgcatataaacgtgcaggatgagatacatataggggacacccacggcgtagaggatcagatctcccaccagaaccgccgccagaacggtcagatacccggtgcgacgagcagtcagcgcgccgatcacggcggcggcggggatcagccccagcaaaaagccgaagctgggctgaagcacatagccgatgccgccaccttgcgtaaagaccggcaggcccagcagtccgatgcccacatagagcagttgagaaatggctccccacttccaccccagcagaagaccggccaatgcggtaaacagaaattgcagcgtaatgggtacggtgcctgtggggatctgcaaaaacgcgccgatggcggtcagggcggcaaacagggcggcgaggaccatattgcgggtcatatcatgatgattcataatgaaaaactccttttcggtttgatgcgcctaaagtgtagcagacgcggtcccgattgtcaaccatttgtgaaaatcaggttgacaatctggcatggacgccgtatagtatcgttggagggatgtaccatgacgaagcaaatcgttttaaaactcctgcgggagcatacagaggaatttctgtccggcgaggctatcagccgacaggccggtgtcagccgggcggcggtgtggaaggctgtggagcagttaaggcaagagggctacggtattgaatccgtccccaaccggggctaccgcctgacccgcgtgacagcgcggctccggccagaggagctgtcggagcagttccgggatcgtcggatcggccgggaactgctgtactttgacaccatcgactccaccaacaacgaattgaagcggcgggcagtcagcggcaccgtagatggaacggtgattctggcagaccagcagaccggcggccggggacgccggggacggagctttgtgtcccccgccgggaaggggctgtatttatcggcggccctccgcccccagtgcccgctctctgagatcagcaccctgacagcctggaccgccgtagcgctttgtgacgcggtggaagccgtctgtggcgtccgccccggcatcaagtggcccaacgatctggtgctgaaccggaaaaagctctgcggcatcctgacggagctggaatgggaggcggagagcggtgaattctcttgcgtcatcatcggcgcggggatcaacgtcagtcaggatgaagccgatttcggcccggaggtagcccccatcgccatttctctggcgcaggccctcggaacggccccggaccggacggagctggccgcccgggtgatccggtcactgaatgcgttatatggtgacttccccacccaaaacgccgcctatctggagtgctttcgccgggactgcctgacggtgggcaatccgataaaggtcatctccggtgcaggagagcgcatcggcaccgccacaggtatttccgatgactttggtctgaccgtccgctgggaggacggctccacggagactctgacctctggagaggtctccgtccggggactgtatgactatgtgtgaccccgttaaagcggattttttcccatattcagcccgtccagacagtaaaagccccctgctgagaaaatctcagcagggggcttttccatatcatgtttgtaataatcgccgtcagccgccgtagaacatccccagcagatgggccaagtccccggcctccagataggtgatgccattggcgatcaggcaagggccggaaagactctgccggtcagccgtggcgggaccgtgggccagatctgtgtccgggcagatctggaaaacgatctcgccgccgtccttcaccgtcacgccaaactccttatcccaggaaacgtcatacccggcggcttccgccaccgcccggatgggtacatacagccgttcatctccgtagggccgacgcaggacggagggctccaccacggcaacgccgctgacatacagccgcccgtagccgtccagagaaacgcttcccttgtactcgtaaggaaatacaatgatcttgctggcctgccccttgtcatcggcccacaccagaacccgggtgccgggcagcagatcctgatacgtcactcggttgcgggtaagatagggtttcacctgcgcgtcctgccacacctgatacaccgtcccgtcggacagggtgacggacataccgctccggttgggaattcccaaacccgtaaggccgtcagaccggacgatcacatcgtactgaggaaccttgtagtccgccgggacattcaccagaagaagctccggtgtgacctgcgggggcaggctcatggccacggcagtctgcgcccccagccacgcatagacggtgctgccgtccttgatgaactttgcatctaccggctcgccgctgacggcgtccaggatcgcaacgccctccgtccacaggatatagtcctccgttggttctccggtggacgtgctcatcagcaagccgccgtccttctgatgggcaacggttcccgagatcacggtatattgagggttcgggacgtaggcccccgcgccggtggcgctaacggctgccagagcggggacgcacagcatagcggcgcacagagtcgctgcgatcagcttcacagaaaatttcatagattatcttcctttctttcgtcagggtcggagcctccggaagaatgctccgtttgcctggatagacggagggcagccggaaaaagttcccttcttccgcaaaaaaaccgctgaaattttcagcggttttttcaatcaactcagtctatgacccggatggcggtgatgaccggctgctggtcggcggagattgtgccgttatcgtccgtgggctgggcggcctcgcacacggcatccaccacgtccataccgtcggtcacatagccgaagcaggcgtactgcccgtccaggaaggtgctgtcggcatggcagatgaagaactgggagctggcgctgtcaggggcctgggcccgggccatggagatggcgccccgggtgtgggagagggggttctccacgccgttggcggagaactcgcccttgatggtgttctcagacccgccggtaccgttgccgttggggtcgccgccctgcatcataaaaccggagatgatgcggtggaaggtcaggccgtcataaaaaccagcgttggccaggtccatgaagttctgcaccgtgataggggcggcgtctccgtccagctccacggtgatggtgccgtagtcctgaatctcgatctcggcgtggtgggtgccaacgccctgagattcctcgttcgcggcaggggcttttgaggtggtcgtaatgccaaccacgctggttttgccgcacccggccaggctcaggaccaggagggcggccaggcagatgctcagtaattttctcataggatgctcctttgctgaaagcacagcccgccggggatgatctcggcgggctgtatggatttacttcttgcccttcagggacttcatgcgctgctcgtggttcaaaatggccttgcgcatccgcaggctcttgggggtgacctccagcagctcgtcgtccgccaggaactccaggcactgctccaggctcatctggcggggaggcaccaggcgcagggcatcgtcagagccggaggcacgggtgttggtcagctgcttcttgcggcaggcgttcaccacgatgtcctcaccccggttggccacgccgatgatcatgccctcgtacacggggacgccggcgccgatgaagagggtgccccgctcctgggcgttgaacaggccgtaggtgatggagtcgccggtctcggtggagatcaggctgcccatgccacggcgggagatgtcgcccttatagggggcgtaggaatcgaacacggaggccatgatgccctcgcccttggtgtcggtgaggaaatcgttgcggtagccgaagaggccacgggcggggatcaggaactccaccttcatgcggtcgcccacaggggtcatttccagcaggtcgcccttgcgctggcccagcttttcgatgacgctgcccacgcagtcggcaggcacgtccaccaccaggcgctcaatgggctcgcacttcttgccgtcgatctccttgtacagcacacgcgggggggatacctggaactcatagccttcccgtcgcatggtctcgatcaggatggacagggacatctcgccgcggcccgccacgttaaaggcactgtcccggtcggtgtcggagaccttcagggagacgtccttcagagtttcgcggtacagacggtcccgcagctggcgggaggtgacaaacttgccctcccggcccgcatagggagagtcgttgacagagaaggtcatttccagggtgggggcgctgatcttcacaaagggcaggggctccacggcggtgggggcgcagatggtgtcgccgatggtgatgtcggggatgccgctcatggcgatgatgttgccggcggtggactccgtcacctggttccgggccaggccctcgaactcatagatggaaacggccttggccttcttgggggtagcatcgggatcgtgatagttgcacaccatgatctcctgattctgcttcagggtgccccgctcaatgcggcccacggcgatgcggcccacgaactcattgtagtcgatggagctgaccagcatctggaagggctgatccacatccgcctcgggagcggggatatactccagaatggtctcaaacagcggggtgaggtcggtgcccaccacgtcgggagagtaggaagcggtaccctgacggccggagcagaacagcatgggggaatccagctgctcgggggtggcgttcaggtccatcagcagctccagcacctcatcgatgacctcgtggatgcgctgatcggggcggtcgatcttgttgaccaccacgatgacccgatggcccagctccagagccttggagagcacgaagcgggtctggggcatggggccttcagcggcgtctaccagcaggataacgccgttgaccatcttcaaaatacgctccacctcgccgccgaagtcggcgtggcccggggtgtccaccacgttgatcttcacgtccttatagcggacggcggtgttcttggccagaatcgtaatgccgcgctcacgctccaagtcgccggagtccatgacacggtccacgacctcctgattttcccggtaagcgccgccctgcttcagcatctcgtccaccagggtggtcttgccgtggtcaacgtgggcgatgatggctacgtttctcaaatgttcgttctgcatatctggaacatcccttcttgttttttaccatcaattgacaacagtcggcagacagccctccgaatcagagaagaacgtctgtcgattcttgtcaactgatggccttacagatttcacatacagtcacatattataatgcacagtttccctaatttcaatgggaaatttcacattttccgccaaaaacgtgaggtttttcttgtatctgtgcgtcatagaaggactgacgcttttttgaacaaagaattccacaaaaagcaaaactttttttcgttttcggacattgattccgaaagaaaggaccgtataatgaaatttacctcgacggaagcgacgccagcgccgcacgttccgccgggagtattgcggctcactggagccgccaaggaggatatccccatgtatcgtattcaaaccatgaacaaaatttcccccgtaggtctgaaccggttcccctccgagctgtacgaggtcggggatgcggtacaggaccctcagggaattttagtccgctccgccaagctgctggacttggaattcaaccccagtctgctggccattgcccgtgcgggcgtaggggtcaacaacattcctctggaccgctgcgcagcggcgggtatcccggtgttttccacccccggcgccaacgccaacgccgtgaaggaactggtgatctgcgccatgctgatgggctcccgggatattcccggtgccatccgctgggtccgggaacaggcagcctccggggtggatgtctccaccgtggtggaaaagggcaagtctgccttcatcggcccggagctttataaaaagactttgggcattatcggtctgggagccatcggctccatcgtggccaacaccgccatctctctgggcatggatgtgtacggctacgatccgtttttgtccgtggataccgctttgcggttggaccgccacgttcatgtggtaaaggatatcaacgatctttataagcggtcggattacatcaccatgcacatccactatacggaaaagaccgcccacatgatcgacgccagcgccatcgccgccatgaagcggggcgtgcgggtcatcaatctggcccggggcgagatcgtagacgatgaagccatgctgacggcgctggacaccggtatggtggccgcctacatcaccgacttccccaacaaccgtctcctgacggctccccacgtcatcgctatgccccatctgggggcctccaccccggaaagcgagcagaattgcgccgccatggcagtagatgcactgcgggactatctggaaagcggcaacatccgctccagcgtgaatctgccggagatgaccatggaccgcagcggtgtccagcggctgtgcgtcctgcacaagaacgtccccggcatgctggcaaacatcaccagtctgtttggccgggacggcgtcaacgtggaaaatctgagcaacaagtcccgtggggattacgcctataccatggtggaccttggcagcaaggtgggtgacaacgtgatcgaggatgtgcgccgcacagccaacgtaatccgggtccggtccttgaaatggtaaattgaacggtcaagatacaaaaaagcacggcttccgccgtgcttttttcttttatttcgtgcagcgggccttcaactgctccgctgtgatggcccagccctcggccatgtattgatctaccgggatctccgggcaggtctctccccgatggcgatagatggcctgtaccatgatcttcagcagcgccgggttcttcaccagaatcggcccggtgagctggctggcaaagacgctgcccttgtgatatccctccgggccgcagggtccctcgttgccgtggcccatgtccatggaagtcaccagcggcgtctccacgccggtaatgaccgaacagcggttgacgaagcccaccactgcgtcctcatagaggtccgtgtggccgtaaacgtcctccacgaaccgctttttgttctggacggcagcgaagtccgccagtcccagtccttcgtacacctttccggcgtcatcggtgatggtcttgcccagcagctccatggagttcccggcgaacagcatggtcacgcctgcgtccgccgccgcttttacagcatctcccagcttggaaaaatacaggagagccgccttctgcgcccgctctgtacctgcgcccatgtagacaaagtccgcatgggtcagatcggcgtctccgccaagctccacccgctccacagtgacggtattgcccatttcctccaacgtctgcttcagaatggacacgttggcatagctgccatacaagctcatgagatccggatagaaatgcagaatcttcaattccatggctcagccctcctttttcacatccggcagattcagcagcttgtcccggtcagagaagcaggtgactacatacaacgcctcgctgccgctgtcccggatcgctgctgccgcgtccggaatgccgggaatgacttcccagttctgaacgccggtgaaccggaaccgttccgccagatcattccggtacataccggagagaatgacccgcttcacatgggggacattcagctggtcaaagtcgatgtcccacagccagcttgtctcgctggtgaaatacttccgggatacggcgtccacgatgatgagcaccgtgcaatcctcgttggcggaagcgatatagcggaggttcgtgtcataggcgatggaattttcgtgcttgctggtcagcaggatgccgtggtgctgaccaagggtgaaggtctgcatccgtccgtttttcagaatgtagctgctgagggtgtccgcaatggcggctccctccacgccgcattcccggcaggcggcgtaggccgccagaatgttgtagacattgtaaatgctgcggaaggccaatgccacggtgaactgcccgtccaggatcagtttgccgttttgcaggtccagctccgtggcggcgtagtccgggtcgggccgggcgtggccgcagctggtgcagcggtacgcgccgatgtggttgtagtggacgtactcatattccatgggcgcgtggcacactgggcagtaggccccgtcatgatagaccccggtgggggtctccgtatccgtggcacagcgattcagcccgaaccacttcactttttcatggccgatgacaaagcagctggacaggggatcgtcgccgttcaggatcagctccgtatcggggtggatggcggggagaatggcgtcaaacacgctttcggggtgaccgttccgggtgagctggtcccggtacaggttggtgatgacaaattccgtggggtggaaatacttgaagctgtgggcagcgtaccgctcgtcgctttccagcagcagcacgtccgcgttgaccttcccccccagggtggcgtgggtcaggatcagggtggtgacgccctccacctggttggagccttcggcgttgtaaatgacattcttcccctgcccccgcagcaccgtggcgatcatctccacggtggaggtcttgccgttggagccggtgacggcgatgatgtggggcggcagctgcacccgcttcagaatgtcggggcagatcttcagggcgaacttgccgggcatagagctgcccttgcccaccagcttgcctacaaaccggcccagcttgcagaccacgattgctaaaaactttcgcatgaatatccttctttcagcgtttattttccagccagatcatcagcgccgtcaaatcggcggggctgacgccggagattcgggacgcctgtcccagatccatgggccgcacggcggagagcttctctcttgcctccagccgcagaccctgaatggcgttgtaatccgggtccgggggcagcttgtgaccctccacacgcttgaactccgctacctgctgcagctggcgcttgatgtagccctcatatttcacggaaatctcgatctcctcggcaatatccgccgtcagcgccggacggttagggtcaaagggcgccagctcatcatagtggagctggggccgcttcagcagcgccaacagagaacagccatccggggcatcggcagtgccgtgctccgtcagaaatgccgtcagtgccggggagggagccacgccggtgtgctccagccggttgatctcccgctggatggcatcgtacttttcctccaccgcccggagccgctccttcggcacgagaccgatctcatagccccgccgggtcagccgctggtcggcgttgtcctgccgcagcaccagccggtactcgctgcgggaggtcatgatgcggtagggctcgttggtgcccttcgtcaccagatcgtcaatcagggtaccgatgtagctctccgcccgggagagaatgaatggactctcccctttcagcttccgggcggcgttgacgccagccacaaagccctggaccgccgcctcctcgtatccggaggagccgttgaactgccccgcgccgtacagtccagacacctgtttcgtttccagcgtgggcagcagccccagcggatcgatgcagtcatattcgatggcataggccggacgggtcatgaccgcgcggcgcaggccgggtacgctatggagcatctggatctgcacttcctccggcaaagaggacgagaagccttgaatatacagttcctccgtgttcagtcccatcggctctacaaaaagctgatggcggagcttgtccgggaaccggacgatcttcgtttcaaagctggggcagtaccgggggccgatgccctcgatcaagccggagtacatgggggcccgatccagattctcctgcacgatgcgcttggtctcctcggtggtccaggtgagccagcacaccgcctgattgtagggcgggtttttcgtggaataggaaaagggcaccgggatctcatcccccggctggacttccatctcatcaaagtccaccgtccgggcgttgacccgtgggggcgtgccggtcttgaaccggcgcaggggcaggcccagcttcaaaaggaaatccgtcagcggaccggcggcgtgcagcccgtcggggccggaatcctccacgcagttaccgatgatggtgcggcccttcaaataggtgccggtggccagaatggcggctttcacatcgtacaccgcgccggtggacaacaccacctgccggaccgcgcccccctctgtccgaagctccaccacctcgccctgccgcaccgtcaggtgctcctgacattccagggtgtgcttcatccgctcctgatactttcgccggtccgcctgggctcgaagggaccagacagcagggcctttccggagattcagcagtcggtactggatgcagcattcgtcggcggccttggccatctcgccgcccagcgcgtccaattcccggaccaggtggcccttgccggtgccgccgatggcggggttacagggcatgttgcctacggcgtccaggttgatggtgaacacaatggtctccagtcccagccgtgcggtggccagtgccgcttcgataccggcgtgaccggcgccgatgacggcaatatcaaattgtcccgcagaaaaagtttccatcatagttgtattctatccttttttcagggtgacgaccgcgatctgcggccggttgaacaaacgaaacgcccatttaggggaattacccagaccacgggaaacaaatacctccgccccctcgcagcccgcatcgttacagtgataaaaaccgctggtgaaggagggcagcaggttcaggttggtatctaccagcccgtcggtaaagggcagacgccagatgccgccgtgggcgtggccgcagaaggtcaggtccgctcccaaacggcagtaccggccattgaaaaatgtgttgcggtgggccagcagcagccagaaggggtcctcctgctgggaatacagcttcgccgccagttcctccggagtggtctggtctgcgtagccgttgggatcgtcgatcccggcgatgaagatcgtctgcccgtttcgttccagaggaacgaattggttggagagcaccgtaacgccggactcccgcagggctgttttcagttcctccacggcggcgtttccgtgcgcccattcgtggttgccagtcacatagtaggtgggggcaatggcgctgagggccttccctaccgcctttgcatacggtatcggggcctcggcgtactcgtccaccagatcgccggtaaggaagatcagatccggtgcagcctgttccacggccgcatacagccgctgattgttctttccgaattcccggttgtgcaggtcgctgagctgcacgatccgcagcccgtcaaattccgccggcagcgcagtggaggtataggtcagggaatcggtccgcagcgccgtattgtcccaatatacaaacaggaccaacagggccagcagcccacaccgcatgactgcgtggagccgggaacggggacggcggcgatttgccatggacggacctcctcaaaaatgtaaagcatcggaattacggccatatattatagcacagccggacacaataagcgaggaaaactttaaaaagctgccgaattttcaggatttctcaaggagcacgacggcagaaattgagaagtgtgtgcaaaatcggaaaaaaattacaaaaaagctgtgaaaaagggcagttgaaaaggaaaaaacgtttgcttataatatgcttgactgcatctgctcataaacagatgacactaacgatgccggagtagaatgcgactgctgccggacacaggaggaaagacatgagaggtgtacacagcgcggtagacgatattcgccgcaacatattcacagaagtggcccgactggcctatgagagcgatgattataagcaggtggacatgatcccctacaagatcgttcccggggaggttgcccatcatcgccatgacgtgttcctggagcgggccattgtttccgcccggctcaagctggctctgggcatggatctggaccccaacggcccctctgcccccatcagcgccaatatccaggatgccgccacggatcagaaatatttcaacgagcccctggtcaatatcatcccctatgcctgcaacgcctgccctcccaagcaggtccgcatcaccgacagctgccagggctgcatttcccacccctgcatgaacgtctgccccaaggacgccatctatctggatgaaaacaagcgctgccacattgatcagagcaagtgtatcaagtgcggcaagtgctttaaccagtgcccctaccgggcgatctccaaggtggagcgcccctgtgctgccgcctgcggcatggacgccatcgagtccgatgagctgggccgggctaagatcaattatgataagtgcgtctcctgcggtatgtgcctggtgaactgccccttcgccgccatcgccgacaagagccagatcttccagctgatccaggccatcaagcgtggtgaagaggtcatcgcctgcgtggctcccgcatttgtgggacagtacggccccgacgctactcccgccaagctgaaaaccgccatgcggaccctgggctttgccgacgtggtggaagtagccatcggcgctgacctgtgcaccgtggaggaggccaacgactttttgcgggaggtgccggaaaagattgactggatgggcaccagctgctgccccgcctggtccatgatggccaagacgctcttcccccagttcaaggacaacatctccatggccctgacccccatggttatcacagcccggatggtcaagaaggatcatcccaacgcccgtatcgtctttatcgggccctgcgccgccaagaagctggaggccaaccggaagtccgtccgttctgacgtggatttcgtgctgaccttcgaggagcttctgggtatgtttgacgccaaggagatcgacttcaagacccttgaggcagatcctgccgacggcatggacgagggcagcggctttggccgcggcttcgctgtgggcggtggcgtggctgccgctgtggtggaagccatcaagcacattgacccggatcgtgagatcctcattgagtacggcgatggtttgaaggaatgccgcaagatgctggccatggctaaggccggcaagcgcaacggctatctgctggagggcatgggctgccccggcggctgcgtggccggcgccggcaccctccgtcccgtcaaggaatccaccgccagcgtggagcgctttaaaaatgccgcttccagcatgagcacgacagaaagtccctatctgggccgtctgaaagacgtagaggagaaatgctgagtctgatcctgctacagcagatcgcccagttgtttatcattatctttctgggttgggccattgtaaaggccggtattttgaaatcagaggacagtcgtgtactgtccatactgttgctgtatgtcatcatcccctgcgtgatcctgaacgcttttcagatcgagcgcacaacggataccgtacgcatgatggagctttcgcttctatctgcactgatgatgaacgtgctgagtctcgtgctgggaagactgtcggcaaagctgttttgcctaaatacagtggaaacagcctctgtcatgtactcgaactgcaccaacatggtggttccgcttgtcatcggaatttggggtgaagattgggtcatgtatgtgacctgttactctatcgtgcagaccattctggtatggacccatgcccggatcctcatcagcggcaaaaaagagatctccctgcgggatctggtatgcaatgtgaacattctggcgattgccataggtctgtttctgtttgcatttcagatccggctgcccgcagtcattcggtcggcattcgccatggccggaaataccatgggcccggttgccatgctgatcatcggtatgctgatggcggatatggatatgcagcatctgcgctcctatcgccagctctggaagcctgtgctgctgcgactgatcgtactgccggttattttggtctgcgttgccaaatacagcggtctggccgcgctggcccctcacggagaaacgctgatcatcatcagtctgctctctgtgatcgcgccctccgccaacattgtgacccagttcagtcagatgttcggtcgggatgccctctatgccagtctgatcaacacggtgaccatgctgctctgcatcatcacgatgccactgatgatcaccctgtttcagatgtaacggcgcagaaaatagcgactggtttcattcggctatccccgtttttcacgtaatacctctatatgcacgcaaaagagacgcccggtcgggcgtctcttttttcgtgttgaatttttttcgacacactctgtcttctgttttcagagcttcacaaaagtcctgaaaatgtttgatttcaatggcgcgtcccctgggttttccgcacacataccttttcttcccggcagccaggactctctcctctattaaactattttcaaaaactacaggccgcttttccgccgttcagcggaaaagcggcctgtccatttcaaaacaaacgctttgctttttggtgctctttggttgtcagaaatgtcttacttgcagacagcgatgatctcaatctcgcacagcagcttcttgggcagctccttcacggccacgcaggaacgagcgggcttgccggtgaaatacttgccgtacacgccgttgaaagcagcgaagtcttccatgttagccaggaagcaggtggtcttgatgacgtcctcgaagcccaggccgttagcagccagaatggccttgatgctctggcaggcgcgctcagcctgctcctcgatggtggtgccgacgatctcaccggtaccgggcatcagggggacctggccggaagcaaacaggaagccgttggcggagatagcctgagaataggggccgattgcggcgggggcatcgggagtgttggtgtaattcataatgatgtacttcctttccaaatcgtttcgtgctgattttccaaatcatgccgtagacagaattccttgaatcgtccacgattcaagtataaacacggatccggcttctgtcaacccttgccgatccggtcaaaaaacccgccgcccctccttcaagaggagcggcgggtcaatttttttgtgtaaattacaccaaggtgtccaggacagccttcagatcagcgatgatgtcatcgggatcttccagaccgacggagatacggaccagaccctcggaaatgccggaagccttcagctcctcgggagtgtaagtggagtgagtcatggaagcggcgtgctcgaccagcgtctcggcatcgcccagagacacggcgatggtgcacaactgcagcttgttcagagcgttggcaacggcatcgcggtcggccttcagctcaatggacatcatgccaccgtacagcttcatctgcttcttggcgatctcgtggccctcgaagtcctccagaccgggataatagaccttgtcgatggcgggatgatcgtgcaggaactcggcaaccttcatggcgttggcgctgtggcgctccatacggatgtccagcgtcttgaggccgcgggcgatcaggaaggcgttgaacgggctcataacggcgccggtcatatccttcaggccgaacatacggcacttgccgatgaactcagcgtcagaaatcacgaagcccgcaatcacgtcgccgtggccgttgatgtacttggtagcgctgtggacaaccacgtcagcacccaggctcaggggctgctggatgtaaggagagcagaaggtgttatccacgatgacgcggatgttcttgttgtactcgtgagcgattttggcgacctcagcgatgtcaaccaccttcagagtggggttgcagggggtctccagatagacaaccttggtcttctcggtcagagcggctttcacggcagcgagatcggcgaagtcaacgaacttcacgcccacgccgaacttgctcatgccgtggttcagcagagcgaaggtgcagccgtacagggtatcgctggcaacgatctcgtcaccggcctcaacagaactccacagagcggaggagatagcgcccatgccggaagcggtagccagagcagcctcgccgccttccagagcagccagcttctcctcgacctgagtcagagaggggttgcccagacgggagtagatgtagccctcttcctgaccagcgaagcgggcgccgccctgctgcacggtatcaaactcgaaggtagaggtctgataaatcggggtgcacagtgcgccgacaccgttgtcatgcttaccagcgtgaatctgacgagtagcgaagcccatgttcttgcaatccataataaatgccttcctttccttgttccggggccggtgagaccggcaaattttgttgttatcgtttttcagttatctgtaagaactttccacgtttttggcaaaaggagagagcgagtcgagtagagaggtgtttacacgcaaaatttatgtaaacatttgccgtaaaccagaaagtctcatcggatacttttattggatttcacctattatactatcacgttccgcgaaaaggtgttagtatctctttttcgcaattcattcacagttattttaataatggattgacttttcgtgataggctccgtataatgtggttcaacaaacgatgcgtaactatatccatgggagcccggcggacggacttgtgttcccctgcggcatcctgtgaaaaattttatgaattttgtaaaaaggagacgatccaatgacctttcagcagctgacgtatgtggtagaaatctccaaatgcggttccatcaacaaggccgcccacaagctgttcctgtcccaatccggtatttccaccgccgtgcgggaactggaggaggaattgggtatcaaattcttcgttcgcagcaaccggggcgtggagttcacgccggagggcaaggagtttctgggctatgcagtctcgctgctggagcagaagcagcggatcgaaagtctgtacggcgaatcccgcagcaccattgcaccggtgcatttcagcgtttccacccagcggtatccctttactgaggacgctttcctggaaatgctccagcaaaaccaggaaaaccgctaccaatatacattgaaagagaccagcatggacggcgtgatcgacgatgtgtatgaccaccgggcggacatcggcgtcatcttcctgaccaaattaacggaaaagatcgtctgccgcctgctggacggccgggaactgaccttccacgagctggcggcggtgcctccctgtgtatacgtccggaaaggacatcccctcacccagctggaacacgtgtcggaggcagatctggagggctatccttacagttcctttgaacaggctcagggcgtagccgtggacttttctgaagagcttcccatggtatccatgcgtaagccctccaaggccatcattgtcaacaaccgctccaccgccatgaatgttctggccaatacggacgcttacagcactggcagcggccttcttgcagagcatctctcccctgccaatgtggtcaccatccctctggcagacaaggatccggtacgactgggctggatctatccgcagaacgccaagctctcctctcacgccgaagaatttgtccgccttctggaacagtctattcagcgttccattgcatatacctcttccctgcatcgtcagatcgtcggcaaataagcacatataaataaatgaaccggacgatttcgtccggtttattttttgcgcagatctttttcgcctgaagcaaaaccgtgcaggcaacaggaaaacgccggccaatggccggcgttttccgttaggagagtgcgagagtaggagagatccaatgtttgattactgctgtgcctcagcggcttccttttccagcagggccttcttagcggccacgttggactcagcgcagtcatactcccagttccagggatccttgcggcagacaccatcggcgaaggggatgaagatggacaggatgccgaaagcggccaggaaccagcaataccacagagagccaaggatgttggcggcgctgatggtggtgccgttggtaacggtagcgttgcacagggaggaagctaccaggagctgcgcgccgtaggggatgatgccctggaacacgcaggagaacatatccagcagagaagcggtgcggcgggggtcaaccttgtactcgtgagagacctcacgggccatgtcgccagccacgatgatagccacggtgttgttagcggtagcgcagtcgcagagagagaccatagcggcaatgcccacctgagcggacttgttgcccttcatgaccttgcccagcttctggatgatccactcgataccgccgttcttggcgatcagctcagacataccgccgcacagcagggtcaggaagaagacctcgttcatgccgcagaagccgttgtaaacagcctgagcgaaaccggccagatcgatagcgccggtggcgatgcccacgataccggcagcgaagatgccgatggtcagcaccaggaacacgttcatgcccaccagagccaggatcagaaccagcagatagggaataaccttgatgaagctgtaggacaggtcgccgatctcggtaacggtctcgggacggcccacgatcagcagcaccacgatggtgaccagagcggcaggcagagcggtgaggaagttcacgcggaacttatcacgcatctcgcagtgctggctgcgggtagcggcgatggtggtatcggagatcatggacaggttatcgccgaacatagcgccgccgataactgcgcccagaacgaccatcatgttcaggccgcccttttccgcaacgccgacagcgatgggagtgatggcggagatggtgcccatggaagtaccggtagcggtgcccatgaaagcagcgatgacgaacaggccagcggccaggaactggacgggaaccaggctcaggcccaggttgacggtagcgtcacggccgcccatctcagcggccacggtggcgaacgcgccggccaggatgtagatgatcagcatggtcagaacgtccacgttggcagcgcccttggcgaaggtatcaaacttttcgttgatgctgcccttgaacataatgaaggccaccagaacggccaggaacatcgcggtaacagaggggaactgatagaatgccatgtcgacgcccttggactggtaaaccagaccggcgcccatgtagacaacgatgaataccaggaacgggagcagtgcgagaccattcgctttcttgttgttcagggtattgcccatatagggttcctccttttttcttccaaagcttgttgataggttcttgggactgcttattgtgtttttacacaattaaagcggggttacctctctcctctatcgtcaagtataccataattgtgaacggattgttaatgctttttttctataattggttatcgctctatcgatagcgattgaagctttttttgttaaccgttttcccatcgttccgttgctccattttatgcacttttgagtgcattcagtcctctccagtaacttttctaaacagtaaaaactaaggcggccccacaaagggaccgccttagttttcagttcatcaggagtttttccagttccgctggggtatctgccagaaaatccgcgcccgcgtttaccagattttcccggctgcggaagccccacgtcacgccgcaggccttcaagcctgcgttgtgtccggtgcggatgtccacatcgctgtctcccaccatcagcgtctcctccggtcgggcgttcagcttttccagaattccgcgggccacgccggggtccggctttaccggtgtgccgggaagattcccccggatcacctcaaaaataccgggaaagtagtgggctacgatcacctgactgaattcgtccgccttgttggagcagaccgccagccgcactccggcggctttcagctttttcagcagctccggcatcccggcatagggcgcggtcagctccatattgtgagcaccgtaaacccggttgaactgcgcaagggtccgttccagcgtctgcggctcctgggcctctgccggagaaaaccggctcaccagattggggatgccgtgacccaccatgccctcgacggcctgtacggtgtactccggccagccgttttcccggcagactgcgttggcggcggccgccagatccccgatggtatccagcagcgtgccgtccagatcaaaaatcactgtgcgatacatgtatgatgcctttctctcttattccgccgcgttccacgcggtctccagggcgatctccatcatctcatggaaggagtcctgccgctcctgagcgctcagggcttcgccggtaaaaatatggtcagaaatggtaaggatagacagcgcccgcttgccgaagcgctgagccgtccagtaaataccggcggtctccatctccaccgccagaataccgaacttccggtaggtggcgttggcctccggattgtcattatagaactggtcggaggtgaacacctgtcccacgtccgcccggacgcccagccgttccgccgctgcggcagcgtccttcaaaaggccgtagtccgccgtggcgcaaagctggccggggaaccggtactggtcggcaaagtgggaattggtggaggcgcccatagccagcaccacgtcccgcaccttcacatcctctccgatgcccccggcggagccgatgcggatgatggtgtccacgccgtagaagttatacagctcgtgggcgtacagtcccgcggagggaacgcccatgccgtgacccatgacggacagcttccgacccttataggtgccggtatagcccagcatattccgcacggtattgaagcacaccgggttttccagatagtgctccgctacgaatttcgcccgcagagggtcgccgggcatcagtaccgccttggcgatgacgccctcctccgccgcgatgcaggcagagggagattctaaaatagccatatcagatcctccttattctttgtccttgaacagcgccgcaaggctctcgttgaagggcgggtagcagatgcccttctccgtcacgatgccggtgagcagctcatggtccgtcacatcgaaggacgggttgaagcacttcacccccggcaaggccatgggcttttcgtaccagaggtttttgatctcgtcgccgtcccgcagctcgatggggatgtgcgccccgtcgggacagctcatgtcgatggtggaggtgggccccagcgtatacaccgggacgccgtagtgcttggccaggatggccacgccgctggtgccgatcttgttggcgaagtcgccgttggcggcgatgcggtcacagcccacgaagcaggcctgcacccagccgtttttcatcaccatagacgccatattgtcgcagatgagggtcacgtccacccccgcccgctgcagctcatagctggtgagccgcgccccttgcagaagagggcgggtctcgtcggcaaacacgcgaatgtggatgccccgctccgccgccagcaggaagggcccctgtccggtgccgtaccgggaggtggccagcggaccggcattgcagtgggtcagaacgccgtcgccgtccttcagcaggctcagaccgtattcggagatggcggtgcatttggcgatgtcgtcctcgtggatgtccactgccttgcggtacagggcctccagcaattccgcccggtcatccttcaagtgggccttggcggcatccagcatctcccccactgcccagcggaggttcaccgccgtgggccgggctgcccccagcagctcgccgtcgatctgcaatttccggtaaaaggtctcgttgtccttggcgtcaatgtccctggccagcgcgtacatgcagtagcccgcgcagatgccgatggccggcgcgccccggatgcggagcattttgatggcctcgatcatctcctccacggtgcgcagctcgatctctttttcctcgttgggcagcagtgtctggtcgatgatgtacagccgctccgtggccttgtcatagcggatgttctgaacgtgggtcacctgccggatcgcttcattcatagtccgccccctcacacatacagaacgcggtcctctttccgggccttgtcccccaggacagcctgatccgtatagcctaaaatgcagttgccgacgcccttccagttttcgcccagaccccactctgccagcaaagccttgccctccggcaattcaaaggtctccatggcccggttgatccagcaggagccgatgcccaatgcggcagcagcgttcatcaggttgcccattaccagagagccgtcctgaagccagttgggatactcgctgtcggacagcaccacaatggcctccggcgcaccataaaagggtgtcccctccggtgtgcctaaaatccggctgttcagccgttccaatctggcaagcacggcggcgtcccgtaccaccaccagcttggtgctctggagattcttggcagagggcgcgtaaagaccggcctccacaatagcgtccagatcctcctttttcagcggctccgggcggaaagcacggatgctgcggcgctcttttagaacctttaaaacctcattcatggtcaacactccttttgcaataagatcgttatggttattctatcacggtttttttgattctccaatattttttcatggggagcggccatatttccccttgcataagcctgttttggaccgcataggataaagcaacaaaaggcggggagtgttgtgctttgaagggaaatatggaggagcgggcggagcgccttgctctttacatcatagagaaccggaccacggtccgcgccgccgctgccaaattcggcatcagcaaatccacggtccacaaggacatttcagaacggctgcccctttttaaccgggcgctgtacttgcaggtcaaggaggtgctggacgtgaacaaggcccagcggcacatccggggcggcatcgccacccgaaaaaaatacaagggtacatagaaggaggaagtcctatggctgtacgtgatcccggcggctgccgccgccaaagcggcccccaaaagtcaaacgctgtcccggaactgcccgccgctccggcagttcagcccgtcatgcgccgatggccccacccggtagcggtccatcccgcgccggagggactggcagcagagcttcattatatcagttgcgccctttcccagcagacccggcagctggacgagatccggtgcctgctgaaaaggctggcgaacagcgccggaagcgaatagcaggctgcgggggaccttcggagggtcccccgcagcctttaagaaacgtcgatttccgtagaccagcgttttccggacaggctgtttgtgaataaactggaaatttcccggaaccccttgtaatttgtgccgtatccttatagaatattatgtaaatctgtcgaaaaagagaagcggccttcgccgcgcgttaaaggagcgtccgttcacatgtccagagcagtccgctacaaaaagcacctcactaccctgcaagttttcctgtccatcgtcctgatcctgctcactgcctgcgtggcggtgaaggcatttttcctgaaagccccggaacaaaaggtggatgaactgccgtctcagccctcctccacgggagatccccagctatccgaggaggagcaggcggcccaggaggccctgcggtcccatctggagcgcaagggcggcttctacaccattctggtctccggctctgacgacggcaacggcaacagcgacaccaacattctggtagctgtggacactgtgaacggctacgtctacggcgtcagcatcccccgtgactccaaggccgtgtgggatggaaaatcccacaagatcaacgccgccttcggcaagggcggcatgaccaagctggcagaggtggtgtccgaccagttgggcatcccggtggactacaccgtttccgtggatctgaccggctttgaggcgttggtggaggccatcggcggcgtgaatttcgatgtgcccatcaacatggactatgacgatcccattcagaacctcagcatccattttaaaaaaggtgttcaatacctcaacggtgccgacgccatgcgggtggtccgcttccgccacaacaacgatggcaccggctacggcagcgaggacttgggccggatgcagacccagcagaagtttttgaaggccgtggcgaagaaaatgctcaccgccagcaatatcctgacgaaaatcgacgattacgccaaaattttcaatcagtatgtagacaccgacctgtccgtgggcaatctggtctggctgggcacagaggttttgaaaatgggcgtggacaagatcgacttctccaccctgcctaacgagtggagatctccgtatatttatctgatcccggacgaaactctgactctggtgaacacctatctcaacccctatgtggaggatcggaccgcggaggacctgcatcttccgtcctgacctccggaaaggagtgacactccatgaaaaagcaagcgctgtccctgctgctggcactgtctttgatgagcgttcccgctctggccaaggagaacagcgcggacaactttgtccgcagcaaaacctatgccagccagttctccgatctgccggaggaccataccttctatgaaaatgtagccgccctgtacgaatacggtctgtctgtcggtcaggccgacggcacttacggcctgacggtgcctatgaccgtgggacaggcggtgatcttcgccgggcgcatccgcagcctgtaccgcaccggggacccggaggccggtcccgccgccttcactgccgccgccattggattgaaggacgcccagcgggtctacgccccctatctttggtacttacaggcggagggcgttttagacaagactctggacgatcagctctccaatgtggctgcccgggcccagatggcccatgtgctggcaaatctcctgccggaaacagcgctgcctccgatcaacgattccctcatcactcaggcctacgccagccgccgccggatcaccgacgtaacggaatacacgccctattatgatgatatcctcaagctttaccgctgcgggatcagcgtgggcagcgacgagactggctcctttctgccggattctcccatcaccagaggggccgccgcagccatgctgacccggatggtggatccctcccttcggctgacgccggactggcacctgccggagctttacagcgccgagggagccgcctacgaggatctggtcacggcgggaacctacatcgccgccccggagactgcggcggactatgaccaggctgtccgctatatgctctctcagggggaaaacaccctgtccctgaaatacgatcaaggctttaccgtttccagtgctcaggaggctctgaacaatgccctgctggcggtcaagcggtactgcgagcaaggctacaacaacgcctcctgctcctataacgccgccgggaccatgatcctgaaattcagctccatcgccggcgaccgtaccgaggaataccgttcagaagcactgactgccgccatcgccgtccatgacgcgctgtggcagcaggggaccattacccccgcctccacccagcgggagatcgcctgggcctattaccagtggatcgccgccaactgcacctacgatgacgccggggacaacacctccgtcagccacctgccctacagcctgtttcataacggcaaggccgtctgcgacgggtataccggcgcttacaatctgcttttgaagctggagggcatcgactgctacgctctccccaacgccacccacatctggaccgtggccacactggacggcgagaccgtccacatcgacgccacctggggggatcaggggaacaccggcacaaagcagtattttgccatgaccccggagcagtcttattcgctgcacccctggcccaaggaaaacgaactgccccaatgattcaaaaaaggacttccgcagcaatgcggaagtcctttttgttatacaaaagcatggcaacataagaaatatgccatttcctcgcccctgcggggcaaccggaaatgatgcgcgaaaacttcatgcactggcatctgtgcatgttcgtgctgcgctgttcatgcatgaagttttataccagatccttataatacgccaccagcagctccaccaccatgctgtaagacttcatgccgttggcgtcaccgtaggatttcagcgcggcgttatacaccgtatcggataccttttccaccacgttgtcccggaactgatcccaataggcgctgttgtcccggaggtctgcctccaccgctgccggaagggtgccccgaatggcccagtaagcctccggttctgtttcgtacaaggcgttgccaaggtggatgaatcccagcagccagccggaatatatgtagtccggcatcccgctggtgacagaggccaacacgcccaagaagttacactcctgctcccacgcgacgccccgctggtgggccagctcgtgggcgatggtggagggcagcaggcaggcggggctgtccacattcacattggactcccccacacaggcgaaatacaccccggtaaagcccatgacgctcatgatccgggagcagcgcactgccttgaccccggtatccggaaattccagaaagggaaacagttccgtcacgccgccgtagacagaccggctctctgaaaggatttgctctttcgacaccgcgtacacgccgttttcgtcccgtggcaccgtgtccgccgtttcggacagccgttccgcgaaataggcggtcacgtttttcagatcttccgcagccactggctgagctgtgatgccggagcggtcctgaaagctgtccgtccagtagttcacgccccacatgaggcagaacaggacgtaaactgtcaaaataccgtccgccgctcccaaaagggcgctgtatacccgccgtccccggtgacccctggccttcaccacggcgatcactgaccagacggtatatgccacagcccccaccgccgccagagcatacaaaatctccatgacggacaggctggtaagcgcgcacagccgccccaacgccgccttcagcagtgtggtgacgtgatccgcaaagctgttcatcagctgccggttctgccgcagagccagatacaggcccaacaccgccagatcgacagccagccagatatgcagttttcgacattttttccagaagctcatagcaatgcctcatctgtcatttttcaagctcaggatttggaaacagcaggcggaaccgcctgctgtccttatatccagttgttcggctatgcggttattccgccgccgccaacagctgctttgtgtacgggtccttgggatggtcgaacagctcgtccaccgtcccctgctccacaatgcgcccctgcttcatcaccagagcagaatcgcaaagctggtagaccacgttcagatcgtgggagatgaacaggtagctgaggtccagttcatcccgcagttcccgcagcagtttcaaaatctgggcctgaatggtcacgtccagtgcactgaccggctcgtcagcaatgaggaagcggggccgctggatcagggccacggcgatggacacccgctgccgctgtccgccggaaagctccgatggcttcgctttcagcacttcctccggcagctccacccgttccagcatctcccggacccggcgcttccgctccgggccgtcatactttccgtagatccgcagcggctcctctaacagccactccaccggatacgccgggttcagagagctgtacgggtcctgaaagatcatctgaggccgtttcgtataatggatgacctgtccggcctccggccgcaccatgcccaagatggtcttggccagcgtggattttccggtgccggactcgcctactaatcctaaaatttcaccccggtgcacatcgaaggaaacatcgtggagcacctcgtgaaagtacttgcgacccaacacgccgccttcccgatacccggcggtaacatgttgaagggagagtaccaattcgtccgtcatggccgctcctcctttcggttccgggtggggatggcgtcgatgagcttttgggtgtaggggtgctgaggatggtagaatacctgatcggtatctccctcctccaccagaacgccccgctgcatcaccgccacccggcggcacagcttccgtaccacgttcagattatgggagatgaacagcatggacacgccgctctcccggttcagttttttcagcatttccagaatttgggcctgaatggtcacatccagtgccgtagtaggctcgtccagcagcagcagcttgggccggttcacaatagccgccgcgatcatagcccgctggagcataccgccggaaagctcgtggggatatttgtcgcagatcccctccgggtccggcagctccgccgccgccatcgccgccagcgcccgctggtagcgctcctctttcggcatctgggtgtggatccgcagggtctcctctacctgcggcccaattttcatcagggggtccatgcagctttggggctcctgaaacaccacgccgatctccgctccctgaatctcccgcaaaacggaccggtccgcgtggagcagttcctgcccgtccagcaggatgcggccggtatagtcgcaccgcttccggggcagcagacccgccacactcatggcagtgacggattttccggagccggattcacccaccaggcccagaatttcgccgtcctgaatggtcaggctcacaccgctgaccgcttcccggtcccggttatgaaatttcacatgcaaattctgaatttccagcatcagacctcacctccgccccggcgctgcagtccttcgccgatcagtcccacgccgaacaccatccacacaagggtcaggcccgttcccagcgcgtaccagggcgcgctcataaacatgccctgactctccgagagcatatagccaagagaggcgtccggcggcgtcacgccgatgcagagatagctcatggatgcctccgccagcacagcgttgttgaagccgatggtcagcgccggcagcagcacgctccaagtattaggcaggatatgcctccacaggatgcggctgctggatgcccccatgagtcgggcgctttttacatagttgacctcccgcagtccggcgtaggtaccacgggccatccgagcaaagctggggatgaacaccaggcccagagcgaggatcacgttccgcgtcttgccagggccaagcaagctgatgaccaccagcgccagcagaatactgggaaatgccgtcagcacatcgccaaggcgcatcagcacatcgtccacgatgccgccgaaatagccggtaacggcgcccagcaccgtgccgcacaccgcgcccacggccacagtacacagcgcgattccgtaggtggtcccggcgcccttcagcacccggctgaaaatatcccggccaaagctgtccgttcccatcaggtgagccagagacggccccgtcagcttcggccccgctgccatggcgttggggtcatagggcgtccagaaaaagccgagaacgatcagagccgtcaggatgccggtcatcaccagtcccacggtcaggtaaggatttctctttttcatttgccgatccctcccatccgggggtcgatgcagcgattgaccagatccgccagagtgccggaaagcaccacccagaaggccagaatcaccacgatggcctccaccacagggtagtcctgactggaaatggaggccaccagcatccgccccagtccaggaacagagaacacctgctccaccacgatgctgcccgctacgatctccgccatagtctgccccaggaatgtgacggtgggcaccagagagtttttcagcacatggccccacaatacctgccgccggtcattgccacgggcaatggccgtacgaacatagggcttgttcatctcgctgatgaccgtgctgcgcagcatccgcaccgtcatagccacccgggggatggcgatggacacggcggcaaagaataagtacaccagagacttgccaaggttccggtccagtcctggaaagtcaccggggacaaacacccgaaggaaaatgccgaagcaccaggaaatgaggatgccggtaaagaatggcggcaccgccatgcagaactgattcaaaaacgtgtgcagcccctccagctttccgttggcagacagcaatcccaagggcagcgataccacaacgatcagcataaagctcaccaggctcaagcacagcgtcaccagcattttcgggcctaacagcgcctgcaccggctggcggtactggaaggaaacgcccagatttccggtgaagaaaccggccagccattccccgtaccgcgccagcatggggcggttcaatcccatttccgtccggagggcctccaccttttccggcgtggcctgcgtccccagcagggtggcggcggggtctccggagatcatatcaaaagccgcgaacgtcagaagggagacgacgagcatggtgacaagcagcgtcagaattttccgcgccgtgtatcgcatgactgtcatctcccttccgggtcagcggcgtcaaaacgtccgctgttcatcacttatttcgtatagtggatagtggaaagatccagaacatagatggggtagaaggaggggccctcaagaccatcccgcactgccacgaagtcagccatatcctgaatatagacgttggcagcgttttccgccaggttcttttccattgctctgtaaagggcggtctgctccccatcgtcatagcagacctgagcctgggcgaacagagcgtcatagtccgcgttgttgtagttgataaagtcgcggctggcggtagagacgaaccgctccagcatggcccgtgcggtcatgttggaagcatccacgcccaccacagtggactggaactgccggttggaataggtgtcctgcacccagctctcccaagtgacgggctgaatggtggcattgatgcccacagccttcagctgctccacgatgacctgtgcggtatccatgtgagactggtagttgctggggacggtgatggtcatatcgaagccgttgggataaccggcctccgtcagcagctccttggccttttcggtgttataagtatagtagttggtcagctcgtcgtcaaaatacttgctgaaagcggggtacatgctggagcccagcagggtgccgtaaccgtcgaaggccagatccaggatctgctgacggtcaatggcgtagcagagagcttgccgcacccgcacatcgtcaaagggcttctcggcgttgttgaggtacagggcctgcaccagattcatggtgccttcctccacatggaaaccgtcgccaagctgctggatctggttggtggtcagatgggcaaatacatccacagcgccgctctggaggctgagaaggatgctgtcggcattctcaatgatcttataggtgaccttggtcaggtcgggcttctcgccccagtaatcatcaaaccgctccagcaccacggactcctgagctgtccgggaaacgaacttgaacgggccggtgcccacgggggcggtatcctgctccgtgtagtccttgggcagcacagcggtggtcaggtaagaagtaaactcattgttgggctcctgcagctggaagcagacggtgtcatcaccctcctgatacatctccacgttggcaaaagccgccacctgaataatatctgccggagcattgacatcgccgcagcgctggtaggaccaaatcacgtcctccggcgtcacctcctggccgttgtggaacttcacaccggtgcggagcttaaaggtatacagcagatggtcttcggaaacggtatagctctctgccacagcgggattcaggttgccgctggcgtcgggcttcaaaagtccttcaaatacgttgaacataacctcacgagttcctgccttcacggttttgtgagggtcaagactgctgtccaggtcctgggcgatgcccacgttcagttcgccggccgcagcgcgggccgcggggccttccgtctgggtgttcgcggtgctctggtccgtagttccggtcgtcccgttctggctgccgcctccgcatccgctgagtacggcgctcaggaggcagaccgccgccaaaagcgtcaggattctcttcttcatatgcaattctcctttttatatcactgctccggggagtcagtgtattcgcggagcggttttctccgttccgcaaattcccagttcccttgcgggtactgaaaatccatgagggaatatgcggtggccgatccgcaaaaacagccctgggacacatcgtttgttatttttctaacgatatgtccgcaaggctgtattgtacaggatactgcggctgattgcaagccttttttacaagttttccgacgttttctccggtttttcaggctcggtttcctgctccggcagcggagcggtgtaatgctccgtttccacggggagatccttttccgccagacgccggtccaccaggaacgccaccagactgtacaggcaggcgcataccggcacgccgaagaacatacccgccacgccgaaaaagctgccgcccaccagaatggcaatgatgacccacaggctggaaaggcccgtgctctctcccaggatcttggggccgatcacgttgccgtccagctgctggagagccagcacgaacagcaggaaatacagagactgaatggggttgaccagcagaatcaggaagaagctggggattgcccccaggaaggggccgaagaaaggaatgacattggtgacgcccacaaaaacggacaccagcggcgtatacggcatatccagcagtgagcagccgatgaagcacagcacgccaatgatgagggaatccagcagcttgccccggacaaagccggagaagatgcggtcgaccttggcgctgccccgaaagacccagtagaccgcttcctcagaaaacaggctgtaagccagctttctggcatgggcggcacagcgctccttggtagccatgaagtacacagagacgatcatgcccaccagcaggttcttcaagaacaccagcgtactgagcacaccgccggagacggcgatcatcagcatctgcgtccgggtaaagacctgatttttcagccactccgttgcggactcgtagaacttatccatctggccggctacccaaacctccacggtggggttgctctccagcagatgctccacccagccgctgatggtattatagtagccttccacgctggaaatcaactgcaccacgctccgatacagctgcgggatcagcacatggcccagcagatagcagagcaggccgatgatggcccaggtcaccaccagactgacggcccgggcgctccgggaggtcatgcgcccctctgcgtgggcctttttcatctgttccggaaaaaacaggttttcaataaagtcgatgaccggcgccagcaggtacgccagtaccgcgccgatcagaaccggctgcagtgctttcagcagttgaccgccgaaggatggcagtacccggcggccaaacagggtatcgtaaaaaagcaagatcgcgcccacggtcaaaaagagggcaagtccccaccgcaccgcgctgtcttttttcttcatccaaccgcctcctgccgacagggtccgcccgcctgcggcagacttctcccgaaacctttatacaaactttattctacacgtcgcccgggggaattgcaatcctcaattccccatgctatactactttaaccgtctgttaacatttataatcattttcggaggcatggacatggaaccccaaaagaagctcctgatgatcgtcaatccccgggcgggacgtagcaagccccgggggccgttatatgacgcggctgccgccctgtgcgatgccggatatctgctccgtatccgccgcaccaccgccgccggggacgcagcccgcattgccgcccaagagggcggagattatgacactgtggtggccgtgggcggcgacggcaccctcaacgaggtcatctccggcatccaaacgcttaaaactcccccggcggtgggttatctgcctcaggggagcaccaatgattttgccgccagcctggagatcccctcagatcccgttcaggcggcggaggccatcgtccgtggtcagcgccgtcaacttgacatcggccgcttcggtgagcgtattttcgtatatgtagcctccttcggagccttcacccggacatcctacaccgcctctcaggatgtgaaaaatgctctgggccacttcggctatctgctggaaagcctccgggatctggatacgctgcgcccctataaggtccgcatcaccgctgatggggagacactggacggtgaatacctgttcggcgccgttgccaactccacctccatcgccggtatgatgaagctggggcgggaggaagtcattctggatgacggcctctttgagctgctgctggtgccccacccccaaaatgcatcggagctgcaaaatctgatctgggccttgctgaatcagcagtataacagcggcggtctcattttccgccatgtgtcggcccttcacgtggaaacggacgaggatctgccctggtccctggacggagagtacgaacccagccagccgacggtggacatcaccaactgtcagcgggctttgacgatgctgctatgagagaagaattgacaaatctgcgccggttttacggagatcatgttcccacgttgctggaagcccggcacgaatatgctgttttatgtcctctggtggagcgtccggatggactgcacctgttgtttgaggtccggtctgccggggtcagtcaaagcggagagacctgctttcccggcgggcagatggacccgggagagaccccggcagactgcgccctccgggagacggaggaggaattgtctatcccccgcgccgagattcggcttctgggccaaggggactttatctgcaatcagcggggctttcttctgcggccgctgccggggctggtatcccctgccggtctcgccaccctgcgtcccgcccccgctgaggtagcggaggtgttcactgtgccggtggaatttttcaggaccaccctgccccagccatgcgcctatgacctgatcccccgtgtcccggagtctttcccctatgaagcggttgggatcccccgggattacccttggaaccgcggcaaggtagaggtcccggtgtggctctacgggggccacgccatctggggcatgaccgcccggatcgtgcgggatctggtttcccatttgtaaaaaaagcgtctgaaagttctcactttcgggcgctttttccctgtccatgtgtatatcatgcgccaaatccctatattttccacaaaaaaaggcgccgtcttttcggaaaaacagagattttttacttttttcgtatattctctgacatttttgccaaaataatgttagaatggttatgaatccgaaatctttgcaatttttggaaaggaggcacttcccgtgtttcaggcaggagatctgctggtctatggcaccaccggcgtctgtcgggtgctttccattgaccggcggcaggagcgggtgggcagcacccgtcaggagcggctttactatcagcttaaacccatctatcagggcggtttgatctataccccggtagacaatgacaaggtgtccatgcggcccattatctcccggcaggaggcggaagatcttatcagtgaaattcccactctgcatcccgctgcctgccgggcttccaccactcaggcgctgactcagcagtatcaggccagtctccggcagcatgactgccgcagtctggtggagctcgccatgtccattcacgccaagcgccgtcaggcagaatcccagaaccgccgcctcggcatggtggacgagcgctatctcaagcaggcagagcagcttctgttcggcgaactggccgccgcgctggaaattccctacgaggcggtccagccctatatcgcagaccggatcgccgccgtccactcctgatctgcgaaacaacacgaaaaatcatgcggaacaaaagaggggcctcgctttcagcgaggcccccgagactgtcgattaagtggtaaattctccgcaatggtaaggaagggtgtgcgcgggaaacccaagaagggtgtcctgcgccattgaaatctcccaagttttagaactttacaaaagttctgaaaacttactcagcggggagaaaaggctttttcgacacgctgaggggcctcgctttcagcgaggccccttgcttatgccatattccggtattttttcagctgcttttcaaattcctccggcagaccgcaggtcagctccaccaattctcccgtgcggggatggataaatttcagtcctacagcgtgaaggcactgtccctgcaaaccggggaccggttttttgttgccgtatacggtatctcccaaaatcggatggccgatgtaggccatgtgcacccggatctggtgggtgcggcccgtttccagacggcactctacataattcacaccgggatagcgctccagcaccgtccaatgggtcacggcgttccgtccgccggccaccacagccatttttttccggtctgcggggcagcggccgatgggagcgttcaccgtcccggtatcctcccgaagattgccggtgacgatgcagcggtaggtccgggccagcgtgtgatcctgaagctgctccgccagtttcacatgggcgaagtcgttttttgcggcgatgatgagaccggaggtgtcccggtcaatgcggtggacgatgccgggccgcagttctccgttgatcccggaaaggctgtccccgcagtgatacagcagggcgttcaccagtgtcccgtccgggtgtcccggtgcggggtggactaccaggcccttcggtttgttcaccacgatgacgtcctcgtcctcgtacaccacgtccagcgggatattctgaggcacgatgtccactgcctccggctccggcagttccacagacaccgtttccccgccggtcagccgggtgtttttagcgaggggttttcccgccgccgtcacccggccctcctccatcagcttttgaacggcggagcgggtcagctccgtttgctctgccagccatgcgtccagccgttttccggcgtcctcactggccgtttgcaggatcagaggttccatccgttttcctcctgtcatgcttttcgtagagtaacacgtagtagatcgcgcccagaatagccccggacacgatgcacacatccgccacgttgaacgtaggatagctgggccagaattggaagtggagcatatccaccacatagcccagccggaaccggtcgatgatattgccaatgccgccggagaggatcaggcagcaggcgcagatccccagcgggtgccggacgatccttcgggccagcacccacagtaccgccgccaaaatgacgccggtgacacccagcagcagccacttctgtccggcaaaactggaccacgccgcgccgtagttgtgaacccgcatcagttccagaaatcccggaaacaaagaagtggtctcccccatctgcaaatggcccacgacccaggccttgacccactgatcggcgcccagcagcgccgcccccagcaggccgaaaatcacatagtacataaatgctcctttttgcaaaggcttttccaagcccgtctcggtttcagaaattgctaccagtatacacgaagtccgcctaaaatgcaacgccgggggagctatgctcctccggcgtgtgaaactatcgataaagtggtagatcctccgtgacggtaaggtagggcagccgttagcggctctgccgctttacggatgctgcataccccttgcgggtaaagggtgtgtgcgggactacgcccgcaggcgtgtttcggagcgcaaccgccgaaggcggctcttggcgcgtagataacccaagaagggatacaccgtcggctcaagccaaacagcggatactgcatatccgctgattgg

SEQ ID NO: 12117 - DNA, 15954 bp, Unknown
  gut microbiota DNA sequence
ttcaggtcggcggtctgctccggccagcccagggtggagaagggccacagggcggaggagaaccaggtgtccagcacgtcctcctcccgggtcaggtgagtgctgccgcacttttcgcaaacggtggggtcctcccgcttcacgttgatgtgcccgcagtcgtcgcaggtccaggcggggatctgatggccccaccagagctgacgggaaatgcaccagtcatggcagttttccatccagttggtataggtcttggagaagcgctcggggacaaatttcacttcgccctcgttcaccacccgcagagcctccttggccagaggctccatcttcacgaaccactgggcggagatcaggggctccacgtcattgtggcagcggtagcaggtgcccacgttgtggctgtaaggctccaccttcaccagatagccctgctcctccagatccttcacgatggccttgcggcactcgtagcggtccataccattgtaggggccgccgttttcgttgatgtgaccgtcatcggcaatgacccggatgacctccagattatgccgcaggcccacctcaaagtcattggggtcgtgggcgggggtcatcttcacagcgccggtgccgaagccgatctcgcagtactcgtcacccacaatggggatctcccggttcataataggcaggatgcacttcttgccgatgagatgcttgaacttctcgtcattggggttcacagccacgccggtatcgcccatcatggtctcgggacgggtggttgccaccacgatatcgccggagccgtccgccagcgggtagcggatataccacaggtggccgggcttgtccacatactccacctcggcgtcagacagggcggtaacgcagtgggggcaccagttgatgatgcggctgcccttgtagatgaggcccttgtcgtacagctcgcagaaggtctcccggacggccttggagcagccctcgtccatggtgaagcgggcgcggctccagtcgcaggaaacgcccatcttcttctgctgctggacgatgcggttgccgtactcctctttccacttccagacccgctccaggaacttttcccggcccaggtcatagcgggtcttaccctccttgacgcgcagctcttcttccaccttgatctgggtggcgatgccggcgtggtcggtgccggggacccagagggcggcgtagccctgcatccgcttgaagcgggtcaggatgtcctgcagggtgcagtccagcgcgtgacccatgtggagctggcctgtgacgttggggggcggcatgacgatggagaagggcttcttcttggagtcctccacgcccttgaagcagtcatgatcctcccacatctgatagatgcgggactccacctgctggggctcatacacctttggcagttctttgttcattgaaactctcctttatttcacggtcttaccagattttgaaaacaaaacgccctgagccataaggctcagggcgaacaaaagtccgtggtaccacctggattccacgcaaagcgcgtgacacttaccgtctgtaacgggacacccgtccggcttactggatttcagcacgaccgctccgcggtgacttcactgaccgtccggtagggcttgcaccgtccgccctctctcttgaccgttaaaatcagctactactccgcttctcagcgtttgaacggaactcattatacgatagcttttgtgctttgtcaacctaagaaagccgcagaatttcctttttcagccgttggatgatgcgcttttccagccgggaaatgtagctttgagaaattcccagccggtcggccacctccttctgggtctgctcctttcctccgcccaagccgaaccgcagagtgatgatctcccgctcccgtggtgaaagggtatccagcgccgacgccagcaggcacaggtccacatcgtcctccagaggccgcatgaccacatccgcctcggtacccagcacgtcggagagcagcagttcgttgccgtcatagtccgtgttcagcggctcgtcgaaggagacctccacccgccgtcccgcgtttttccgcagaaacatcaatatttcgttttcgatgcaccgggaggcgtaggttgccagcttgatgttcttgtccgtccggtaggtgcccacggccttgatgagaccgatcgtgccgatggaaatgagatcctcgatgttgatgcccgtattctcgaaccggcgggcgatgtacaccaccaaacgcaggttatgctcgatcagctcctgtcgggctgcctcctctcccaatcggttcagcagctccgtctctcgctcccggctcagcggcggtggaagcgtatcgctgccgccgatataatgcagctccggctcccggcacaatcccagacggcacagcagccgccgcagccattctctcatgattccttctcccttccccgccccataaagcggtatatccgccccccaactctgtatccgtcagggcgatccgcaaatttggataacaaacgccgccgatctccgtccaatcgctgctcacgctgaccagcagcccgcctcccgccgccgtccgcatcggcaaaagctggggacgcagctttggaaagcgctggcgcagcataggcagggtctctgccggcggacggtgctgaatggccgccgcaagctgtggaaaccgggacagctccgccgtcagcaccggttccccggcggtgtcccgcaggctgttgcccgtgtccagcaatgcggtgagggccaccgtttgccccagcaggcacaccgtcaccggcagacactccccccggataccgtgggcggccgccgcccgaaagatcaccgtcagcagcaggtagacccctgacgcggaaagcagcagggtttttccgttgacattcgtatagaaaattccccgggcgttgggaatgtgctgccccgccaacagtccgagggccagaaccgtccccgccaaggcgcaggcgatggcgacggtcagcagcgtcagccggagaaaatgggtctcccggccaaaggcgatgagcgccagcagcagccccacccccgcctttaccagcgtttccgtgagaaagcccccgccgggaaggaacaccgccgcggcatacagcccgcccagcactccgcagagtaggtagcgccggcggcgcagagggatccccgccagccgtgccgtagagagaaacagcaggtagtccagcagggcgttgaacagaaacacgctgtccagatacaccaccgtcatacgctctcccccctctcacaaggagattataagccgggccgttccgaaaaaaggtcgaaagaaagcccggcggacaagaaagccgtccgccgggcaaatgaggcgctttataccatcagcagcgcgctgataccggtagccgccaaaccaaagaccaatacgcccaccagaatcagggcaatgatacgggtccgcttcggagtcatttcggggttcctcctttaacttccccgctggcggggagaatttttttgatgctcttttctaccttggaccggggcagcatcagctcatggccgcagccaaggcacttcagcttgatgtccatgcccacccgggtgatctcccattgcttggagccgcaggggtgggtctttttcaattctacaacgtcttttatatgcagatccataaaagggcctcctgtcaccgctgcggcgaagccgcataaggtggaatatcaaagaaaaggatgtgatccgtatgccggaaaacagaggttacttaccggaagggctgtccgccccgccgctatacacgctggaaatgctgcgccgcgccgtgagcgacggcaccgtactggaggggaccgtccagcggtgcgatggggacctgaacctgtacttacagcttgggagcactttcgcgaaaattcccagagaggaagtcaccgctccgtggatcagcggtgcaggccgggagatcgccgttttatcaagggtcggaaagcaggtctgttttacggtggaatccctctccgccgacgcgaaaggcgcgccgacggccctgctctcccgccggaaggtccaggaacaggctatggaggaaatgcgccgcggtctgaagccgggagccgtggtggtgggaaaggtggtgcgcatggagcccttcggggccttcgtggacattggccggggcatcgtggctctgctgcccacggaatacatctccgccgcccgcatccgccatcccaacgagcggttccgggtggggcagaaaattctggcggtggtcaaggtctttgaccgggaaaaccggcggatcaccctgacccacaaggagctgttaggcacctggctggaaaacgccagccgcttttccgagggggacacggtgcggggcactgtccggggcgttatggactacggctgctttgtggaactggcccccaacctctccggcctcaccgaccagcgggaggatctgcgggagggggacggggtcgccgtcaccatccgttccatccgcccggagcgcatgaagatcaaattgcaggtcattgaaacgctgccgcccacggagccgccggaaacgctgccctactggatcaccgacggggtactggatcgctgggtttactcccccgccaactgtgagcggcctccggtggtcacggaattcactgaggtcccttgatcttctcccagtagcttttcgcggcctgttcggtcttgttgtcgccgtagtgataatagcgggcgtttttgatggcgtccggcaaatactgctggcgaacccagtggtggccgtagttatgggggtacttgtagccctgttcccgctccaatccggcggaatcagcgtggacattctgcagctcccggggcacgtcgcccccccggcccgccttcacatccgcccacgcggacatgataccggtgcaaacgctgttggacttgggggccgtggcaagcaggatggcggcctgcgccaaggggagctgcgcctccggcaggccaagctgcatagcggtatccacgcaggactttacaatggtgatggcctggggataggcgagacccacgtcctcactggcggcgcacagcaaccggcggcagggagtgatgaggtctccagcttccagaaagcgggccagatagtgcagcgccgcatccgggtcgctgccccgaatagacttgtgaagggcggaagcggcgtcatacatggcgtcgccgccccggtcataccgcatggcgctgcgctgggacagcgccttggcatccgcctccgtcagcagcagcgttccgtctttggggaccgccgcctcgcagagaagttccacggcgttgatggacttgcgcacatcgccgccgcagccctgagccaccaggtccggcacaccggcctcccaggtgagaggcaggggcgtccggtccttcatgatctccaacgcccgcagcaccgccggacggatctccgccgccgggacggatttgaactcaaatacgctgctacgggaaagcagcgcgttgtacacatagaaaaaaggattttccgtggtggaagcgatgagggtcagggatccgttctccataaattccagcaggctttgctgctgctttttgttgaaatactggatctcatccagatacagcaggatgccgccgggggccagcagcgtccccacatccgcaatgatgtccttcacgtcctgcaaggacgccgtggtggcgttcagacggtacaacgtcttgtgggtcttttccgcgatgatgttggccacggtggtcttgccggtgccggagggaccgtagaacaccatgttggcgtcggtcccggcgtcgatcaggcggcgcagaacaccgccgggcgccagcaaatgccgctgacccacaacttcatccagagttttcggacggatctcgtccgctaagggccggtgcatagcgtccctcccttctatcaaatgctgaaattgtattatagcataactgtccggaaaatgctatgattttttctctttcattcccacagaattcgtgataaaataacaccattcttgtacataggaggtgcgccatgcggtacaaggcgtccaccctgcggatcatcgaaaaattgaaggagctgtacccggaggggctgtgttctctgcaatatgagaaagattatgagctgcttttcgccgtgcggctgtccgcccagtgcaccgacgcccgagtgaatctggtgaccccggcgctgttcacccggtttcccacgctggaagccttcgccgcagcggaccccagggaggtaggcgaatacatccattcctgtgggttctacaatggaaaatccaaggatctggtggcctgcgcccagcagcttttggagcggttcgacggaaaggttcccgacaatatggaggatctcacctccctccccggcgtgggacggaaaaccgccaatctgattttgggggacgtgtacggccagccctcctatgtgtgtgacacccactgtatccgcatcaccgggcggctgggcatcaccgacgggtccaaggacccggtgaaggtggagcagcagctccgcaaggccatccctccggcagaatccgggcctttctgccaccggatggtgctttttggccgggatgtgtgcaccgcccgctcccccaaatgcgaggattgccccttaaaagcggactgcgctcaggggaaaaagctgaaatgatgtaaaaatgtgtctgcgattttcgcaggcacatttttttcgcgccgttcatatactggtctgagactgagagcatgggaggacacagccatggatgaaaacaccaagcggatgatggaccagctgaaggccgatcccgccgcccttcggcagcttatgcagtcccgcgatgggcaggcgctcatgcaggcgctgacccggccggacaacggcgcggggcttcagcgggccatgcaggctgccatgcggggggatacgaacgtcatggcggagctggtggggcgggtggcccaaagcccggagggcgcggctttgatggagcgcgtcagccagcggctccagaaataaagagggaggtccggcctcatggcggagtttgacgacaagctgaatagtctcctctccaacccggaggccatggaccagatcatgaaaatggcccaatcccttatgggaaacagcggtggggcggagcagcctccccccgccgcgccgccctccggcgaaacaggaagcgcagcgcagaacggcggccttccgtttcagcagagcggccccaccagtggagggacggcacaggaccgggggcagcctgtcccggaaaaccgaaacccatctcccagcgggcctgtggcgagcggtcagccggggtctggcccaggttttctctccggactgggtgatctggatcccaaggccatcgcctccctcctgccggtcctccgggagttgggagaggcccagaacagcaacgcccgtcagcttttgttcgcactgcggccctatctgaaaccggagcggcaggataaggtggaacgggcattgcagctggcccggctgttccgggtggggaaaaagttcctgctgaggggggatggccatgtataaccgttacatccgccgggatgacggcacctataccaaggtggcggaaccggatccgccccggcaggaaacaactggccccggatcgcagccctctcccccgccgccagacgatcccaatgaatccggcccccggtccggcggtccgccgccgtccttcggcggcgcggagggccttgccgggtacctgcggcagatactggaccatctgcatctggaccgggtggacgccggagatctgctgctgttgggtctgctgtactttctgtttcgggaaaaggcggacgaggaactgctggtggctctgggcctgctgttgattttataaacgtaaaacaccgtacctgacgcaaaatcaggtacggttgagactgtcaataaagtggtaaattctttgtgttggtaaggaagggtgtgcgcgggaaacccaagaagggtgtcccgcgccattaaaatctttagttttcagaacttttatgaagttctgaaaacttactcagcggggcgaaaagactttttcgacacgctgaggtacggttttgttcagaccagcagctcctgccagcccgcgtattccagatgataggcgcccgccaaggcccgcagcgtttcttcggcgtctaagggggcgcaccacgccataccgcagtccgccgtcagctcccggggagtggggatcaagcggccggggatgctttgcgccttgcagagggtctccatagccatggctgctgccgtggtgtggaacgtcaccaccagtttcagggttttgggtctcattccgccagctcctttaccgctcggatcgccgtgtcgatctcatgttccgtgttgaaccagccgaagctgaaccgcacggctccctgatgctccgtgcccaaggcccggtgcatccggggggcgcagtgggcaccggggcgggtggcaatgccgtagtcctgcgccagcgcgtccgacacctcgccggaatcgtagtctcggatattcagcgccaccaccgccgtccggggagcggtaaaatcgccgtagaccgttacgccgggaatggcggaaaccccctcataaaaccggcgcgtgagggtttcctccttctcccggatggtctccatgcccaccgcccggatatagtccagcgaggcggacagcccggcgatgccgtggccgttgagggtccccgcctccaaccgtgtaggcagctgctccggctgggcggggttgtaggtctggacgccggtcccccccaccttccatgggcggagggtgatcccctcccggaggcacagcccgccggtgccctgaggacccatgagggacttgtgcccggtgaaacagagcaggtcgatctgctgggcctccatgtcgatgggcaggacgcccgccgtttgggaggcgtccacaagaaagatcaggccgtgggcatgggcgatggcccccacccggccaatatccacggcgtttcctgtgaggttggaggcatgggtgcagatgatggcccgcgtctccgggcggatcagccgctcgaacttgccgtagtcgatccgcccctgccggtcagccgggacgaaactgagagacacgctccgctccgcctccagccggtacaggggacgcagaacggaattgtgctccagatccgtggcgatcacatggtcgccggggttcagcaatccgcagatggccatgttcagggcctccgtggagttagctgtgaacaccacatggtcaggccggggacagttgaagaatgtcgccagcttttcccgggtgccgtagatcatccgggaggcagaaaggctcccctcgtgggtgccgcgggcgctgttgcccaaggtggtcatagccgacaccaccgcgtcgatcaccggctggggcttctggcgggtggtggcggcgttgtccagatagatcatggcttgatgactttcccggcggcggccagcgtctccgcgatggcgtacatattggtgatgctgcccacggccagggtctccttcagcttgtagaagtccagacaggtgccgcaggtacggatctccacgccctgcgcctccatgaacttcagatcctccaaagaatcggactccgtgcaggtgagatacgcgccggaattgtagaacaggatggtcttgggcagcgcgggcagctggctgacggcgtacaaaaagcccttcatcagcgccttgcccaacgtctcctccccattgcccatgcagttggagccgacggcaaccaccagatccccacgggcatccggggcacaggcggtctcttccgcgggctgtaccggggcggacacctccatggtgacggagaaccgcttctctccggtcttttccgctcggacgggcagctggcagctggccgccagcttgctgaggttctggaccgccgcctcattgtccaccagaatttccagtgtatcaggggtttgcagctctgccagagccttcttcgccatcacaacgggaatggggcactgtttgcccagcgcgtctacaacaacagacatggaacacaactcctttaattagattttcaagttcagtgtagcacgatccatcgtgattcgcaaggaaaaacaacgggatacggcaaaacccccgccgaaacctcggcgggggcgaattctgtcagacgatctcaagggtatgctccgtttgggcgaccaccgcacctatgatggcgctgtccgggtctcgctcccgcagagccgtgagcaaggccccggcgtcctccatagggagggccaccagcaatccgccggaggtctggggatcggagatcaggtccacacgggcctgctggacgctctccgccacggtcaagcggggcttcacatagtccagattccggtaggctccggcggggatgatccccatttccgcgaattccagcgctcccggcaataaggggagccgccggctgtaaaggcggatggtcacgccgctgcctcgggccatttcatcggcgtggcccagaagtccgaagccggtgacgtccgtacaggcgtggatctcctggcatttggacacggcctccgctgcgtgggcgttcagccgggccatggagtgaaccagacggtcgtactgctccggctccagcaggtctgccttggcagcggtggtcaggacgccggtgccgaggggcttggtcaggatcagcgcgtccccgggtctggcccccacgttccgcagggccttgtccgggtggacatagccggtgacgcacaggccgtatttcggctcatcgtcctgaatggtgtggcccccggcgatgacgcagcccgcctccacagccttctggtggccgccctctaaaattttccggatggtctcctgagagagacagccggggacgcacagcaggttcatcgccacggcaggccgtccccccatggcgtacacgtcactgagggcgttggccgcagcgatctgcccaaaccagaaggggtcgtccacaatgggggtgaagaaatccacggtatgaatggcggcgatctcgtcggtaatgcggtaaacacaggcgtcgtcgctggtgtcaaagcccactaacaggttggggtcaacccggttgggaaggtctttcagaatgttcgataggacacccggccctaattttgccgctcaacccgctgatggggtcagctgcgtcagacgaggctcctgatccatgatgctccctcccttcccgatatctggccgtgggcttcacggtcaggaaaagtatagcacagttcccgccgtttggcaattcgcccgtgctggacttttttgcgatcctatggtaacatacttcaacaaaaacagatgaggttcgcgggcagccgcgaaggatgggagcagctatgggtattgtggtgttgggcgccgttttcgtggatattaaggggtatcccgccgatgtatatattcccggtgggcggaacgccggacgggtggagatcgtccacggcggcgtcagccggaatctggtggaggacattgccaacgtggagctgcggcccaccttcgtcagtctggtggacaccaccggcaccggagcggacgtgatccgcaagctgcaggaccacaaggtcaacacggattacatccgggccgtgcctgacggtatgggtacctggctggccgttttcgacaacggcggcgacgtggtggcctccatttccaagcgcccggatctgcggcctattgtgggcattttggacgatcacggagacgagatcttccgcaatgccgacagcatcgccttggagatcgactgcgacaaggagatcgtaaaggcggtcttttactatgcggaaaagtaccgcaaaccggtgtttgccgccgtgtccaacatgagtatcgccgtggagcggcgggactttctgcgcttctgctcctgcttcgtgtgcaaccagcaggaggcgggaattctgttctcagaggactatgacagcaagaccccggaggagctgcgggacattctggcccaccacgtacaggcggcggagatcccccggatggtggtgaccatgggggcccaaggagcggtctacgccatgcaggacggttcctgcggcatctgccccgccagaaaggtggacgtgaaggacaccaccggcgcgggggacgccttcttcgccgggatcaccatgggcctgacctacgggaaaaccatggatgaagcctgcgagatcggcacccggctgtctgcgtcggtgatctgcacgtcggaaaacgtgtgtccccggttcctgcccagcgaatttgggctggaacccggcagagccgccggggatcagctaacctttgatatataaagtcttcggaacaaaagaggagaacgccatgaacatcagaacagcgacattgaacgatctggacgcggtaactgccgtggaggctgcctgcttcccggcggcggaggccgcctcaaaaaaggaatttgcagagcggctgcggtattacggcagccacttctggctcatgctggacggcgaaaagctcatcggctttgtggacggcatggtgacggaccagaccgacctgaccgatgatctctatgagcaggcccacgctcacaacgaacagggcggctggcagatgatcttcggcgtcaacacattgccggaataccggtgtcagggcgtggcggccgctttgctggaacgcgccatctccgatgcaaaggcccagggccggaagggtctggtactgacctgtaaggacaggctggtgcactactacgccaagttcggctttgtcagcgagggcgtgtccggctccacccacggcggcgcggtgtggtaccagatgcggctgaccttctgagtcatcgaaagcagatgcaaaaccccgccgggagaaattctcccggcggggttattgttcggtcaggcttcttttatcggcggataaactggatattcatgtccacccggccgttgatcccggccacggcacgggtgctggagaactgccagtagtccatgtgatacaccagcgtggggcacagcttctcggacttttcgctcttgtactcaggataccagctcagatagtccgccagagcgccctgatcgtacttcatgtaggtcacatacgtaccgccgtagaccatgggggtataccccgcgtccttgatccgctggcagaaggccacagcgcaggcggtagccatttccggggatgtgccgtagacccggtaggtggaatcgtgcatctcccagtcataggccacggggccgttgatatccagcccgtccagcagactgatgacgtaatctgcctcctcgatggcctcctccacggtgacagcctgggcgaagaagtacacgccggtctccagccccgcccgcatagcgccccggatgttctgctcgtagtatttgtcggtgttcaggctgccggtgccggtgccccggaagcccacccggaccatggcgaagtcgatgttgtcatccgccacggcgtcccagtcgatctccccctggaaggaggaaacgtcaatgccgtaccgggtgcggaactcgccgcccagatattccagccgccgctggttttcattttcttcatccgtccaaatgaaatccacgtcggagaacacgttcagcggacggtcccggtaaatgggcacggtcttgccgccgtattcaagggtgcggtccagcgtggcaccgggcttgtagacctcggagggcttggtagccgtgctctccggcgtgatctgcggtgcttcaaagcgcacctcaccggtgccgtaattgcggatattgccctggatcacgcagtccaccagggtcacgtccttcgtaacgccgggagctaagatcagatcgccgccgatcttgatgcccttcagcgttgcgccgtccgccgcgctgatgagcaggctgccggaaacattctccgtcacagtggtggtctccttcaccagcgtatccaccatgttgctgaggatattgatgagctccgcccgggtgatgggatccgcgggccggaaggtgccggcggcggaatccgtcagatacccgcgagcctcaaactcccccacataggccagcgcgtactccgcgatctggtccgtatccgtataatccggtgcggcggtctccggcgcgatccggaaggcgcggccgatcatagccaccgcctgctgccgggtgatggtgctggagggcagcgctgcgccctgattgcccagatagatgccggaggcgtggagcttcaggatggcgtcctcccagtaggtcccggcggtatccgagaaggtatccgcgggagaggcattctgaaaatggagaaaacggtccagaattcccgcaaaagcgcctcgtgtgatggatttatccgggcggaacgtaccatcgtcatatccctgaatgatcccatactccccggaccacttgttgatggcggactccgcccagtgtccgtccgtatccgcaaacgcgttggccgtcatgacggtgcagcccaccgccagagccgccgctgtcagccactttccaaaatgccgcttcatagctgctcctttctgtcaaaaccagtcgaatttatactgaaaaaacgccacggccctatgggccgtggtgttatgtcgccctacgggcacattatagcgaaatcggagacatgggtcaatattctgtcggaaatttctcccggaaaattatgtaaagtttcagaaagtgttcccccctctccccggaaaaagtacccggcttcacctatgcgctctttccctcttgcaatgcgcaaacaggcatggtagcatggagttgatcccgaaaaccggcacagagacccgaattgtcgatcaaaccgctttgcggctttcgccgcggcaggaaccgaatcaggagggaaacgctatggcattgcttgtattcgccattttggacgttatgtgctgctatttttgctatttcgtcggcacgcaaaagggatacaacgggccgctttgcgcttttgccgggttatttggcagttttcttgcgtgtctgatcctgcttctgatgcccgataaagctggtgacacatttaacagcgccgcttataaccgggaagtatctgaactgagacaacaggtaaaggatctgcaaaagaggatcactgaattggagcacggcgcagctccggcagatcagccgaaagcggcggtccatacggagcaagcaaaggacgagccgatcactgagatcagcaagccggttcggttccccacccgaacatcggacacggtcatttgtcctggctgcgggaagcggcaacagggaaatcggaacagctgctacgcctgcgggctgccattctactacgaggatgagccaaggcgtaagcgctaaataacccgtacctgtactgtgggaaacagatatgtcatactgactcggggagtgtcgagtattcttgacacttctcgagactttctaatacgggggcacggtatgaacgtaaatgcagttaagcatcaggcaaagttactggaatggaaaggtcgagtagcagattgcagaagcagcgggatgagcgtaaagcattggtgtgaggaaaatgattgttcccccaggacgtattatcggtgggagcaggagatcttgggaaaagtaaggcaaattacaaaggcagagtctcagccggtgctggccgagcttcctgtgatcaaagcattgccgtcgcaggaatgttctaagagaagaaatccatttgttcctgttttggttatccgctttggacaggtggaactggaattatccaatgcggtgtcatcggagctgctaagtcaggtgaaggagctgatgcaccttgttgaatgacgcaaaaggattcagccgtatcatcattgcgtgcgggcgtactgatctgagacgcggtatcgat

SEQ ID NO: 12118 - DNA, 3203 bp, Unknown
  gut microbiota DNA sequence
atagccgcttttggccacggccatgaggccggtggtgcccttgtccagccgattcaccacatgaaagataaagtccgccccccgctgataggccagcgctcccgctacggtgggggtatccggcaggaaattggaggcgtgggccgtcatgccggcgggcttgttgaggatcagcaggtgctcatcctcatagacgatgggcaggggccagtttcccggcgtggggaggagcttgggcgggcgcagatcgtcagaccgcaccgccaccacatccccggtatggaccgggtccaccgtccgggcgtggacgccgttgacccggatgccgttttccgcacgggtgagccgggctacggcgtgggtggagaagtggagcttcgccttcaaaatgtgccgaacgcagacgccgtcctcctccggcgtcacggtgtaggtgataacctccatcagccttgcgccagataggtcctgaggctgcccagcgatgcctcggcgtcgccggttcccagatcatacaccgcttgcagcttgtcgctgcggcgctccaaccgcccaatctcaatgggctggctggggtgcagcacccatgcctttccctgctgctcccagttcaatagctcccgaagggcgttgttatagacattgtggcggtttttgagctgctctgccagcgccgggtaatgcttgtaccacaggtcgatgggcttggggttcatgggcttctttacatagcttttgtcccgggtgaggatcaccaccacccggtcaaagcccagcttttcggcggctctgaagggaatggagtctgcaacgccgccgtccagatacagcttgccgccgatcttcaccggctgggacacgaagggcatggaggcggaggcccggatcacgtccatctgggccatggcgtgttccagacggatatattccggctggccggtctccacattcgtcaccaccgcccagaaggggacgccggaggcgtcaaaggtgtcgccgtcaaaggggtccagttcccggggtaccttttcgtaggcgtattccgtatccacgatgttgccggttttcaacagggggatcagccccatgtaatgatggtcggcattgaagcgcttattgtagcggatcacccgtcctggctgccgggagaggtaattcacgccgaaggcggccccggcggacacgccgatgatgccgtcgaactggattccggcgttgtagaaaacatctaaggccccggcggtatacattccccgcatggctccaccttccaaaacaagacaggttttcatagcttagcctcctatcggcacttgccggtttcaaaaaattagtatatagtatatcacggaaaaaacaaaacggcaatctcggattgtcggaaaaggagaaccgctatgcttttatccgcggagcatctgtctatcaactttggcagccgtcagctgttggaggatgtgaatttttatctgaacgagggggacaaggtaggcgtcatcggcatcaacggcaccggcaagtccacctttttgaaggtcctggccgggaaattagaggctgacgccggaacgatttcccggaatcccaatgtacaggtaagcctgctggagcagaatccccccatggaggatgacgccaccgttttggagcaggtattcctgcatttccccaaggaattccgggagctgaacgaatatgaggccaagtccatgctcaacaagctgggcctgccggactatgagcagaaggtggggaccctctccggcggacagcggaagcgggtggcgctggcggcggcgctgatccacccggcggatgtgctggtgctggacgaacccaccaaccatctggacgcggaaatgaccgcgtggctggaggactggctccgccgtttcaagggcggactggtgatggtgacccatgaccgctattttctggagcgggtggtgaaccacatcacggagctgagccggggcaagctgtaccattacgaggccaactattccaaatatctggagctgaaggcccagcgggcggagatggcggaggccagcgagcggaagcggcagtccatcctgcggacggagcgggagtggatcatgcggggctgccgggcccggaccaccaagagcaaggaccgtatcgagcgatatgaggccttgaaaaatcaggaggccccggagacggacgataccgtgcagctggcggcagcgtccagccgccttggcaaaaagctcattgagctgcatgatgtcagcaagtcctacgagggccgaaccgtcatccgggacttttcctacaatctgctgcggaatgaccgcatcggcattgtgggacacaacggcgccggaaaatccacgctgctgcggctgtttgcgggggaactgtccccggacagcggcacggtggacatcggcaccactgtgaagatcggccacttttctcaggagggtcgggagctggatctgaaccagcgtgtctacgattttatccatgacatcggcgacgaggtccgcaccgacgaggggaccttcaccgccaaggccatgatggagcggttcctgttccccagcgatttgcagtcagtccccatcggacggctcagcggcggagaacggcggcggctgtacctgctgtccattctgatggaagcccccaacgtcctgctgctggacgagccgaccaacgatctggacgtgatgaccctttccattctggaggactatttgcagggcttcccggggcctatccttatcgtgtcccatgaccgcttcctgctggataagctggcggagcaggtctttgaggtgcgggacggcgaggtgctgcgttacagcggcaactggtctgactggaaggccaagcggaaagaggaagaagcgcccgccaaggcggaaaagcccaaggcggctcaggagcggccccgggagcggaaattgaaatttacctttaaggaacagcgggagttcgagaccatcgacgaggacttagcggcgctggaacagcagatcaaggactgtgaggaagcccagagtgcctgcggcagcgattatgtgcgtctccaggaattgcaggccaaacaggcggagctggaagccgctctggaggaaaaaacagagcggtggatgtacctcacagagctgaaggaaaaaatcgacgcacagtgagtttgtgttagaatggattcaatcaaaaaaaggagc

SEQ ID NO: 12119 - DNA, 5995 bp, Unknown
  gut microbiota DNA sequence
atgaagtgggattcaccgttcttggcataagtgaagtagcgggcaaacaggtctttggaaaaaaacacggcgggctgatgctcccttataagcgcgtccagtgccgcctgcgtcagcggctctccctgaccgctccgggcagggagacggaagtccatccgcagccgctgtaagtcaaaaaccacgttccgtccgccgccgtaacaggcgagctcctcccggatgtgggtttcaaagctgccgccggagatggctgtgttcacgatgacggtggggtgctccacagccccggcgtaggatggggggagacagaagaacttccggtttctgacgcactgctgccccaataagacggcaaagcggcggcgatcctcctgaggcggctcgtcaaagtccagaacgacgccgccatagctgcggcgggcacattcccggagcacggcctcggtcagcgccgccgggcggtcgatgggcggtgcggcccggtcactgagaaccagcagagccgacggaccggatataggaccgggacgggccggtgtcagtaaattccggctcagcagggaggacccctccccgatgcggtaggcggcgtgggccagtcccgccggataggcggaggcggttctcgtgtcctccggccggacggtcaaatagagctgcatagaggttcccccttgtgaagcggccgtaattctgatatactgcatttattcttatgtgagaggagggcggcttatgctgacaccggatattctttttgacagctaccgggacatcacccccgcctttctgcaaagtcagggcgtaacgctgctgctgacggatctggactatacactggcgcccaaagcggtccgccgcccggatgacgccctgcgccagtggatcgacggcttgaaggacgccgggatcaccgtgatgatcgtgtcgaacaaccgatccggcgttcgcgtgactgagttctgcggagatctgggcatcggctatcagggccatgccagaaagcccagtccaaagggcctgcgggccgctatggagcgaacaggaacagatccggcccacaccgccatgctgggagataagctgttgaccgatatgctggcggcccaccgggcgggcgtccgggcgtggatggtggagccgctggggggacctgtgggactgtggaaccatgttctgcacctgctgcagcgcccgtttaaaagagcctgcccctataaatgccaaaaaaatccgggggaaaacacaaaataaccggaaaaccacttgcaataacggacaagatagggtaaaatatcatcggtcaaattatataagacaggaaagaattgagaaaatgtccacttcacggtcgttttctcgtaaagatttgtgaggaggatttaactatgcctatttccgcaggcgatttccgtaagggtgttgtatttgagatggacggtaagcccatgctggtcgtggacttccagcacgtcaagcccggcaagggcgccgcttttgtgcgtaccaagtacaagaacgtgatgaccggcgcaatccgtgaggagtccttcaaccccagcgccaagtttgagaacggcactgtggagcgcagaaacgccgagtacagctacaacgacggcgatctgtactacttcatggaccccgagacctatgacatgaccccgctgaacaaggatgttctgggcgacggcttccagttcgtcaaagagaacaccatgtgcactctggtcagctacaagggcagcgtgttcagcgtggaggctcccaacttcatggagctggaagtcactgctaccgagcccggcgtgagaggcgataccgccaccaacgtcaccaagcccgccactctggagaccggcgccatcatcaaggtgcctctgttcatcaacgagggcgagaagatccaggtggatacccgcaccggcgagtacctgggccgcgtgaaggaataagttttgaaggggggattataacgataatcctccctttatttccaagattgatattttgaaaggagcgatcactatggagatcactgagaaggttgcgtatctgaagggcctgatggaaggcatgaagatcgacacggagaccaacgagggcaagatcctgtccgctatggtggacattctggaggacatcggcctggagctggaggacctgtggaatgctcagggcgagctggaggacggtctggacgttgtcagcgatgatctggaggatatcgaggacatcgtgtatgacgaggatgatgaggagtctttcgacgacgagtactatgaggatgacgccgaagaggacgaggactgctacgccaccacctgccccacctgcgaggagaccatctacttcgatgagtccgtgctggaggatggcgaggtcatctgccccaactgcggcgagaagctggagttcgacatgagctctctggaagaggactctgatgacgatcaggagtaaatccgatccgatccaatatgaaacagctccccggtgaataccggggagctgttttgcttgatttcctatgtggatgcataaaattagttgatgcaatgactttaaagctgtattactttacagatttctgccgcaggctacaaagtccggcaccgatagcggtagcgaaggtggcgctttccgggatcacgtaatggatgccgtagagcttttcgaaagccgcaaagtttggctccgcctgatccagcgtggtcatggagccggtgacgatcacggtgtccgtatggcagctctgacaggccagcaccgtcatagtgccgatggcctgaaggaccagatttaccgcgccggcggccagatcggcgggggtggcgtcctcagagagatcaccaaagttggcagcggtcatgttggggtccagcgtggaggcagggtcccgggcaatgtcgctgatggtgagatccacatggctcagatccccctgagcggccagctttttgatctggtagaagcgttccataccaaccagcttgcggcagagaccacccagcgtgccaccgccgataccgctgccgcaaaggtgccgtacttcttttccggcttctgcccacaaaaaggcggtgccggtacccatcgtcacgactacgccggaggattgaccggacagagccagtgcaccggtgccgctggcctgaaattcatccacccgacaggtgggcaggccgaacacatccccgtccacatagctggcgccaacgccggtcagaacaacccggcgcacatctccgagggagagaccgttgctggtcaggtagttgcccagtgcgccgtacaggctggtgacctgatcctctgcccggacccggagcatggagaccacgctgccgtcggtccgcagccctacgatctttgtagtagagccgccaatatcaatgcctaagatcacttccatggcttgtttcctttccaaagggggccggcaggtgagggatacgcgaaagtcggccgccgtcttagttatgataggggagcagaggtgccttgtcaatgtttatttgtgaaaaaattgataaaagaattgcttttatccggggagatagctataatgtgtggtaacttgtggtgtaacgagaaggagacacacgatggatatcacagataaactcaatatgacgatgctctgcgacttttacgaattgaccatgggaaatggttatctggaagcggggctgaaggatcggatcacctatttcgacatctttttccgtgatgttccggaccacggcggctatgccatctgcgccggtctggagcggatcatcgcctatattcaggatctgcatttttctgaggaggacattgaatatctccggagcaaggatctgttttccgagcggtttctggactatctccgcgatttcaaattcacgggtgacgtctgggccatcccggagggtactcccatcttcccccgggagccgatcatcactgtccgggctccggctattcaggcgcagctggtggagaccttcctgctgctgatcttcaaccaccagagccttgtggccaccaagaccaaccgcattgtccgggcggcggaggggcgcgtgatcctggagttcggttcccgccgggcacagggcacggacgccgccatctccggcgcccgggctgcctatatcggcggctgcgccggtacggcctgcaccatttccgaccagcttttcggcgttcccgccggcggcaccatggcccatgcctgggtgcagatgttcgactcggagtatgaggccttcaagacctactgcgaggtgttccccaccaacgccacgctgctggtagacacctacaataccctgaaatccggtgttcccaacgctatcaaggccttcaacgaggtgctgcggcccaagggcattaccaagtgcgccatccgtctggattccggcgacatcgcctatctcacccgggaggcccggcagatgctggatgaggccggttgggagagctgcaagatctccgcgtccaactccctggatgagtacatcattcaggacatcctccgtcagggggccaaggtggacctcttcggcgtgggcgagcggatgatcacctccaagagcgacccggtgttcggcggtgtctataagctggcggccattgagaaagaggacggcactatcgtgccgaagatcaagatcagcgaaaatgtgggcaagatcaccaatccccatttcaagaaggtctaccggatctttgacaaggccaccggcaaggcggaggcggactacatcaccgtgtgggatgaagtgatcgaggagggtcagcctctggaactgttcgatccggatgccacctggaagcggcggacctacacggactataccatcaagcccctccaggagaagatctttgaccatggcgagctggtgtatcagcagcctacgctgtcggagattcagaagtactgccgggagcagatcgataccctgtgggacgaggtaaagcgttttgagaatccccacaactactatgtggacctgagccagaagctctgggacatcaagcaggatctgctgcgtaagaattaccgctgaatgaaaagcgcatggccattccagccatgcgcttttttcaaatatagttgaagattgccggttgtgttgctataattataatagaaaactatttgaatccgggaggtgacggtatgggcagaatgtcccataggaatcaggaacgcacggagcggcggatctccgctgcggccagtctgatgctctgcgccctgacggtgctggcgcagatcgcggtgacccttctgctgacccgtttcctgaaagaaaaggccagctttgtgtatggcttcctccaactgatcggcgcggtggtggccattcgggtttaccaacgcagcggcagcccatcctataagctgagctggatgtgtttgctgctgattttgccagtggcaggtatgctcctgttctgtctatggggcggcacgcatcaggccaagcagctgagtttgaagccggtgccgccgatcccccagcgggagagcgcaaaaatgctcagcgacctgaatcagaccgccctgacccgccgcagccctgcgtggggccgcttggccgcctatctccagaagcggcaattctggctgtaccgcaatacggacgccgcctatttcggtgagggggagtccttcttccgggatctggtggagcatctgcggcaggcggagacctatatcttcatggagtattatattttggcggaggggactgtctgggacgagatcttcgccgtattgaaggaacgtgccgccgccggggtggagatccacctgattatcgacgatttcggcaccttgacccgtctgtctgacgggacgctgcaagccatcaaagacgcggggatcgaggtggagatcttcaaccccgtccaccggtatatcaaccgcctgtacttcaattaccgtgaccaccggaagatcactgttatcgatggttatgtggcctacgccggc

SEQ ID NO: 12120 - DNA, 4097 bp, Unknown
  gut microbiota DNA sequence
gtgttgaaagctgtttattataatcagtatatactgtttataaatgattgtccacctatttcatttgatttttcgggcttaaccaaatatgcaataatttcgctgcctatcgcatgtctatccattcaaatataatggttgacatggcatggaactttacagcttgaaccacgcttcattgcgtagaccccgctgctctgcggcgaaaaaggaatggttcgctccccctccttctccgtcaaacaaaatcctgtaatccgatccgcggactgctaacacattttctatatggccgtaaacatccagcgtaaaactggcagtgacatggcccagattgatctgcattttctgcatctcctctcatcgttaaccgactgcggcaagcaccatctgctgaatacggctcatgacgccaatgtagtaggaaagctctgaggccgttagctcagactcatctatgctttccagtgcctccatggtctctgtgtatggaaaacgcggtctctatcgtaagagaggatgaaaatttcgcaaataccgcagcagaggctttgcggtttggacataacgcgcgcattcaagacttccttggatgtgcgcggctccttttacgctgcaccagccactcgcgccatgcggttcagattgaaagcccgccttaaaataggttgatttttacctacaatttgcgtataataggtgctgcaaggaggtgttcccatgaccattgatacgaacacaatcgtttccgtgacagaggccaatcagaatttttcccgcgtgacgcgcatcgctgaaacgaatggacaggctgtgattttcaaaaataaccgccccaaatatatgttggttgatttggacaattcgcccttgatcgacatgacggatgacgagaagatcgactttgtggcggcaagaattttaaagaaatataagcccgcgtttatggagttggcaaaatgatcaaattctcaaaagagaaggtcttgctgcttcacaggctcatcgcggaggagactggcgggagcatcggcgtcaggtatgagactctgctggagtccgcgctggagaacgtcttttccggctttggcgggcaggaattctaccctactagggaggaaaagggcgctcggctgggctatgcgctcatctctaaccacgccttcgtggatggcaacaagcgcatcggtatgtatgtgatgctgacctttctggaggtcaacggtattcggttggactgcgccaacgacgaggttgtcgaggtcggtctggctgtcgcctccggcgcaatggactacgaggcgctgttggcgtgggtgcgggcgcaccgtgtctgacccagttttgacccagaacggaattggagtgggcagggccggacggaaacaacggaaaatccgccgaacgtgtgtaaagacccagcaagtggacatctactacaagttcatcggtcttatcaaccagaaggcagagggcggctacaagggggaagttgtcaaagtgaaaaggacagagataaagaaccagcctgcttaacggaaggggggtgtcggcagaaagccgacacccccccttttttaattcacgcgaacggcatacttcatgcgatttccatactgcgtcgacttgatcagtcccagcttctcaaatttcaagacaaagctgcggatcgtcgcgtaggcggcgtccccaaagtccttttccaactgcttggtggaaaactctgcgtcgccgtaggtcatatattatctttgatagcttcgttcagcacaccatccgctgctgaggatcgggagcggcaagctcaggcgatggcactgcctgaaacaaccgcagagaaataaagcagcaatgcccggagcgaggcaactcattccgggcatcttgaaatttttatgaataagtctcggaaaaaccgcaaacaatattgtcaagtaaaaatgaaatttacttgacattgcgcgtgctgcggcataagatataaacatcatcgggacaggaggtggagcgagtgaccggtgcgcaaatcatcacgcagacaatggagcagttcccggaaagtgaattgatctttgccagtaagctatataccgagcaacttagcgaagcggtcagcgaggaggcgtattatcagacgcttggtcggatgtgcaaagcaggttcactttgcagaatagcaaagggaacgtattatcggcctaaaacaagtaaatatggtattgttccgccgtcccaaaaggagatcgttgcggccttcacagaaccggacaaaggtactgttgtcggatattccttgtataacagtttgaaactcaccacgcaggttgctaaaactgttgaggttttctcttccgagatcgagcaacgcaccaagaacatcagtaatgttcttctgcagttctgcaatttggtgtatacaccggaagtgaagggtatgatccatatgcttgaagtgctgcaaaatttcggtgaaattcaggacttgaactatcatcaattcattacgttctgcgaaaagtttgcgcaagaatacgatggcaaagtttttgaacaagttctccagaaaatgcggtaccagaaaaaaacgatttctttcctgcggaatattttgaatcattatggtgtggagaacaacctgaataaatacctctccaccctatccgaatataagcatcccactatggaggagatttatgaaactgcatacgcatcctgaagaatttcgtgaattgatcaccgttgttgccaatgaaaaacacatttccgagtctgccgtcgagcgcgactattatatcgtcatgatgctgaaatcgctggccgacagtccttatgcagaccagtgcgtttttaagggcggcacctctctcagcaagtgctacccaggttccattgaccgtttttccgaggacatcgaccttaccttcctgggaatggaactgtcggataaagcctgcgacaaaacgatcaagaaaatcgaaacgatcatggcggctggcgcacaaacggagaagatcgtggaggaacgctccaaccgcagcaagagtatgtatgtttggttcggtaatcctgaaaaccgtgtgaagcttgaaattggaagtactgtccgtccagacccgtatcagaaaatgccggtgaaaacctgcattcaggagtttctggaaagccgtgggtttaccgatgatatcgaacggtttgaactggaaactgtggaaatcaacacgctgaatattgagcgaaccttcatcgacaaaatcatgtccgtaaagcgccacgccatctgcggcacattgaaccgtaaggtgcgccatatctatgatgtgacccgtctgtaccagatgccggagatccaggcattcctggccgaaacagacgaacttaaacggttggtgcggttgacgaaggatacggattcttactatatcggaaaacgcaatatttctgccgaatatgatcccaccggcgcttatgactttgatgggtggcagaaatattttgacgctgatatccgaataacctacgagactctgcacaccacgctgctctatacagacgaaaaacaggactttgatgttgcggtaaacacttttaagcaaatcaacgggagactaacggaaatcggggaataacatcatccatccttaccaacaaccagcggtcgcaggttcgagtcctgtctccgcaaccagaaaagtcctgaaatcagtagatttcagggctttttccgcacttttacgtccactaacttgcttgccgttttttctgacccaaacgctgaccccaacgggagcggatagcggaaaggtctataccgtacgggataggatattgcccattgtttttgctgcttcacgcttggccgaggtcgtggcgtgggtgtaagtccagatgtatatcggtaagatggacagcacacaatgaagtatgggataatcgcaggcagcgcctcttttaatgtctttatttattgacaattatagatgtatcgtctataataacaagcacaaagatgatgtagaggtgatgtgcagaatgggacgaaagagtgttgctgtgctgccgcagacgcaggcgattttagaacagctgggagaacagat

SEQ ID NO: 12121 - DNA, 418 bp, Unknown
  gut microbiota DNA sequence
caatatcccggagctgatccggcgggttctgttctttgtggaatgaaacgagcttacatatcaaaacatctgcctccacagcggggaaaagaaaaaaaccgctgacgggcagaggatttcgtgcgctttcctgtatcactgacgatacggcggttttgagtagatcaaggccgccgtttctgtttgcttcgacgacccctgcaccgtgttctggcatggcggctttaggagggagccgctatgcaacgaaaactacttcgacaaaatccgacaggggttagcctgtcaaaaaaagccgtcccccggcagcggggacaagcggctatgagtatgtactataccatgtaggaaaagaacatattgctttttgtttcgccctgtgggtctttgacctgccgggcgaattttgttatttcct

SEQ ID NO: 12122 - DNA, 1472 bp, Unknown
  gut microbiota DNA sequence
attagcctgtcaaaaaaagctgtcccccggcagcggggacaagcggctgtgcgtatgtactataccatgtagggaaagaacatattgctttttgtttcgccctgtgggtctttgacctgccgggcgaattttgttgtttcctgcggcctgctatccggcgcaaaaagaaatttcaaaaaagtgaaaaaaggaggcgtttagcgggcagccagagagattccattcgctctattggcggaaagggagagaaccaccacatcccccatagaaagggggtgagaagatggaagcgatcccccgcaaatacggtgaatggagccagtttgaccgctattgcaagctggttctgtaccatgaggcgatagattatctgcgggaaatgaagtgccgccgcgaccgtgaagtgtcgctggacgctgtttccccggctgattgggacaagctctcgaccgtagatcggtattcctgcgacagctttacattcagttcgcatggctatgacctacatatcgacaacgagcttgtggccgaagcgtttgccagcctgccaaaagacgagcagagtattttgattctccgctttgttctggatttgactgacgaagaaatcggccgcctgatgggaatgtcccgcagcgcagtacagcgccacaggacaagcaccctgaaagacttgcgtataaaattgatggcgttcatgccggagggaggttaaacgcggatgaagcaatccagttacaagggcaaaagccctctgcctgattttgtgatcgacgcggcctgcgccggtaacgccgaagccgtggagcgtgtcttgcagcattacgacggctatatcaataagctgtgtacccggacgctctatgacggcagcggccagcctcatatctgcattgacgagtatatgaagcgccgattgcaaatcaagctgatccattccatcgttagtcccattggcgactgacggttaaggcctcggccatagacaggcggctttccctttccccgcctgcctgttttcccggcggcccctttgctccttgacaaatacgcccgcaggacaatggcggcgcgtcatagggcagacggatacattctgtctgtgccgagccgggcggcaggtgcgccaagaggctttccctcattggggtaagcggagcgattttaccgtgccgtaaagcaggtgtggcagcctgcgggcgacgacgcgcagataggacaatgatactcccttgccgtcgtagtccgagcgtttgaagcgtcgcaggcaacgagcagggccgcgtgagaaccacgcgggggtgagattcccgtggagctgtgccagcagccgtccgttcttttctgctcactttcgcaaaaaacaacctttgttttgaaaagaaagggggccatgttatgagtaataacgatgtgcctatttgggaaaaatacacgcttaccattgaggaagcgtccaaatattttcggat

SEQ ID NO: 12123 - DNA, 7020 bp, Unknown
  gut microbiota DNA sequence
gattccgtctgtaacattgttaagacactaaaacaagaaacgacacatcatctttggcaaagattcggtcctttcctggccaaacactattggaagaaaaggatattctggtccgatgggatactttgcctgtagtatcggggaagtatcctcggcaattatccaaaagtatatcgaaaaccaaggatgatgcgcctttacgaacagggctcctcccaccgcctaaaggcattgggtttccgcccaaactatgttggaggtattttttatgaaaaatcactggcagagcgtttttacaggtactactgcaagctcaaccgcctgccgtcacggatcgatccggagaccccgctcgcagccaacggctgagcagttctcccctgtcgggcaaacgcggtttttgagaatgtgggcacggccaagctgcagtaagccggagcctccggtctcctttgggtttttgcgcccctgacatatagggcgcggaaacgcagtgcggaccccaaaatggaatcaggcaaaaaagtaacgaccttcaaccgttgtctcccagttgaaggccgttactcatgcatcttgggttcaatcattgacgtaacctcacattcttcagttttcggaaagctttggtttttcgcttgctagggtactcttagtgatacattggactcaccctttcctgattcttattatacgcaaatccgccggaatatcaattcgcagggatgttaaaatttgcagaaaaactttgactgttctgtgaattgattcgcgcctttgcctatgctatcatatttaattgggggcaatgatgccgctccgttaaaaacagatgcacgccttgagctatccacgcacaagggcaatatcaacaaccgcttagagcaatgctaaatcagggggtgcgatttactacaaatcgtacccccttaaatattacttatcataataaaggccgccaaagatccacaaggtaatttcaagcgtgtattcaaaggctatctctaaaaaggacccggggtactgtgccgctatcggcatggtactccgggtttgcttagggtgtaactccattcggtatgcttgtccccacaggtaatcttgaccgggcattcaggtgatggttttccgcccacggaaccgctgaagggtctccggcagattctcctgatggagcagggcagggttgaagcgcagcagagcaaagttcagattgaacagggagccgacgcccactgcggcaacgatggtaccgatgcccacctgaccgcccagccgccagccgatgaatacaatgaccacttccacggcggcgcggcaaaggcctaccgtccggtgcgtcttacgggccagtacgaccatgagcgcatcgcgaggaccggagcccagggtgcttttcatatacatccaggtgcccagagccagcagctccatgccgatcagcagcgcggccaatccggtcgagaagcgctcaaacaaagggacccagttcaggtacaacaggatgtcgatgaatatcgggcagacgaaaatgtttgccagtgtaccgaggccgaagctttccccgcaaaaataggcaatggcaatgaccgctgctccgacaatgcttgcggcggtgccgtaagtaatgccgaaggtcttagacatgccttgctggagaacactccaaggctccaagccgatattggcctgaagcatcagcgtgataccgatggcgctgaccagcagaccgcccaaaagcaatccgatcctgcggagatattcctgaaacatggtttgcctccttctgcgggtcgagcccttgatatgagatgattggcacagatatgggaattcggcagcttgcggcccgtaaggctggaattcagatctgcccgctgtccgaattcttgatttgagtgatgtagcggtatacgctggccggagagcagtggagactggcggcggcacttttgactgcgcctttcagcagaaagagcccgccggcttccagggctgcgatgacttgcagccgtttctccggcgtcagctgctccggcgtgacccccatccgttccagctcccgattgatggcgtccaaagccaccgcatctgcggagttgcggaatttttccggggaggatcgggcggatacaccatcttcgttctccggcagcggctgcgccagcacatcggtcacaaacagatccggatggcacagactcaggatgcggtcacagacatcccgatagcggctgtcgtcaaagttgatgcacagcaggccgatgagctcgccactgtccttgatgaaaaaggtgctggatcggaggtcttttccgttgacgttgatgctgtaatagtggagatgatagtccatacgctcatagctcttgtcccggagaatactcagggacatattggtcagaggcgcaccgagctttctgccgctgatgtgactgttggcgatggcgatgatctgttttctctgtgatacagaggtcttgcgggtagagacctctgtatcaaaagggctcgattcagttgccacccatagcgtagaccatgtcccaaaagcgcaaatcaaacaggcagcacttttcaaagatctcgcagaggtgctctgctgttttttcgtcgatgaatccgctgagtgcgtcaattcggtcaatgagcatctgattggttcgccggtagctttctgaaacgtagcccgcgaaccacgagccgtaacgcttgtcccgcagcgcatccgggcagcgttcgactatcttttccgccacatacgcatagctccaggagcagttcagaagcgtcaccagtccagtcagcacatccccggtctgcgcctcccaaagcatgtaatgggtataggcgttgttgtccatgtgaggacgggtgctgtggatctcctcctccgtaatgccaaggcgcttcatatacggaatgtgggtgcggaaggtctctccgatggtgtccgccagctctccgctcaaaaagcggatctgctcaaaatcgtcagccttctggatgatcgccgcaaagatcttcacataatccttgaggtataaatagtcctgaagcatataataccggaacttttccggcggcagcgtaccatctgccatctgcgtcacaaacgggtggcaaagataccggggccagattttttccgcccgggcatagagtgtttgtgagagcttcacgccgtcctcctcttttatttatgggcgatgatcgccacatagccgccgctctgatagccggggaccacatcctccgcgtcctcgttggtgtacatggggttcttcagcagtgtctgatagaagtcaaaatcgtggaagcccagcgccttgagcacgttgatcttctcctccgtggaatgccacacgcctgcgcagcacaactcgtggggatacggcagcttgggcataacgccgttgaggaacggatggtcaaaggtgcctacctcttttgccagcagatacatgaagccaaatgcgctctctttggggacgtccagagaaatgaacgtaccgttcggcttaagtgccttcttgcagacatcaaacgcccgggtcaggtcctccatatagctggaactgccgttgaggtagatcatgtcataggcgttctcctccagctcgacatcctcgatcgcgccgaaggccaccacgttcacgccgcgcttctctgcgatggcacccatgtcgcgggagggctcaatgccttcgataccgctgcaatcgatcatgctctcgaacaggccgctgccgcagcccacggaaagcacgcgcttcccctgaatatcaccgagcaccttctggaacaggcggagttcactctgaaacaggttctcattctccatgaaccaggcatcgtactgtgccgcataaccgtcaaatttaggtttcattgtcaaagagtcctttctgattttagaatttcaaatttacggggttctttaccgttgtctttggttcattttcccttgaaaagctgggtgtttacctcgttggattcctaaacaccgcattcgatacggggtaacataaggctaaagccctacctcttgcatttaaatgaaccttttgttaagtgtatcacaagcagtccctctccgcaacgccattcttgcagtccgcagcggatcgttgcctcaattttcccgtaatcgttttacgattcagctaagacggcaagcagcccctctccctgctgtctgagtgtagattctgacagatttttcagaaaacatccgctaaaaatcggcgtccttttcacaagactctttgcttttccgcaccggcatggtatgatagccacagtaccttgcccccgacacaggccggggcatgctccgccagcggcggagcactgtttcccggcggggggaatcacgaaagggagtatcgtatggagtacagcagcatttttgtctgtctcatgggtatgggcacggtgttcttcgggctgatctgcctgatcgcgttgacctatctcatgagcgccgtggtgggccgcgggaaaaaggccgccccggcaccggtcccggctgcgccccagaccgccggtgaggtaacaccggagctggtagccgccgtatccgccgcgctggcggaggagctgggcaccgacatcaccggcatccgcatcgtttccatgaaaaaagtgtaaggagagggagaaacacacatgaaaaagtacagagtcaccgtcaacgggacggtttatgaagtcgaactggaagatctgaccggctccgcccccgtttccgccccggcggctcccgccgctgcccccgcgcctgttgcttctgccgcaccggctgccggtgagcagatctgcgcccccatgcccggcaacattctggccgtcaatgtcaccgccggtcaggccgtgaaaaagggcgacgtgctgatggttctggaggccatgaagatggaaaacgagatcatgtgcccccgggacggcgtggtggcctccgtcaacacctccaaaggcgcttccgtggagtccggcacgctgctgtgcgtcctccagtaaggcagggccgatatggacgcgatcattcgctttttacaggacaccggcttctacctcttttcccaggacggcaactggcgctgcctcatcatgctgggcatcgcctgcgtgctgctgtatctgggcatcgtaaagaagtttgagccgctgctgctggtgcctatcgccttcggtatgctcatcaccaacctccccggcgcgaatatgttccacgagatcttcttcgccgggggtcacatccactgggacctcatcggtggacagcccgtcacagcgtcgctgctggcggatctccacagtcagggcgtggcagaaaacgtgctggccccctacatccagcagttgatgaccgccgcccagaccaccttctccccggagatggtggagcaggccatcgccgctgtcacggaggaggccggagccgccattaccgctctggaagcacagcttcaggcgttggtgcaggcggagcaggccgctgcctactacggcatgaccctctctgacatcaccatcactccgggtctggtggacatcctttacttaggcgtcaagctgggcatctatccctgcctgatcttcatgggcgtgggcgctatgacggacttcggccccctcatcgccaaccccaaatccctgctgctgggtgcggccgcccagctgggcatcttcatcaccttcgtgggctgccgcttcatgggcttcaccggctcggaatccagcgccatcggcatcatcggcggcgcggacggccccaccgccattttcgtcaccgttttgctggctccggccctgttaggccccatcgccgtggcggcatattcctacatggccctggtccccgtgatccagcctcccatcatgaagctgctgaccacggagaaggagcgccagatcgtcatgaagcccctccgggaggtcagcaagaaggagaagatcatcttccccatcgtagtgaccatcttcgtggcgctgctggttccctctgccgcccccctcattgcctgcctcatgctgggcaacctctttaaggagtgcggcgtcacggagcggctgagcaagaccgtgcagaacgagctcatcaacatcgtgaccatcttccttggcgtcagcgtgggtgcaacggccaccggcaccaccttcctgtccctccagaccatcaagatcatgctcatgggcgtggtggccttcagcttcggcaccgccggcggcgtcctgctggccaagttcatgaacctgttcctcaaggagaagatcaatccccttatcggctccgccggtgtgtccgccgtgcctatggcggcccgcgtgtcccagatggtgggccagaagtacaaccccggcaacttcctgctgatgcacgccatgggccccaacgtggcgggcgtcatcggctccgccatcgccgcgggcgtgctgatctccctgtacggctgataggaggcagatgtcaataacccccaccaaatctaacgatttggagggggtttgcgagaaatcgtaagccctgattgactaccctaagtgtttcgagcactacgttactcaagaatgtaagaataggcaccggcgggcgtgaatccgaacctgccgcactgcggtgtgtaattaaaagctctgagggtaaggagcggtgttgcacacgaaaaccttgagataacattgggtacggatacctgatggccgaaaggccgcgtggctttttcgttagccacaatcaaagaagaaggaggaaggcatcatgccaaacaaagtgtatgtcatcaacaagcacgggcgtccgctgatgccctgctccccggcaaaagcccgtcatctgctggatgccgggaaagccaaagtgaagaaacgggcgccgtttactattcagttggtctacggcagttccggctatacccaagaggtcatcctcggtgtagatgccggaagcaagaccattggaatgtcggcatctactacaaaagaggagctgctctccgcagaagtaaaacctcgaaa

SEQ ID NO: 12124 - DNA, 1090 bp, Unknown
  gut microbiota DNA sequence
gaggacgccctttaccatccagctggtctacggaagcagcggctatacccaagaagttattctgggtgtggatgccggaagtaagaccattggaatgtcggcatctactacaaaagaggagctgctctccgcagaagtaaaacctcgaaatgacgtggtggatttgctatccacccgtcgagagttccgcagagcccggagaaaccgcaagacccggtatcgtaagccgcgcttcgataaccgagtccgcagcaagcacaagggatggttggcgccttctgtggaggtcaaaatccaagagcacatcacctcaatcaagagggtttgccgcatcctgcccgtgagcaaagtggtcatagagaccgccgagttcgacctgcagctgctgaaagccatcgaggaaggcaaacctgtcccgcagggcgaggactaccagcagggtgagatgtacggtcactacaatgtacggcaatacgtgctttggagagacgggtacacctgtcagtgttgcggagcacacgcaaccaagaaaaaagaggtccggctccatgtccatcatctggagagcaggaaggtagacggcgacgccccggacaaccaagttaccctttgcgagagctgtcacgagaaactccacaaggggttgattgcggagaaggacttcaaaaagcgcaagcggaagtcaaccagagatgccacattcatgggcatcatgcggaagactttaatgcagaggctctgctctgagttacctatcccagtcattgagaccagaggctacatcacaaaggcaacccgagagaagctgttggtgcttcccaagagccacaccaatgacgctctggcaatcgcacaggggaagcagggcttcaatgttggctacctaccgggaatcgtacaaattaataagatttatacgattcgccccgtaaggcaccacaaccgccagctgcacaaggcgactatcctcaagggaggcatccgtaaatccaatcaaacagaaaagtacgtatttgggtattgtctttttgacaaagtccaatttaacggacaggactgcttcatttggggaagaagaactaccggaatc

SEQ ID NO: 12125 - DNA, 3706 bp, Unknown
  gut microbiota DNA sequence
tcgttccacacgggatgccacattcatgggcatcatgcggaagactttaatgcagaggctctgctctgagttgcctatccccgttgtcaaaacgagaggctatatcacaaaggcaacccgagagaagttgcttgtgcttccaaagagccacactaatgatgctctggcaatcgcgcaggggaagcgcggcttcaacgttggatacctcccggaaattgcgcaaatcgataagatttacacgattcgtccggtgagacaccacaaccgacagctacacaaagcgactatcctcaagggaggcatccgtaaatctaatcaaacagaaaagtacgtatttgggtatcgtctttttgacaaagtccaatttaacggacaggactgcttcatttggggaagaagaactaccggaatctttaccattaaaacgataaacgggaaaatgataaaggacggtatctctttcaaaaaattaaaactcgtagaaaaatccacgagttatttaattgcttaattttaatacacgaaaggagggaacggcaattcctcaccgcccaatgcttcacattggacggtgtacccttgccgcaacaatggaatttttatcgaacaagcccctgctcattacggataccatcctccgggacgcccaccagtctcaggcggccacccgcatgaccacggaggatatgctccccgcgctggaaatgctggactccatcggctactactctctggagtgctggggcggcgccaccttcgacgcctgtatgcgtttcctgaacgaggatccgtgggagcggctgcggaccatccgccagcacgtgaagcacacgaagctgcaaatgctgttccggggccagaacattctgggctacaagcactatgccgacgacgtggtggacgccttctgccgcaagtccattgaaaacggcatcgacatcatccgcattttcgacgcgctgaatgacgtgcggaatctggaacaggccatcaagtccacccggaagtacggcggcgaggtggaggccaccatgagctacaccgtctcccccattcacaacgaggactacttcgtgaagctggccaagacgctggaggacatgggtgccagcgccatctgcgtcaaggacatggccaacctcctgctgcccatggacgcctattccctcatcaagcggctgaaagagacggtctccatccccatccacctccacacccacaacaccacaggcaccggcgacatggtgaacctcatggcggccatggccggcgtggacatcgtggacaccgccctctccccccttgccaacggcacctcccagcccgccacggagtctctggtggccacgctgcggggcaccgtccgggacaccgggctggatcagtccaagctcagcgaggcggcggcccacttccgcaaggtggcggcccgtctgcaaaacgaggggatcctggaccccaaggtgctgcgggtggacaccaacaccctgctctatcaggtccccggcggcatgctgtccaacctgatctcccagctcaaacaggctgggaaggaggacaagtactatgacgtgctggcggagatcccccgcgtccgcaaggatttcggctatcccccgctggtgactcccaccagccagatcgtaggcacccaggcggtgatgaacgtcatcgtgggcaagtacaagaccttccccaaggagtccaagggactgctgcggggtgagtacggcgcgctgcccggcgaggtgaacccggaggtccgggcgctggcgggcatcgacccggaggcggtcatcacctgccgtccggcggacaacatcgccccggagctggaaacctacaaagagcagttcaaggacatcgccaagtctgaggaggacgtgctgtctctggccctgttcccccaggtggcccccaagttcttagcctggcgggacggtcctcacgaggccccggcccagccagccgaagcacccaaggcccctcccgccggccccaacgccgtccgggagctgttcgtggagtacaaattttaatctttccccaccgtcccgggccttttaaaaaggtccgggacgttttttccggcgctccgaaatgcggagggacggtttgtttttcatagaaaaacgctctgccccgcaactgttttttatccgggtgcatcagcgcttcttatagtaaatatttgattttcattcttttcttgtaaaaaaaaccattctataataacccggtcaaaaaaagcaatcgtatgccgtgcggagcttccgcacgtaatttgggaggcaattcaaatggcaaactgcgcaatcgtagggatcaactggggcgacgaaggcaagggccgcatggtggattatctcaccaaccactttgacgtggtggtgcggtatcagggcggcggcaacgccggacataccgtggtgaatgacaggggcaccttcgccctccacctgctgccctccggcattttccgggaaggtgtggtgaacattctgggcaacggcgtggcgctggactgcgaaaacctgctggcggagatgaacaccctccgggccgccggggtgtccattaccccggagaatctgaagatcagcgaccgggcctccctcctgctgccctggcaccgggagctggacggtctggaggaagcccggctggccgacaagaagtacggctccaccaagcagggcatcgcccccttctattccgacaagtaccagaaaaagacggtgatggccggagagctgctccatccccagcatctgaaggagcatctggcagatctgctggaatggaagaatctgaccctccagaaggtctacggtgccaagggctacacgctggacgagctgctggcttgggtagacaagtactgtgaagcagttaagccttacatttcaaataccaccgcgttcctgcgggacgcccagaaagcggggaaatccatcctctttgaagcccagctgggcgcactccgggatctggattacggcatctacccctacaccacctcctccaacgctgtggcggcctatgcgccggtgggttccggtctgcccaccgccaagctggacgaggtggtcggcgtggtaaaggcctattcctcctgcgtgggcgaaggcccctttgtgtgcgaatggttcggggaggatgcgcagaagctccgggacgccggcgcggagtacggtgccaagaccggacggccccgccgggtaggccctattgatctggtggccacccgctacggcgtggaggtccagggcgccaccaatatcgccctcaccaagctggatattctcagctatatggacaagatccccgtctgcgcccactatgagctggacggccagcagaccgacgaattccccttccccgtctgccttcaggacgccaagcccgtcatcgagtacgtggacggctggaagtgcgacatctccaaggtccgcagctgggacgagctgccggaaaacgcccggaactacgtggagtatgtggagcgggccatcggctgtcacatcggctatgtgtccgtgggcgcggagcgggacagcctcatcatccgctgacccatcaaatctggacagaacgtcccgcttcctgtaaactattggaaaaacgctggaaggagcctttatgagcaaggatatttacgaatcccccctgtcctcccgctacgcctccccctatatgctgcacc

SEQ ID NO: 12126 - DNA, 6303 bp, Unknown
  gut microbiota DNA sequence
tctcacagagcgcaagatcacgaaaatcgcacgggaggccagcaagctggccgtccggacgctgaaggaggacggcatcggcacagcggaatacgatttcatccatctggtgcgccaccatcccggcatcacgcaggcggaggtccgggagcagctccgggtagacaagggagccgccgcccgccgtgcggccagtctggaggccaagggctatctgatccggcaggccaaccccaaggacggccgcagccagcttcttttcgccacggaaaaggcggagggcctgcggaactccaaggcgcaggtggagaccaccttttatgaatggctgttggcggagctgccggaggcggagaaggtcgctttctgcaaaacgctggacactatctatcgccgttccaagcaggagagccgggcgggtttcccccacatcacggccctgacggagcagggagagggggagcgccatgagtaagcgacagcttccgccggaccgggtcagctcctatttccgggcagaatccggggtgctggcggtcatcaccgtgacgggtctcctctataatataggtctggtggcaggcccgtggttcgagggacagatgacggaaacgctggcccggatcctcttgggagagaacagcttttccgtcatggtctctctggcggcggggtacatcgccgtcatcgccgcggtgcagggacttcggtttttgaagcggttctatgtccggcgctttgccaacaaggtaaaccgccgtatgaagcgggtcctgtacggcgcgctggtccggtcggatcggggggacttggagcgtcagggcgcgggaacggtgctgaccaaggccatttccgacgtggacgactgcgccgaggggatgcggaaattcaccacggaggtatttgacaccggcgtggccttggcagcctatgccgggatgctgctgtggtatgactggcggctggcgctgctgtccatggcctttttgccggggagctacgcgttggcggaacggatgaagcggcccgtccagcgcaccggcgcggccttcaaggagcaggccggggtcttgaacgccgccaccatggatcgggcggtcaacgccctgacctaccgggtctttggccgggaggaggaacgccgggcggcctatgaggagcacctcaccgcttacgaacacgccgctgtaaaggcaaacctgtggacagcgtccctgccgccgctgtaccgggtgctctccatgatcggcgcggcgctgatcctgtatttcggcgggaaaaacgtgctgggcaccggctggacggtctggtccatcgcgaaattcaccacgtttctggcctgctttaccaagctggccaccaaatcttccaaggcggcgaagctgttcaacgcagtccacaaggcgcaggtgtcctggaagcggatccagcccctgatgcgggagatccccgccgtgcctgccgtttccgccggcagggtggagcgtttggagatccgggacctcacctgcggctatcccggtgacgcgccgctgttctccgggctggatctgaccgcctgccgggggcagatcatcggcgtcaccgggccggtggcctgcggcaaatccacgctgggcaaggcgttcctctgcgagcagccctacggcggcagcatccggctggacggccgagagctggcggagctgtccccctgggagctgacgggcctcgtggggtatctgggccacgatccggagctgttcagcggcacgatcctggaaaatgtgctgctgggagacacgggcgatcccatggattacctccgggctgtgtgtctggacggcgaagtggcggccatgacggaggggctggagacccgggtgggcaccggcggcgtccggctttccggcggtcaggcccagcggctggcgctggcccggacgctggcccatcaaaggcctctgctgattctggacgatcccttttcggcgctggaccgggccacggagacggagatcttcgcccatctgcggcgtttggcggcggacagtgtggtgattctgatctctcaccggctgtacctgttcccggaactggatcgggtgatctggctggaaaacggggaggccaaggtggggacccacgaggaattggtggggaataccccggattacgcggcgcagtttgacgcgcagagggaggagaacagccatgaatgaccgcaaaaaagcagtccatgtggggactgtggtactggaaacggtgaaaggccacctctggctgtcccttaccattctggcggtggtggcaggggccgtaggcgcggcgctggtgccgccgctggtgctgggccgcattgtggacggcctcaccgccggggagaggctgaccctccgcctgcccctgtggtatctggccttcaccgcattggcgggagggctggaatccgcccgggagagcgcgttgacggtattcggccagaaaaccacccacgccctgcggagccgtctgatggaaaaggagggccgcctgcccgccgacgaactgaaccgtcaggagccgggggcgctggtgtcccgcttcgtgggggatgtggacacggtggagaccctgttcaccgccgggatcatcagtatggcagcggacgcctgccggatcctcagtattctggtggtggtgtggcagtgcagccgggggcttgcctatcttctgctggcgctgctgccggtgctgttcctctttacccggttcgtccagaagcggatgctgcacaatcagctgaaaaaccggaaggcggtgagccgggcctccggatatgtgccggagacggtgcggaatctccgcaccatccggacgctgggcaaggagacctacatggagacccggtatgacggcgcactgggggagagctaccgggccattgagggcaccaacttctatgacgccctgtattcccccgtgatcctcacggtgaacgctgtggtggtgggcgttgtcatgctgttgtccgcctccggagacccggcggtgctgacgctgttcggcatgaccgccggtaccgccgtgacggtgatgaactacatcagccagatcttttccccgttggaaagtctgggcatggagatccagaccatccagtccgccgtggcgggcgttcgccggatcaatgactttctggcccagccggagcaggaggctgtggccccggaaacggaaaatcccgccgctcccatggtggagctgcgggatgtggacttcggctatgaggcagggcagaacgttctgcaccacttaaatatggagatccgggagggagagctggctaccctgtccggtcggaccggcgcgggaaagagcaccgtgttcaagctggtgctggggctgtatgccccccggcggggcaccgtccggatccagggcgtggacccccggtccctcaccggcccgcagcggcgggcactgtacggctatgtggagcagcggttccatccggtccccggcaccgtccgggaccagatcaccctgtatgatgacaccgtcacagagggacaggtccgccgggccgcggagctggcgggactggcggaggccatcggcgccctgccgcagggctatgacaccccctgcgccccggacattttctctcagggacagtggcagctgttgtccatcgcccgggcggtggcggcggaccccaagctgcttctgctggacgagatcacagccaatctggacgcggagacggagcgggcggtgctgcgggccttgaagagggctacggcggaccggacggtgctctccatttctcaccgggtcggggcgggcacgggacggctcattcccattggggaggagtcatagccagaaaccgggccagcgcggggttggggttggtggtctgccacgcggcgatgatctcctccacctctccctcgccgatgagggggacaaacaccagattgtcggcgttgtagagcttttccacgcagtaggcggggaggatggaaatgccttcctcggcggagaccatcatgaggatgctctccgtgtcggcggagcggaagaggatgttgggcttgtagcccgcctcgttgtaaagctgcatgaaaaaggcatcgccgtaggaatcgtcggcggcgtcaggggacatatagaggatggtctctccccgcagctcctgccgccggagctgctgccgctgggccagcgggtgtccggcgtacagtgccaccaccagccgggccttttccacggtgcggcaggacacgccctcctgggttttcaggttggtactgtcccaggtgaaaatgatgtcgtattcatggtgcagcagccccgccgccagcgcgtcggtggagcagcggtaaaaggtgatgagcacgttgctgttctgctggtgaaattggcggatatgggcggacaggtcgctgcgctcgtacccccggacgtaacccaccctcagtgtgccggagagtccggtggaggcgtcgtggacccgctcctgcgcccggctcatccgctccaagatccccttggcctcccggaggaagatggtccccgcggaggtcaggctcacgggccgggtgctccggtcaaagagaggacagcccagcgtctcctccagcagacggatctgctgggtgatggcggtctgggaaatgtagaactgctcggcagctttcgtgaagctgcggctctccgccgcggccacgaaatacttcagctgatttcgattcataacgccctcccacgacataaaataagtttttcttattttatcatgaaaaaatcccccttgtaaagggggatttttttcgctaagataagtgcatatttgttgtgtgtaagcgaggtacttagaaatgcaaagagaatccttcggctcccggctgggctttctgctggtgagcgcgggctgcgccatcggcatcggcaacgtgtggcgcttcccctatattaccggtaagaacggcggcggctacttcgtcctgttctatctggtgtgcctgctgctgctgggcgtccctgtgatgaccatggagctggcggtgggccgcggcggccgcaagagcgccgtgctggcctataagaatctggaaaagcccggctccaagtggcacatccacggctggttctgtctggcgggctgctatctgctgatgatgtattacaccaccgtcaccggctggatggtgagctatttcggcaaattcctcaccggcggcttccacgccggtatgaccggcgacgagatctccgggatgttcggcaccatgctgggcagccccggctccatggccgtcttcacggagctggtggtggtcaccggcctgatcgtgtgcagcttcggccttcagaagggtctggagcgggtgaccaaggtcatgatgatctgcctgctggcactgatcgtggtgctggcggtccacagcctgaccctctccggcgcggcggagggcatgaagttctacctactgccctccgtggacaccatccgggagcacggtctcggcagcctcatcaccgacgcgatgaatcaggcgttcttcaccctgtctctgggcatcggcgccatggagatcttcggcagttacatgagcgacgagcagaccctccccggcgaggctgtccgcatctgcattctggataccttcgtggccctcatggcgggcgccatcattttccctgcttgcttcaccttcggtgttgcgcccggtgaaggtcccgcgctgatctttcagaccctgccgcctctgttcgtgaacatgtccggcggccgcttctggggcacgctgttcttcctgttcatggtgttcgccagcttctccacggtgctggcggtgtttgagaacattctggccgtctgcatggacaccttcggcatcagccgcaagaaggctgtgctcatcaacggcgtgctgctggccctcctgagcctgccctgcgtgttcggctacaacatctggagcgatttccatcccattctgggcaaggacgtgctggacagcgaggacttcctcgtgagcggcctgctgctgcccatcggctctctggtgtatctgctgttctgcgtcagcaaatggggctggggcttcgacaagtatgtggcggaggccaacaagggcaagggcctgaaattcgccaagtggctgaagccctatttccagttcattctgccggcgctgatcgttgtgatcttcctacagggcctgctgtaaagcggaacagtgttacagcaatagagggggaaatttcccctgtacgggacattttcccatcagcctgcccagggaaaagaccggaaaaaacgaaaaatgtaag

SEQ ID NO: 12127 - DNA, 2521 bp, Unknown
  gut microbiota DNA sequence
ccagcgcttcctttaacacccggagggaggtcaggtggccctccagcatgggcatggtcaggtcctccatttccagagatacgtcgccgtcgtagcccgccatccgcacggtggagaaaaactccttccaccactgggcaccgtggccgcagcccacggccacgtaattccacgaacgcgtgcggaactggtcgatgggcttcgtgtccaaaaggccgtttggtccggccatccgccgctccgggcgggagtccttgccgtggacgtggtagagagcgccctgctcccccagcacccgggcggcctcgatggggtcgccgcccatccagaacaggtgggaggggtccagattcatgcccaccaaagggcccacggcttcccgcaggcggaacagggtctccgggttgtacaccagctgcatcccgtggttttccagcgcgatctgacggatgccgcagtcctccgccatacggaccagctccttccacttggggatggccacctcgttccactggtagtccagaatgtcctgggtctccggcggccaactggtggtgatccagacgggggtcttgtcgccgggacagccggcgggcaggccgctcatcatcacgatcttctccacgcccagcagcttcgccagacggaaggttttctccgtcacctcccagtccttctggaaggcgaggggattgccggagcagttcagggcgcacagggcgatatcccggcggcgaagctgggccatccagcgctgccgggccgtttcggagccgagcagttcgtccaagtcgatgtggggcgcgccggaccagttgccggtgccgatctccacggcctgaacgccctgcgccacgcagaaatccagcatggccgcaaagggcatatccaatgtgcaggttttgatagaaagccgcataggggacctccttggtcattgatctttttgggggccgctgcggggcggcgcatgaaaatcgtcttttttcgcggggagttgaggggcgctattccttggtgaaccacaggtccagatccacaggaccctcgatgccgtccacaacgccgctctcgctgtactgccagagggtcacgccccggtccagcgccgggacggggccgtagctggccagccagaccggcaggtgcgccagctcctccatgccgtacatacttccggcccagtggaggttcatgtagaccaccggctcatagcccgcctgacggatcacgtcgcagaaggcgatggcgttctgggtggcctgttcgccggtgagatcgtcggtccgggcctcgtccgccgtgtaaaattccagatcataggcgatggggccgctgacgttcgtcccccggagccgctccaccacgaatcgggcttcctcggcggcttcctcctccgtgacggcctgagagtagaagtaaacgcccaccgtcagccccgcattggcggcgtcggcggcgttctgggcgaaggcgttgtcctccaccaaagccccggtgccgtagccccggaagccaacccgcagcatggcgaagtccgccccggcggccttcacggcgggccagtccacgacaccttgatagctggaaacgtccactccggcccgggcggtgacgccgggggcgtcatattggtaaaacggctccctgcgggtcagggcttcctcgttgacggagatgcccggccccggcgcggtatgggcccgccattccagaataccccagatccccaggcccgccaataccagcaccgccagcagccagccacggcggttgggcgcggcccgcttgccgcctttctttttttcttccatatgtgttccccctcttttctgcccatagactaccaccggcggcgctgcctttggtgaacaaagtctgaatttgccgcaaaaaggggaggggacggctcaggtttcctgcgccagcatccgcagggcgaacagggtgtggagcgctgcgccggtggggagaacgtcctcgttgaacaccaccgcctcgttgtgcatgggcttgccgtagcgggggtcctcctgcggcgttccggcccccagcagcaggtaggcgcagggcagctcataggtgaaggaggcgaagtcctcggagcccatgcccccctgatccagacggtacacccgctccttgccagccagctcctccgcccagcccgcgacccggtccatcagggcgggatcgtttaccagcggcggcgcggaggcgatctcctccaccgtggcgctgccacggaaggccgccgctgtgttttccgcgatggcttggatgcgctccatgatccgggcggtgagttcccggtcaaaggtgcggatggtaccctccatcaccgcttcctccgggatgatgttgggggcctgtcccccctggaaccggcccaccgtcaccacggcaggctccttggcggagatctcccgggcagtcagcgcctgcaaggcaagatagatgtgggcggcgatgttgatgggatccacgccggtctccggcatggccccgtggcagccggtgc

SEQ ID NO: 12128 - DNA, 773 bp, Unknown
  gut microbiota DNA sequence
ggccaacgccgcttggggcgtcggcgcatccttcaggaccccggcttccagtatggacttggccccggtgaagccctcctcatccggctggaacaccagccgcaccgtacccttcaagtccgcctgatgccgcttgagtaaagcggcggcgcctaacagcatggcggcgtgcatatcgtggccgcaggcgtgcatggcgccgttttccgactgaaaatccagccccgtggcctcccggacccggagagcgtccatatccgcccggagcagcacgcaccggccggtgtcctcaccagtggtgtccgccaccacgcccccggccagcgggcggggcgtataccccagcgccatcagccgttccgtcacataggcggcagtgcggggcagggaggggcccacctccgggtccctgtgcagggtccggcgatccgtcagaagctggggcttcagggcttccgcctccgccagcagagctttggtatccatggtcatagcacgtcatccttcctttgaactgcgccgtttccggcagatttatgatagggttattataccgcagggcggggcgttgtcaaacaccgccggagaaaaaacagagctgcgcaagcaccttttctcattttttctgatagggcttcggtaagaaaagtgagtgcgaactgtcctgacagctgctggcggcgctggactgagcggcagaggcacttgccgcaaagggcagagcttgggcgtgcagatcagccagttctggtgatacaggccagccaagctgt

SEQ ID NO: 12129 - DNA, 23068 bp, Unknown
  gut microbiota DNA sequence
aagaatgagtttgaagtggatcgtgccgtaaatttccatcatcttttcctcctgttaaaataaaaaatgccggacatttctgtccggcctgcgtggatacttatttcattgtcatgccgctctgttccggcgcgtcccgctgccgcggagcatccgcaggcagcaatccgctgacctgttccatcagctccgccagctcccgatcccgtccgcacgaaagggtttcgtcctgttcgcggacgaacgccagcgcgcggtagatctccgcaagctgctccggttcaaaaagggcgcctttttgaacaagcccgctgcgtgtggcgaaatcccgcttggcggcatcatagtcatcctggaaataatgtccgtgatggacgccctcccggtcgaagtcccactcccaagtcacgaattggacaccgcgctcggtggggtggcccgccagcactgcgtcaccaaagtccgcgaggacgcggtagtcgccatccagtccgctggctttgagccgcggtgcggtttccagaatcgccatgtattccgaagtcattttgacggtgtcaatcaccgtctgcaaagcgtcctgtgccctgatattgtctacgttttcttgccggtacaatacgctgcccttgccggagatacggcagaggcgccctttttcaatgctgacgggcaggtggtgatcttcgattggttccaccgtgaagccgttctgccgcaactgattggcggtttcctcaaggaagcggagctgtgcgggttcgttttgatgattcattttggagtcctcctcgtaagcaaaaaaataagccggagcatcctgaaatgctccggccggatgatgaattaaggtgtgaaatgaaaaagggcgcctttttgatggcttcgacgaaaccaacaaacagacgcccgaaagatcgtataaaattttgagaaaagatcgttctattttgtgcccgcaaaaagggcacttctcaggtttttgcctttgaatctgtgaaagggggagttcaaatctctccggttaccaaaataacgcgaaaatatctttttttctgagtgcggaatttgaaataaaaaaaggcggcaaccctttggcattctaagcgttgcgcttaaaatatccaaattgttgccaccttatggcgcggaaggagggatttgaaccctcgcgccggttttatccagcctactcccttagcaggggagccccttcggcctcttgggtacttccgcaggtcgatggtgttttatgaaattggcggagagagtgggattcgaacccacggagacttgcgcctcgccggttttcaagaccggttccttaaaccactcggacatctctccatcggcagagaagttctccggctctcaaacgcttaattagtttaccatagattggggcggtttgtcaaccgaaaacggagaatctttttataaaaatttatcagatggaaaacgttcacaatttaaagatgacttttctgacaggaacggttataataatgccatctgtccggcggtttttgcctccggcacacctgaagaatgacaggaggacccattttgaagaaactgaaccaatggatcgaccggtttgcgtacagccatcctcgtttcggcataccgaacctgatgctctacattgttatcgccaacgcggtgacgtacattttgacgctgttcgccgggtcggcggccctgagctttttgaaatttgacctctaccatgtgctccatggcgaggtgtggcggttggtgacctttgtgctgctgccctttacctatcgccccatatcgctgtttatcatgctgtccttctgctacttcgtgggcgggacgctggaacgggagtggggcaccgccaagttcaccctgtactatctcggcggcatgctgttcagcgtactgtccacggtgatcctctcgctggccacggggtattacggctggagcctgtccgacgcctattacatcaacctgacgatgttcctggccttcgcagtgatgtatcccgacgcgcaggtctggttttatggggtgatccctctgaaggccaagtggctggcatgggcggacatcgctttgatggcgtggaacatcgctcggtccgtgcggtacggtgcctacgccagtgctctggccgctgtggtggcaattttgaactttgtgatcttcttctgggaggatatcaagagcattttggggatccagagccgtcagcggtccagacagactattcaattcaagtccgccgtccgccagcagaagaaggcggagtcggagcggggctaccgccacaagtgcgaggtctgcggccgcacggacgccgaccacccggaactggaattccgctactgctccaagtgtcagggctaccactgcttctgctcggatcatattttcaaccaccagcacttcacaaaataaagcacacccggcgtggatcatccgcgccgggtgtttttcacgcttaccgctccaaggcggcggcgtatagctcgtttttggaaaggccggtgtgttccgccacctccttggcggcgtccttcagccgcatcccctgttccttcagagcgaggacctgcgctacgccatcctccagcgtcaccacggcgccggttttgggagcggctccggccaccacaaggacgtattcgcccttgggggcgttctcctcgtaataggccacggcctcggccagagtgaaacgcaggacctcctcgtggagcttagtcagctcccggcacagggagatccggcggtccgggccgaaagcctccgtcaggtcgttcagtgtggtacggagcttgtgaggggcctcgtggaagatcatggtccgggtctcgtcctttaaggaattcaggtgttcccggcggctttttttgttgacagtgaggaacccttcaaaggtgaagcgcccggtgggcagaccgctgacagccaaggcgttgacggcggcgcagcagccgggaatggcccggacctctacgccgttttctgcgcacagccgcaccagatcctcgccgggatcggagatggcgggggtgccggcgtccgtcatcagagcgcaggattccccggccaacagccgattcagaacgttctgcccggcggtgatgtgattgtgttcgtgatagctgatcaaaggctttttcacgccgaaatgatttaaaagtttcatagacacacgggtgtcctccgcggcgatgaagtccgcgttttccagcgtttccaccgcccggggagtgaaatcccccagattgccgatgggcgtagctaccagatataaaatgcctgccatggtcagacctcctgatctcgaaagtaaatggcgttcagctcccaggtgggagcgccggtgtccgtttgaagaataaggggggattggatgtcaagtcccggtttgccgccccggcagccctctatcaaaaagagggagggggccgtgtccggccggttctggacgaagcgcagccgctttggttctatgcccgcctcccgcagggcgcagaccgtgtctgccagccgctccggcttgtggaccaggcagaattttccgccccaccgcagcagataggacgcggcggcgcagatgtctgccagacttgcctccgtttcggagcgggcggcgcggcgggcgctgtctgcggagacttttccgctggcgggcgggtagtagggcgggttgcagactaccagatcaaaagagccggtgggaaagtgctgccgcacctgccggaggtcgatgcaccggaacatgagccggtccgtcaggcggttttcggcggcggcccgctctgccagcgccacagccgccggttgaatgtcgatcccggtgacggtcagttccgactgcttttgcaggagcagcagccccagcaggccggtgccgcagcccaggtcgcagacccgcaggccgggggagagcttcggcagggaggacagcagaaaggagtccgtgccggggcggaacagcccgtcctcccagacgaaccgcagcccgtccggcttcaggtattcccaatgctccacgccgtcacctcccattgaacgcttctattattatataggggaaccgctttctccgcaagtcccggcggcaaacaaaaaaaccgtctcaggatcgggcctgagacggttttatgtatccctttaagaattattcctcggggacgatggcgccgttggggcaggtgtcgctgcaagaaccgcagtccaggcaagcggcagaatcgatcacgtactgatcgtcgccctggctgatagcgccggcggggcaaacgtctgcgcaggaaccgcagctgacgcaagcagaagtaatcttataagccatgtgtacacacctccattagaatgtgccttcattgtatcatacaatttctaaaaagcaagggcgttttgttaaattcttaccaaggaaaaagaaaactgtgaaaatgtcacaaaaaccggaaaaacattggaaaaagcagggcctttcggcggttagaggtattgaactgcatatgcgaactatgggggaaatgagcgttcacaaactgtttacacaaatggtcaaagaaagtcaaaaatagctattgacattggaaaagatcgtgctatactacaatcaaacaaaggttaaagatagtcaaagtcaaaagacggagacgagaaaggagatgtccccatggggatttcagatttgatcgccagctttttgcaggatagcttggatacggcggaggacggtgtgctggaggtccagcgcagcgagctggcccagcggttcaactgtgtacccagccagatcaactatgtgatgtccacccggttttcaccggagcggggctacatcgtagagagccggcgcggcggcaacggatatatccgcatcacccgggtgcaggtggaccggcagacgctgatgatgcacgtcatcaacagtctgggcagcagcgtggatctggcttcggccagagccatcctcagcaatctggtgcagtccggcgcgttggagcgggacatgggtcagacgatcctcaccgccgtgggcgataaggccctgagccgggtgccccgggagagccgggacgctgtccgggcggatatcctgcgacaggtgctgatccttcaggtttgaacgcctgaagaagggcacgcaacacagttaagaaaaaatttatatacagtttatggaggaatgcattatgaaatgtgagaattgcggaaagaatgaagtcagctttgtatatcgcagcagcatcaacggaagaacagaagaacaccatctctgccaggcctgcgcggaaaagctggggtatacccagaagctctttaaccggcggccgtccatgcgggacagcttctttggcaatgatgatttcttcggagatttcttcagccccatgccctccctgttgggtcggatgaaccggatgctggaaagccccttcgatgatttcttcgacgccatgcccgccatcggcgcagcgccggtgcaggaggtcaaggaggaaaagaaggatgacctcatgagccatgaggaacagagccggttctcctatctgcgtcagctgaatgcgttgaagctggagcagaagaaggctatccacgaggagaacttcgagcgggccgcccagctgcgggacgagatccacaagctggaggaggcccacaaggaggccaaggagtccggaaaggacagcaaggaaagcgcttaacaggcgcgttcaaacaaaacgcacaccccagaataaaagaggtattgaattatgaatgaaaataaatttactcccactgcggaggaagccctgcggctggcacaagaggccgcaggcgaattgggtcacggctatgtgggaacggaacacctgctgctgggcctgatgcgtgaggacgagggcatggcccacaccgtcctgacggaggcgggcctgaccgatgacctgctgacggaaatggttcggaaaagcgtcggcgccggtcttcccggcggcaatcccgctcagggtctgacccctcgcgccaagcacgttgtggagatcgccatggaggattccatccggggcggctatgcctacatcggcaccgagcatctgctggccggtatcctgcgggagggcaacaacatggcagtccgtattctgcggtccgccggcgtggacgcccgtcagctctataccgcactgatgaagaagctcaccgccgcgcccagagcggcccagagcggcgacagccgtactccggctaccggttccgccaaggaggacggcaagggcagcaagacgctggcagagttcacccgtgacttgacggcggatgcccggaccggcaagctggaccctgtcatcggccgtgatgacgagatccagcgggtcatccagatcctgtcccgccgcaccaagaacaacccctgcctgatcggtgagcccggcgtgggcaagactgccatcgccgagggtctggcccggaagatcgccatgggcgatgtgccggaaaacctgctggataagaagctcctgtctctggacctttccggcatggtggccggcaccaagtaccggggcgaatttgaggagcgtatcaagaaggtgatgcaggaggttcagaagaacggcaacatcatcctcttcatcgatgagctgcacaccatcgtgggcgcaggctccgccgagggcgcggtggacgccgccaatatcatcaagcccgcgctgggccgcggtgagatccagatcatcggtgccaccaccctgaacgaatatcgcaagtatatcgaaaaggacgccgctctggaacgccggttccagccggtgacggtgggcgagcccagtcaggatgctacgctggagatcctgaagggcctgcgggagaagtatgagcagcaccacaagctgcacatcaccgacgaggcattgaaggccgccgtggagctgtccacccggtatatcaatgaccggttcctgcccgacaaggccatcgacctgatggacgaggccgccagccgggtgcggatggagcaggaggaaccctccaaggaactcaagagcctggaggagaagatcaacgccctgtccaaggacaaggacgccgccatcaacgcccaggactttgagaaggccgcccagctgcgggacatcgagaaggactacaaggagcaggtggagatcgagcgtgacaagcgccgcaagaataatcaggagcaccgggacgtcaacgcggaggacatcgccgctgtggtgtctggttggaccggtatcccagtgacccgtctgacagaggacgagggccagcgcttgctgcacatggaggatatccttcataagcgtgtggtgggtcaggacgaggctgtgaaggccgtggcccgggccatccgccgtggccgtgtgggtctgaaggacccgaagcgtcccatcggcagcttcctgttcctgggtcccaccggcgtgggcaagacggaactgtgcaagtctctggcagaggccatgttcggtgacgagaacgccatgatccggatcgatatgtccgaatacatggagcggcatacagtatcccgcctcatcggttcccctcccggctatgtgggccatgatgagggcggtcagttgacggagaaggtgcgccgtaagccctactccgtggtgctgttcgatgaaatcgaaaaagcccacgaggacgtctggaacatcatgcttcagattttggacgatggccggatcaccgattctcagggccgcactgtggacttcaagaacaccgttatcgtcatgaccagcaacatcggcgccaaggcactgaccgctgccggcgccaagctgggctttgacgcggacgataagaaggccgaggcggatgccgacgcggcctatgcacaggccaaggagaccgttctggcggagctgcgccagaccttccgcccggagttcctgaaccggatcgacgatatcatcgtgttccgtgctctgactgagcagaacattgaggaggttgcccgccggatgctcaagaccgtggcggaccgtatggagaccatggacatccatctggacgcttccgacgaggcggtgaaggaactggccaaggagggcttcgaccccaagtacggtgcccgtcccctgcgccgggccatccagagcaaggtggaggacgctgtggccgagaagatgctggacggcaccctcaagaccggcgacaccgccaagctggctgtggaggacgacaagctggtcgtcaccaagtaactgtccttccaataaaatcaaggtccctctgccgcgttcggcggcagaggggccttttggctcaacgccggcgtgtggccttgatttgttcatactttttcggtataataaattcgtatcagctttgacaacttttggaaaggaaggcaaaccctatgccctttaccttcaatttcggcggcttcaaccccggagatttcggacaggggggcgagcgccctcagcgggagcgtaagccccggaagcccatcggcactcccgtgacccgcaccctcatcaacatcgccgtgacggcactggtggggctggtgtacttctatgtggagctgcccgccctgaacccccatgcggaggaattttacttctttgtgtttctgctgtgcgccgtgtactgcggctgcgctgtcctgacctccggattccagggcaccggtgcgagagggtatctcggctttgtgaaaaagcagtgcaccatacccttcttcgtggtgatcgccatgatcgcagccatcgccattggctccctttcctcttgggtggtgctacgggctggggcatacagcaagctgctgcccttgaccaccggtgacttcgtcacagaggtggaggagatccgctatgaccagatccccatgctggacagcgactccgccgcccgattgggcagccggaagctgggtgagctggcggatatggtgtctcagtttgagatcctgcccaactacacccagatcaactataagggccgccccgtgcgggtcacgagccttgcctacggagacctcatcaagtggttcaccaaccgctccaacggcctgcctgcctatatcgtcatcgacatggtgacccaggaggcggaggtggtccgactggacgagggcatgaagtacaccacggcggagcacttctcccggaacctctaccgccacctgcggttccagtatcccaccatgatgttcgacgagccggtgtttgagatcgacgaggagggcactccctactgggtctgctcccggatcgtcaagcgcatcgggcttttcggcggtacggacgtgaagggcgccgtgctggtgaacgccgtcagcggcgagagccagtattacgaggacgtgcccacctgggtggaccggctgtactcctccgacatcatcatggatcagtatgactactacggccagttccacaacggctttctgaacgcctacttcggccagcgggacgtgacgctgaccacggacggctggaactatatcgccatcaacgacgatgtgtatatgtacaccggcgtgacctccgttaccagcgaccagtccaacatcggctttatcctcaccaatcagcgcaccaaggagacccggttctacccctgcgccggcgcgacggagacctccgccaaaagctccgcccagagccaggtccagcagatgcgctattccgccaccttcccgctgttgctgaatatcgccgaccagcccacctacttcatggctttgaagggcgaggacggtctggtgaagatgtatgccatggtgaacgtccagcagtacaatattgtggagacggggcagaccgtggcccagtgtgaggaaaattaccggaaaacgctgctgaataacggcatcatcgaccgggccgacgcggaggtgcctgcgggggagcaggagctttgggagacaaagggcaccatcgccgagatccgcagcgccgtcattgaggggaccagcgtctattacctccgctttgagggggagagcggcttctccgtgtatgtcagcgccgcgcaggtgccggaggccccactgctgaacgtgggagatacgatcacggtctattggcacagcgggacccagtggatcaccgctcggaagatcgcagtggagaaccgggctgtgtccacaccgccggagacgccggctgaggagcctgcggagccggaaacggatctcctgccagacaccgggacggaggaaggctccggcggctggcagcagacggtcatttacggaaaagcatgacttttcaagggaaaccgatcaaaacgaagagaacccgcggcgggcaaaatgcccgccgcgggtttcttgtgggaactgtcaaaatccaaagggaaattttggctggcgcaaggaccgcttttcattgtaaacgttcacgcagtatggtatctttgtaacaacaacatagggggggggactgcgtatgctggctttggactttatcaacataggcaacggagactgtattctcattcgggagatggagggaacgcggcagaagtttgccttgatggtggattttggccatgactgtctgatacgggacgatcatccgggagaactggatcccaggtctcagcggatctatgcgggagattttctccgggaactgggcgtgacccatctggatgtggctctggctacgcatttccaccgggatcatatcggcggtctcagccgggtgctggatgccgtgaccatcgaccggttttacaccacctatctgcctccggaaaatgccccggagctggcccccttccatccggataacaacttgcccaaggctgcgagaaacgcccttctctgcctccagatctataccgaggcgctgcaaagtcaccccgaccgtatcaagcagtttgaattggtgccggggacggaaacgatttccctccagctgacgccggacctgaaaatggatatcctctgcggcgaaccggccctgtaccggcggcagaaggagatctatgacgcggccttcaacggagagcggaacggatatgaactggtgcgctgggccaaatccatgaacgtgtgctctttgcgccagcggctgtattaccacggcaaggagatcgttctgggcggcgacgcctacgcccatgtgtgggagaccgtgaatctgaccccctgtgacattctgaaggtgccccaccatgcctccttcgattccacctcccggaagctgctggaaaagctccagcccaaaacggcggtggtgacggtggcggcccggcggcctgatgaacggccccatccctatgtggtgtccctgttgcaggagtatgtcgagaatctgtattttaccgacgccgtggagatccccggtctggtggagcctcagtttcataagtccgttcacttagaggtggagtgaggaagctggttgaacacgaaaccgcgtttgtatcgaaaaagcaaaagcgccggagaaaactccggcatttgcagaaaaaggaaaaacacggagcctgaccattggccaggctccgtgttttatattggatggggtgagattacttgtacatctcgggcttttccatggtctccaccttcatgaactgagaggtgccgcgggaggcgttcagagcgtcgccagccacgcaggccacatagccgtcccaggaggaggggccggtgagcttgccggcgtggacagactccacccacttgcagaactcgatatcataggcctcaatgaagcgctccttccagtcggtcatgatgggcatggactcggcgggctggacgctgtcccaaccggcgggacgagagcggcggaccacagcgtagggatcgggcagcttcacggtgccgttctcgcagacgacctcgcactggatgtcatagccgtagccgtcagcaacctgaacttccacgtcgataaagcagccgttcttggtacgcatcagcatgacctgggggttgtcatagcccttgttggagttggagctctgacggaccttgacgcactgtacgtcctcatactcgtcgcccagcagccagcggcagatgtccagctcgtggatggccacgttggtgacgccgttctcagtcttgaagcccgggccctgagcaacgttgcggtggcagcacttgatcagcaggggcttgccgatctcgccggagtcgatgatgcgcttcatctcggcatagccgcggtcatagtgacgcatgaagcccacctgcaccagacgcttgccgatctcctgctcgcgcttgatgatgtcctcgcagtcagcggcgttctggctcaggggcttctcacagaagcaccacttctcctcagccagagtcttcatgacatagtcatgatgggtggggtcgatggaggtgatgaccacggcctcgacctcggggtccttgatcatgccgtcacagtcattgccgtaggacttgatgccgtacttggcggcggtgtcgtcagcggcggcggccacatagtcggacacggccacaacggtagcaccggggacggtctcaatgatgcggcggcagtgatccttgccgatagcgccgcagccgataatgccgatcttcaataccttttccatgttaataaccttccttttttataatttggatgggttttcgtaagcaaaaatgatcttagtacttccggacttccttcaggtgagcctgcaggtcggcataagccgccagattctccttgcgttcggacacctcggtgtcacccacgcgccaccaggaggaatagccgtcggtcatggtcttgggcaggaccttgatgtcgaagaggacggggatgttctttaccttcttggcatcctcgaaggcggccaccagctcttccatggtgcggacggtgtagctcttgcagccgtaagcctccgccaccttggcgtagtcaatgtccatgaagttgccgaacagaccgtccttattgcgatagcgcagctcggtgcacagcgtaacgttgccgtggccaacctgcaggttgttgatgcagccgaaggaggcgttgtcgaacaggcagatgttgatcttcttgtgctcctggcaggcggtgatcagctcaccgtggagcatattgaagctgccatcaccgcagaaggaatagacctcgtgcttgtcgccgatggccagcttcacgcccagagcgccggccacctcgtagcccatggtggaatagccgtactccatgttgtaggtgtcaacgccggtgggacgccacatccgctgcatatcgccgggcagagagccggcggcgccgatggcaacgtcgccctcgctcatcatggcgttgatggcgcccagagcagaggtctgggtcagctgggcattgacgtcctgcgcgaagcgcttggcggaatcggcgttggcgtcattgatctccggcttccagctcttcttgtcggagaaggtgatgtgatccagacggttcagctcatcgatccacttctccttggcgaccttgacctcatccttataggcggtctgatagccctccagcagcttttccagacggggcagggcttccttggcgtcagccaccacggggacagcctccatcttcaggctctggaactcagagacattgatgttgacgaatttgcaggtatccttgaacagccacttggaagcggtggtgaagtcggtgtagcgggtgcccacgccgatgaccagatcggccttccgggcgatctcgttggctgcggagcagccggtggtgcccacgccgcccaagttcagggggtgcagccagtcggtagcggacttgcccgcctgggtctcgccgtaggggatgccgaaggtctcggcaaagtgcaggaactcggcgtgcgcctcggaatagcggacgccgccgccgcagatcatcatggggcgcttggccttgcggatggcttcggcagcgtcagccagagcggcctcggtggcggggcggcgctccagacgccagacacgcttggcgaagaagctcacgggataatcataagcctcaccctcaacgtcctggggcatggcaacgcagaccgcgccggtgttggcgggatcggtcagcacccggaaggcgttgatcatagcgctcatcagctgctcaggacggacaacgcggtcccagtagcggcacacggccttgaaagcgtcattggtggtggtggccagggagttggtgtgctccacctgctgcagaacggggtcgggctgacggcaggcataggtgtcgccgggcagcaccagcagggggatgttgttggcggtggcggtgccgcaggcggtgaccatgttggcggcgccggggcccacggaggaggtggcaacgcagatctgcttacgcttcatctgcttggcgaaggccacggcggcctgggccatgccctgctcgttcttgccctgatagatctccaggtgcttggcctcctggctcagcgcctggccgagacccaccacgttgccgtggccgggaatgatgaacacgccgcggacgaagcggtgctgggcaccgtcaacctccatgtactgattttccagaaaacggaccaaagcctgcgccatggtcaaacggacagttttcatgcttttgttacctccgatcaatgattgggatagatgtggtcattggcatcgggcttccacagccactcgtgctccttgtcgtcgatgcgggtcttcagccagggatcgccctccagatgccggataccccaggcgtagcacatggcgtagccgggagccaccacctgagagtggaagccgtggttgatgacggcgcagccgttctgctcggtcttgtaaacatcgccgttggcaaaaccggcgccgaagccgtgaggatagtcgaaacggtagaaatagacctccggctggggatgatgatgaggaggataggaggaccacttgccgggacggttcagcacctcacccagcaccatgttggagaagggggcgttgtcatagtcgaagaaggtcttgatctcacgctccatagcacccatcagctcgcccttggaaccggcgtgctgggtctggacggtctccggggtgtacatgaccggctcataatccttctcgttcagggtgtcctgcatgtaaagctcgctgtggctgtgagccgtcagggtgatcttggtgcccttgggagccagcaggcagtaggcttcgtgatggaagcagttggggcggtcggcctcaacggtcttgccggcgtattcataggtgaccttgccctcgaaaagcagaatggcaacctcgcggtcggcgctttcgtaggtataggtgtcgccgtcctccatcaccagcaggcccacgttcatcagggtgcccatgtagttggtggattcgtcgatataggcgttgtagccccgcttgagttccttgttcttattgaaataagtcattggaaacatctcctgtttgatgtcaaaaagtggtatggaaacgcggtggggaggaccggggtcctcccatcgcgcgatttacagaccggtgtgctcccggatgtaggtacggcccttgatggcgtactccagaggattggccttggcgggatcctgctcagcctccaccagcagccagccctgatagtcggcatcggagagcaccttgaacacgggatcgaagtccacgttgccgtcaccggggacggtgaaagcgccattgcggacggactgcaggaaggaccagttgttcttgcgggcttcctccaccacgggcagacgcatatccttcagatggacgtggcccacgcggtccacatacttcttcagcatggccaggggatcctcgccggcgaaggtgaagtggccggtatcatagcagaggaacacataccggggatcggtgttggacatcatgcggtcggtctcctcgctggtctggaccacggtgcccatgtgatgatggaagcacagcttgaagccacgctcggaagcgatctggcccagacggttcagacccttgcagaagcgatcccactcctcatcgttcatgacatgcttgtggccgccggtgaggatgggcacgtccaccttgccctggatggagtagctctgctcggagacgttgatgtgatttgcgccgacagcctccaggaagtccaggttggcgatgaagtccttctcctcttcctccatggaacgggtcaggatgaaggaagaataccagcggctggcgatgcgcataccgcgcaggtccagagccttcttcagctcggcggggtcggtgggatacttgttgccgatctcgcagccggtgaagccggccagagccatctcgctgacggtctgctggaaggtgttctcggcacccagctccggcatatcgtcattgcaccagccgatgggagcaatacccagggaaacagttttcggatcaaacataaaacgtcctccttatgaatatttaggatcattatttggataagcgtacaaatagaaaatggtttgcggggaaaaggttggcgaaagcgcaaacggatttttctgtgtccgttaacagaaatacggaaactacaccgcatggaaaacgatttcgcttgttatcaagatagcacggttcccgaaaaaaatcaacgctttccaacggcaaaaccggattttttccgaaagtgccaaaggcgggccggtttttttattgcttttagagaatggcgggggaccgtgtgctgttccggcgcatagaatggaacgcgcagacgcgcgaatctgagcgattttaaggaggcttgttttatgcccacatcctttcagaatatggcgaccctcacctataccggcggcaccgtcaattccaatattgtcaccggagagctgagggaggtcctgaccgccgcaaaaacggcggtgcgggagaattacgagccgggtgggacggtcacgtatgtggtcagccttaccaacagcggcatcacgcccctgacgggcctgaccatttccgacaacctgggcggctacgcctttggcggagcgaccctgtatcctctggcctatttgccgggcagcgttcggtactatgtgaacggcgcactgcaagccgctccggccgtcaacgccggaccgcccatgaccgtcaccggcatcacggtccctgccgggggcagcgcccttgtgatctacgagacggaggtgacccgctacgcgccgctggcagcggagtccagtattgtcaacaccgtcaccgtgaccggcggcgggctggccgcacctgtgacggcggaggagacagttggcgtggtgagcagcccgagactgtccatcaccaaggggctgaatcccacggtggtggcggagaacggccggatcacctacacctttaccatccagaacaccggcaatacccccgtcaccgcgacggacgacgtgatcctccaggatacctttgatccggttctcaacggtctcacggtgacctacaacggtgcaccctggactgccggtacgcagtacacctatgacgggaccacaggtctgttcgctacaacagcggggcagatcaccgtccctgcggccacgtacacccaggacccggtgaccggggcatgggccgtgaccaccggcgtcagcgagctgatcgtcaccggcacggtgtaagcaccggtcaaggacaaaagggaaggcgaaggccctcctttttgcaccgtgttcgacagaaaaatgattgacaagcgcggacgcacatggtacgatcaattccgatttgttaaatcaggtcttttttgaatacaaaatgagcaaaggcgttcattttcagcgggagcatggctcccgttggaagtggacgccttttttgttgcagaacaggctggcggttggaaaagaatcgccgcagagcgcaaaacaggacaggagaccagaccggcagcagcctccaatgtgtgagcatgacggagaataagtctcggaaaaccatgatttttttctgttttacatattgtaaattcataaaaaggtgtgctataacagttgcatcaaaaaatgagggggcctggatcgccgggcatgcatacggaaaccataacggaaaggcggagacaatatgcagtattcggttgaggagatcaagcagtatgcggcggaggaggacgtgaagttcatccgcatggctttctgcgacgcggcgggccgccagaaaaatatcgccattatgccggaggaactggaccgggccttccagtacggtatcgccatcgacggctccgccattcccggcttcggcggggaggtccactctgatctgctgctgcgcccggacccgtccaccctctgtgtgctgccctggcggccggagcatggacgggtggtgcggatgttctgcgccgtgacccagccagacggcaccgtcatcggcgcggacgcccggagcctgttgaaaaaaacggtagaggacgccaaaaaggccggattgacctttgccttcggaacggagatggaattctatctgttccggctggacgaggacggcgagcctaccaaaattccctatgaccgtgccggttacatggacattgccccggcagacaagggggagaatgtccgccgggaggcctgcctgacgctggagcgcatgggcatccggccggaaagctctcaccatgaggagggccccggccagaacgaaattgatttccgctatgcggacccggttactgcggcagataacgccgtgaccttccgggcggctgtggatacggtggcggcccggaacgggctgtatgccgatttcggacccaagcctctggcagacaaggcgggcaacggaatgcacatcaatttctccgctgtcagcgaggataagcgggacgtgatgccccaggtccttgccggggtgctggcccatgtggaggccatgacggcgttcctgaaccccacggaggaatcctaccgccgctttggaagctggaaggcacccggctatctttcctggtccgctgagaaccgctctcagctcatccgggtcccggcggcggtgggggaataccggcgggcggaactgcggtctccggacccgctgtgcaacccgtatctggcctttgccctgctgatccgggcgggaatggagggcgttgctcacaacatgcagctgccgcctgcggcggatctgaacctttacacggcgccggaggagatccgggcccggtaccgcagactgccggagacctgggcggaggctaaggcagcggccgctgccagtgattttatcaaagaacatctttctgcagcgatcatccaatactatacctgaccgctcagaaagcacgcggtaaaaaacatagaaaaggagggggacaacgatggagcttggccatgcgtacagcgttctggtggtgtccgcctccgcaaaattcaatgaatccgtccggggccttctgccggagcggttctattggccggtcacggtgctgacggacgccgccggtgcccgccgggagctgctggaaaacagctacgatctggtggtgatcaacacgccgctgccggatgagttcggcacccgactggcgcaggatatctgccagcacagcgccgccggggtactgctgctggtgaaggcagagcattttccggatattgacggacggctgacgccacagggcgttctggtgctgtccaagcctatgtcgacccagctgtttacccaatccctgcggctgctgtgcggtacccgggagcgtttgcgggggctggaaaagaagaatgccaccattgaggaaaagatggaggagatccgcctggtgaacagggccaagtggctgctgatcggggaactgaatatgacggagcaggaggcccaccgatacatcgaaaagcaggcgatggatcgctgtgtgacgaagcgggccgtggcggagcagatcttgtcgacttataaataaaaactgccaaagcgggactgcgtagacagaacgtgaaattttcggaggaggacgtatgacgaaatacatttttgtgaccggcggcgtggtatccgggttgggtaagggcattactgcggcgtctctgggccgccttttaaagacaagagggctgaaggtggccgctcagaagctggacccctacatcaatgtagaccccggcaccatgagcccctatcagcacggcgaggtctacgtcaccgaggacggcgcggaaacggatctggatctgggtcactatgagcggttcatcgacgaggatctgaacaaatactccaacctcaccaccggtaaggtgtactggaacgttctgaacaaggagcgccggggggagtatctgggctccaccgtgcaggtgatcccccacatcaccaatgagatcaaggaatttgtctatcgggtgggtaagcagacggacgccgacgtggtcatcaccgagatcggcggcaccatcggcgatattgagtcccagcccttcctggaggctgtccggcagatctctctggaggtgggccgggagaacagcctctttatccatgtgacgttggtgcccttcctccggggctccgatgagcacaagtccaagcccacccagcattccgtcaaggagcttcagggcatggggatcaatcccaacctcatcgtcctccggtgcgacgagccgctggagccttctattttccagaaaatctccatgttctgcaatgtaaagcccgactgcgtcattgagaacatcacgctgccctgcctgtatgaggcgccgctgatgctggagcagtcccacttttcctctgtggtctgccgggagttgggcatcgacgccccggcaccggagctgacggagtgggaacacatggtggagcggatcaaacatgcggacagacgtgtgaccatcggtctggtgggcaaatacgttcagcttcatgacgcctatctctccgtggcagaggcgctgcgccatgcgggctatgctctgggggctgaggtggacatccagtggattgactccgaaaccattacggaaagcgatgcggaggaggttttgggtacgttggacggcatcatcgtccccggcggcttcggtcagcgggggatcaacggcatgatcctgacggcgaaatacgcccgggagcaccatgttccctatttcggcatctgcctgggaatgcagatcgctgtgatcgaatatgcacgccacgccgccgggatcaccgatgcggattccggcgagttcaacgagctgtgcgaaaacaaggtcatcgacttcatgccgggacagagcgacgagatcgacaagggcggcacgctgcggctgggggcttatccctgcgtgatccggcctggcaccaccatggagcggtgctacggcatgctggagatctccgagcgtcaccgccaccgctacgaattcaacaacgactaccgggaggccctcacctccgcgggactggtcctctccgggctgtcccccgatgggcggctggtggagacggtggagctgacggaccagccgttctttgtgggcgttcagtatcacccggaattcaaatcccgccccaaccatgcccatccgctgttcaagggctttgtccaggcggcgctggagcgtgaaaacgcataaagccgcaatatctgaatcgttatttttcaggaggtctctatggcatcacaaaccgttttagttctcgatttcggaggtcagtataatcagcttatcgcccggcgggtccgggaatgcagcgtatactgcgaggtcaggccctataccaccccggtggcggagatcaaggcgatggcccccatcggcattatctttaccggcgggcccaacagtgtgtacgatcccgcgtccccgcaggcagacccggagatcttcaagctggggatccccattctgggcatttgctacggctgtcagctcatcgcccacaatctgggcggccgggtgacggcggctacggcggattccgcccgggagtacggcaagacggagacctatttccgcaccgactgcaagctgttcaagggcctgcctgccgagagtgttacctggatgagccacggcgactatatggagaaggtgccggagggctttgaactggtggcccattccgacgcctgtcccaatgtagccatctgtgacgagcgccggggcttttatggcgtccagttccacccggaggtgaatcacaccgcctacggcaccgccatgctccgcaacttcctctatgaggtctgcggcgcaaaggggcagtggaccatgggggattataaggatgttgccatccgtcagatccgggaaaaggtgggggccggcaaggtgctgctggccctctccggcggcgtggattcctctgtggcggcagcgctgatagcggaggccgtaggcaatcagctgacctgcgtatttgtagaccacggcctcatgcgtctcaacgagggagacgaggtagaggaggccttcagaaagtgggacatcaacttcgtccgggtcaacgcggaggaactgtttttgagcaagctggccggcgtcagcgagccggagcgcaaacggaagatcatcggcgaggaattcatccgggtctttgaggcggaagccaaaaaaatcggccaggtggattacttggctcagggtacgatttacccggatgtgatcgagtccggcgcaggtgacgcagccgtgatcaagagccatcacaatgtgggcggtctgccggattatgtggatttcaaggagatcatcgagcctctgcggatgctctttaaggacgaggtgcggcagttgggccgtgagttgggtctgccggagtatctggtgatgcgccagcccttccccggccccggccttgccatccgctgcctgggggatgtgacgaaggaaaagctggatattctgcgtctggcggattttatcttccgggacgaggtcgccaaggcgcatctggagagcgccatgagccagtatttcgcggtgctgaccaatatgcgctccgtaggtgtgcagggcgatggccggacctatgattatactctggccctccgcagcgtcaccaccacggactttatgaccgccgattggacccggatcccctacgatgtgctggaccgggtctccgtccgtatcgtcaacgaggtgccccacatcaaccgcatcgtctacgatattacctccaagccccccgcgactattgagtgggaat

SEQ ID NO: 12130 - DNA, 5470 bp, Unknown
  gut microbiota DNA sequence
atggcaattttgattttcactaatattgacaaaattttcacctttccgtcagagtggcacgttttttgctcgttattcttgtgaattttatttgcaggttatacctgttctgcaaaactggaaagctatggaggtattttatatgagtgaaaagcccattctcggcatcctgctgggcaactccgccggcgttggcccggagctggtggccatgctggctgtgaaggactattacgctgattactgccggcccgtgatcatcggtgacttgcggatgtttgagcacggcctgaaggtcgtgggtggtgacgtgccccattacgtcatcgacgacctgagccagtgcgactggtccaagggctaccccgttctggatctgaaagatcaggatcccgatcaggtggtttacggcgaagccaacgcctactgtggcgccggcgatctcaagcagctggatactgccattgaactctgcaaggccggtaagatcgagggcatcgtctttggccccctccacaagggcgctatgaagatggccggtatgcactatgagagtgagcacacttattttgcccatgcctttgacctcaagacccccttctgcgaggtcaacatgatggacgatctgatgaccgtccgcaccacgagccatgtgcccatcagcgaggtcagcggcatgatcaccgagagcagcctgcgtgaggccatcgagctgggcgagatcaccggtgagagcctgggccacaagccccgcatcgccgtggctgctctgaaccctcactgcggtgagttcggtctgtgcggccgcgaagaagtggatgtgatccagcccaccatcgagaaggtggtcaaggaaaccggttggaacgtcactggtccttactccgccgataccctgttcatcagcgctctgaagggcgactttgatgtggtggtcaccatgtatcacgatcagggtcagatcgctctgaagctggtgggcttccagcgctgcatcaccgtggctggcggccagccctatcccatcgccacctgcgcccacggcactgccttcgacaaggtaggcaaggccagcgttaccaccgactccttcgagcgggccgtccgcaccaccgctcagatggctcttgctaagcgcacaaaggccaacggctgatttttgatctgcaaaacaaagaaagagggatttattttggagaataaaaagaaaggcttgaacctgcgggctatcattcccctggccaccgctatcgtatctctggtattcatcgtcgtaggcctgaaggattacggcttctggaaggcacagcctacccccggctttttccccatcatcatcgccgtggtgctgttggccgccagcgttgcctgcttctttcagatcgtcaaggataaggacagcgcagacgtcagctacaaccgcaatgagctgctggtgatgctgggtgccgctgccatcattctgtgcacttctctcatcggtctggtgcccagctgcctcatttatatcctgctctggctcaagctggtagagcacgctccctggaaagcgatcatcaccatcgagatcatcatggccgccatcattctgggcgtattcaccacttggctgcagatccgcttccctgttggtctgctgggttccctgctgggtctgtaaggaggtagaaaagctatgctgcaaaatttcgtttctctgctctccggcttccaggtggctctggcgcctgagaacatcggtgcctgtctgctgggcgctgtcctgggtctggtcgtgggcgctatgcccggtatcggctctctggcgggctgcgcactgctgctgcccctgacctataagttcaaccccaccaccgcgatcatcatgctgggcgctctgtactattccaacatgtacggcggttctttcagtgccattctgctgaacatccccggtgactccccggccatcaccaccgctctggacggctatcccatggcgaaaaagggccgtcccggtcaggctctgatggctgctaacctggcaagcttcatcggcggcaccatcggtatcctgatcctgaccatcaccgcctccggcctggcctctctgggcctgaagttcggctacgcggaaatgacgctgatcctgctgatcgccatgacctctatcagctggctcatcggtgagaatcccatcaagggcattgtcatcaccatgctgggtattctggtggcctccatcggtatggacaccctgtccggtgcgccccgctttgagttcggtagcatgtatctgctgggtggcgtccccttcacccccttcatcatcggctgcgtgggcttcgctcaggtcatcaagctcatcaatgagcgggaagctgacgatgccaaacgtcacaacgaggacagcaaggccaagctttccatccgttcctccatgccgaccggtcatgatattaagcgcatcctgcctcctatcctccgttccggcgtaatgggcaccttcgtgggcgttctgcccggttccggcgcgactaccggttccatggtgggttacgccatgcagaagaagttcaagagtgaggagcctatgggtaccggcgctatcgagggcattgccgcttccgaagctgccaacaacgccgctgccgcaggcgcctttgctcccctgctggctctgggcattcccggctccggcaccggtgccgtgctgctgggcggcctgatgatgtggggtctgaaccccggccctttgctgtttgattccaatcctgagttctgctggggcctgatctcctccatgtatgtagccaatgtgttcacactgctggtgtccattctggtgatccccttcctcatcaagatcctcagcgtgcctgtcaagtatatgatccccatcatcacctgcgtgtgcattgtgggcgcttattccaccagcaactccatgtacggtgtgatcattatgttcatctccggcatcgtgggctatctgctggataaaaacggcttccccaccgctcctatgctgctggccttcgtgctggcgcccatgctggagaaaaatatgcgtaaggcattcatcgcttctcagggcagcctgaacattttcgtggattccaccctgaagctggtgctgctggctgtcttcctggtgctgatcctgactcccgtagtcaagagcatcctccggaaaatgaaggccggtaaagcccaggcatgatcccccattccttagttttccaaaaaatggaaatatatttgaaaagaaggagaaacacattatgaaaaaactcatggctctgtctctcgctctgctcatgaccctgtctctggctgcctgcggcagcaagaccgagcagccctccaccggcagcaactccggcgatgccgaggccaccggctttgtcccctccaagaacgttacctggatctgcacctcttccgcaggcggcggctccgacatcttctcccgccagatcgctgacatcatgaagaacgaggatctggtcaacggccagaccatcgtgatctccaacgagaccgacggctccggcgaagtcggccgcaacaaggttgccaccatgaaggctggcgacgctgactacaccctgctgaccttcaactctggcgacctgatgcccatggtccagaacaccaagaaccgttcttccaacttccgcatcctggctatcatggctgttgacaagcagctgatgttctcctgccccgcttctgacgccaagactgactatgccaaggccggcggcgatcagaacgactttgctgccgctatcgaggctgccaagaatggcaccttcgtggtgatcggcggttccaagggcgatgacatcaccacctatcagaagctgctggctgaggtcggtctgactgagcagcagatgggctacatcacctatgactctacctccgacgccatcaccgctgctctgggcggcaacgtggacttcgtgatctccaagcccgccgctgcttctcagtatgtggagtccggcgacctgcacgctgttctggctctgtccaccgagcgttacaccggcaatctggccgatgctcccaccctgtccgagatcggtgattacaacaacgtggaagttcccgtgtggcgtggtgttgccgctcccgcttccatgagtgatgcagctgtggctttctggtctgacgctctgggcaaggtctctgcttccagcacctggcacaccgactatctggagaagaaccagctgatcgacgagtacaaggataccgctgccgccactgagtatgtcaccgcttacgaggctgacttcatggctgccaacggcatcaactaaacagaaattccctttcaggcaggcccatgtgatatgctccctctatgagcaatgttattaagatatgaaagtgccttatccgacgcggacagaaaatgaggcttgtgttttgacccacgctgtgacccacgaacagaaaaactggggcggaaacaacggagaaaagcatatctacgggtgatggaattctttggcaaatccgtttaacaccgctgaaacagtgtggaaggcggccctatcgaatcttcacacgcatgaggccactggttcgagtccagtagtctccaccaaaaatcaccggaatcaagcgattccggtgattttctttcgtaattcgcaacttttttgtgcacttaattttcgccgtttcttcaagactcacacgttgacccacacggggaaaggcgcggaaagtaccggacagggccagacaggaaattttctgtctggccctgtgttttttgccgtatttaccgcatttgctggctgatgaccccaccgatggcatcggcagcgtcctgtttcatctgggccgtggcgtggatgtaggtgttcagggtgaaccccgccgaatagtggcccagcgcgccagacagtgtcttcacgtccaccccgcttttcagggacagcgtggcgaaggtatggcgcaggtcatggaaccgaatgtgctccgcaccgatggccttcagaattttatcgtgcgtccggcggaaggcgtctggatcgtacatggttccggtttttggcgatggaaacagatacgggttgcgtgggtgtttctggtgttcggcggccaacaggtcaactgcctgttgcggaagggctaaagtgcggatggaatttctcgttttcggcgggctgaccaccagttcgccgttgatgcggttcacctgcttcgtgacggcgagcgtccggttttcaacgtccaagtccgtccattggagggccagcagttcaccgcgccgcaggccggtggtcagttccagatagaaggccgcgagaagcccccggcgctccgcttctgcgaggtacatcccgattttctcttgcggcagaattttcatttctttcttttcgagctggggtagcttgcagccctgggcggggttggtgaggatcagccgctccgccaccgcctgctccaagcagttgtgcag

SEQ ID NO: 12131 - DNA, 1995 bp, Unknown
  gut microbiota DNA sequence
gcccctcccctgggccgtcagttctgccgagggattcgcccaaggcggcgtcgaggttctcaccgccacgggactgctggacgtgctggccttcggcagcgagtgcggagacaccgccgcccttctgcggaccgcgaaggctctggagggcaatgcttttcaagcggccttgagagcggagctgaccaagggggacagctttgccgccgcccgccagcgggccgtggctgccttgctttccccgtcagacgccgccctgctgtccgaccccaacaacacccttgggatcgaatactgccgggcactgctgcgtgtgggcgcggctcctgcgctgtttacgatcccccggaccggtgcggcccatgacgtcaccccggagaacgccgggggctattccgcctccgccattcggcacctgctggcagaaggacgccgagccgatgccctgtcccggatggtcccggccatgagggccgtttacgaggcggaggaatctgcgggccgcgcgccggtattcgccgccgcctgtgagcgggcaattctggcccggctccggtccatgactccggcagaattcgatgcgttggacaccggacacgaaggcgtcggccagcggctgtacaacgccagccggaacgccgccaccctcgacgccgttttagacaacgccaaaaccaagcgctacgcttacgcccggctgcggcggatggtcctctgggcctatctgggcctgacccccgccaagctgcccgcctccgtcccttacctgcggattctggccgctaacgagaccggccgggcactgctgggccggatgcggaaaaccgcccgccttccggtcattacgaagcccgccgccatccggtccctcttccctgacgctcagcgtctctttgagaccgagagccgggccgccgacctgtacgctctggcgtatccggagctgacagaagcctgcggctccctctggcggcagaatcccgtcatgccctgactcatttcctgaaaggagttcctcacatgaaaaagtatctgtctctgatcctggccctatgcctgccggcgctgctgggcggctgcggcgctgtcccgctccccatgccggaatctccgacaccacctcccgctgcggatacagaggaaattacttatgaagtgtccaccgacccctatgaacaaacggtgacagcggaggacggcaccactttgatggtcattgatttccaaattcctcatttacaggcctacgccaacggtgcgctgatcgaagaaccttccacccctgcgcaggagcaggccatggaccgggtccatacctttaacgaaaatttcgaccagtggcgggaatcgaattcctcagaggaaaacgtttcctttgtgaaggatctgtatcgggatatgcctgagatgttttccgaggaccatatggctcctctttcagaggaactgacttacacctgctaccgcaccggcaccctcatcagcattgccgccgattattacagctatctgggcggtgcgcaccccaacaccgtgtatttcgcatggaactatgatctggacagcggcatgttcctcaccatctcggagctggctgccgatccccagaccttcacgctggcagtggcggatatgatcgaggtgcaggcggaggaacagatcgcatcgacaccggagctggaggggcggtccctctccgatgtctattgggataattaccgggagactttggagaaatggagcagcgactacgccgcctcctttgatgcggacggtctgacggtgatcttctccgcctacgagctggcctcttacgccaacggcccgcaggagttccatttcccctacgccgcactggacagctattggagcgacagcggtcgggcggtgctgggcctggactgatatttttgcagccgtaaaacagtccttacaactcaatttgcaaaaagggcagtcccaatcgggactgccctggaactgtcgataaagtgg

SEQ ID NO: 12132 - DNA, 16936 bp, Unknown
  gut microbiota DNA sequence
catagtggccagccgcaacataagcgctggggtcggaggagaacagaccgccagagatggcgatggttgcattagaagtactgctcttaacaattgccgcctttgttccggcaaactgaccgccggaaatgttcacagccgcattttggctgctgacttcggcaacagcatatgtggcaccggtgaacgtaccaccggacacggtaagagtaccaagatcaatctcagcaccacaaccacagttgtaaatgccgtatgtctcagcgttagcgtcacttgcagcagtaaaggtaccgcctgtgatttctgcaatattgtgattctgaacaaccgcctgataatagttgctgaacgtaccgccattgatcgttaactttgcgcggtcatcgttcttgatcgtattcagaccgccgcggaacataccgccatcaatcgtcaggataggctggtcaagtcccttattattggtgtagtcaccggcgttaaagtatccattagaaacaaggctggagaatttaccaagagaggcattgttcccagcagtttgcacaattgcgccatcattgatagtcatggtgccaacgttcttgatggtgtaccaagagttttggccactctcgcctttgttcttgccgttttccttagaacgatcaaaggtaccgccatttacgacaacagttcccttattgtacagcgcacctttagcatgagaaatattatcaaccttgcccgttcccgcgatagtcaagttaccattgttcagaatggtgtgatccttcacgttggtcaaggtcttaccgttcagatcaagcgtgatggtcttgcccgcgggaatcgtgacatcctcggtcacatccttcagcaaggtgacggtagcattatcagctgccttgacagcatcggtgagggtcttgtaataggtatcaccgaccttggcaactgcgttggtttcgcccaatttctccacagtgccatcggcagactgcacataatcagaggggatgtacttggaaatatcggcatcaaatctaccgccggttaccgctgcggtaccactgttggatgcatcgtaacgatccacaatcatttcctgggtatcgctggcgtgcttaaattcgccgccagaaatgctcagcttgccgatggtattggcatcggcaccataagaagaggtgaacagtaccgcggaagcggtatccagagtctggaacgtgccagcagtgatttcagccttgttccagttcataatgacatactgggcagtattggagaaattaccgccattgatggtcagtacaccaaaggaatcattcttgaccgtgttgataccgccggcaaaattgccgcccatgatcgtcaaatcgcaatcggcagttgcatcgccgccattgcggatcatgctggaataaccgccagcgttttcaacggtaacgccagtgttaatttccatggtaccgtagttggcaatggtgtaccaactgtttccgccgttgccatagggggaatagatacccttttcggcagaacgcttaaaggtgccgccattcaaggtaacctcgccggagttgacgattgcgccctttccgtggctggtgttgtccacaacaccagtgccaacactgtcgctgatattcaacttgccacctttttcaaccgtaatggtgtggccgctggcattggtaagtttgtggccgtttagatccagataaatgtttttcccggcgggaaccaccacatcttctgtcagatcatccaacagtttaaacgtgggaggggtttccatctgcccaagccggatagcctcttccagagtgtcaaaatgtgcaactacgtcatcataacggggatcatcattgatcttggctaccttatgatgacagtcagtgcctccttcgcaatcataactcgctccttccgccattgccgctgttggcagcagcgtcaaggccattgccagcgtcagcaaaattgatagaaattttcgtttcatactgtatcctcccatgagtataaaatatgtgccccgctaccgctgcagggccgatagatacctatagcatactccccccgcccggaatatgcaagtaccctaccgggtaaatattaggaaatttcctataagctgtccgaaaaagcagaaaaacagcgggagtgctgaccggaagtcacctccgcggcaaagtcccgtcgattttcattgccataccgatggaaccgtggtatactattcccgttgaaaaaacaaaacgaaggagagatgaccatggaccccatcaacgagatcgaactggaggactgccccgtatgccgcggcgccggttatattgaggacgagcagggctggtgcatgtatgcgtgctgcctgaactgcggcacggagaccgcccacgtcagctacaagacgccggaggagcggctggaggccgcccgtcaggctgcctacctgtggaacatcggcaaggtgatccacaacggcatgtgtgactgattcccacgcaaagaacgcgcaagtgagagcacttgcgcgtttttcctttggctgatacaatacaggaaacaacttccgggaggaacacagtatgattcgtgagatctgcagggatgagacgtttctcgcccagaaggccgctcccgccacggcggacgatctggccacggcccaggacctgctggacaccctgaccgcccacagggacggctgcgtgggcatggcggccaacatgatcggcgtttgtaagcgcatcatcgcctttgacaacgaggggacgtacatggtgatgttcaaccccgtcatcgtccggcagtccgggccgtatgaggcccaggagggctgcctctccctctccggcgtccggaaaacgaaacggttccagaccatcaaggtccagtggcagaatgaacaattccagacccggctgaaaaccttcaccggctggacggcggagatcatccagcacgagatcgaccactgcgaggggattttgatatgattctttacttttccggcaccgggaacagcggctacgcggcccggcgcattgccgacgggctgggtgagccgctgctgtgcctgaatgaccgcatcaaggccgggaacaccgcccctgtggagaccggggagcggctggtgatcgtcacgcccacctacgcatggcggatcccccgcatcgtggaggactggctgctgcatacagagctgaccggggcgaagcgggcgtggttcgtcatgacctgcggcagcgagatcggcgatgccaaccgttacaaccgccgcctctgccaggcgaagggcctcgtctgcatgggcacggcgcagatcgtcatgccggagaactacatcgccatgttcaatgcccctcaggcggaggaagcccggcagatcgtggccagagcggagccggacattgacaatgtgatcgccgccgtccgggaaaaccgggcctttcccccgccccggaggaaattctatgaccgctttatgagcgggccggtgaatcccatcttctattcctgctttgtaaaggcaaacgccttcacaaccggaaatgcctgtaccggctgcggccagtgcgtccggcgctgccccaccaacaacatcaccctgcaaaccgggaggcccgtctgggggcaggactgtacccactgtatggcctgcatctgctactgccccgcggaggccatcgagtacggcaaaaagagccttggcaagccacggtatcattttgaagcgctgtgaggggcttctggacacgcaattgcagactatgtgcagggcagccgccctgcgcatagtttttgttggaacgaagatgctatatttaagaggttttgatctcgctttttcgcgcactgccgcctccggtgcgagcggagaaaatcacggtgacttcccccgcagccaaacttttttcttgcatttttcctcattttttgtatcataaaaccgtacaccatacaccgatatacagcaggagaactctttttgactccgaggattttttatgaaacgcgatgacaagctgttttccattggcgagatcgccaaggcattgggcgtgacccgccgcatcatccttcactatgaggaacgggggctgatcgaaccggataagcgggatgacgccaccaacaaccgctactataccattgatacctttaccaagctgcggagcatccgcagtctgcagaatctgggactgacgctggatgagatccgggactactacaacgattccacggatctgatgccgctcattcgccggatggaggaaatgcgggaccagctgaatctcaacatcgaaaagctgtacgagcgggccaaggtatcctccgctcaggtcaaggagctggagctgccgcagcagctcatataccgccgcacctaccgtagcgataacgtggcggacaagaccgttctgctccgcaacacggctttggaggccatgcgggcccacggtacggatatcacccggcggatgtacttcatccagttccctatcgaccgcccggccgaggtgtccttctgcgtggccgttcccccgggcagtgagggagaatatgtggagaccgcagcgcctatgcgggccatctgcatctatcaccacggtgcgtatgaggagctccccgccgtgtgccgccagcttctggactacgccagggagcacggcctgacgccgcagggcatcctgcgccatacctatctggaggggccgccccagcataaggaccccgcaaagttcatcactcaggtcattctgccaatcgtgtaatggtatttcgcacagcgcctatctccatacccgccagagttgtctccggcggacaccgtaaaatcaggcttccgcaagggccggcggttcagaaccgccggcccttgtatcggatctgcgcaaaaaagcgcggctcccgccgtccgagatctcgatttttttgcatatccgaacgtccgatccgaccggggcaggacggagcattttccgcgtatttattttgcacgaaattgaaaaaccttccattcttttttctgctgtaacttttacaaaagataaaacgcgggcaaaaaagctgttgacatttggcgttcaccttgctatgattcaaccaacaaaaacgcgatgacacagagtagtaagcagggcgatcctctcagagaagtgccggttggtgcgaggcacagcgcgatcaagctgccgaactggctgtacagcggctgcgtcgaattggaagtagatgcagacgggagctcccgttacagtagcagggatatgatggtatcccgttgagtgtgtttccaatacaggaaacaaagaagagtggtaccgcggagggttttctacctttcgtctcttctgccaaccggcaggagcgacgaaaggttttttgtttttcctgccaaccatcggacaacatttgcaggaggaagaaatcatgaaaaccaacaccaaagtccccaagacgcccttctttgccgccttctccgtcggcgcggtcctgttctctgctcacgcaggcggcggcttcgccaccggcaaccaggccaacacctattacgtgggccttggctggaccggcatcatctccgccattgcggccatgctgcttttgaccctcaccatgcgggaggccatgatcatgtacaactcccgtggtctgacgagctacaagcagctttttgaaacgctgtaccatccctttgacaagatcgaatgggccttcgaggtattcttctacatcatggtgctgatggccgtcgccgccgccatctccggtgcagcctccgccctgaataactacttcaccatcaactactacatcggcgttgccattgtcggcgtcatcgtcctgatgctcaccatcttcggcgcaggcatcgtccgggccgcctccgcctacatgggcatggccattctggtcaccgccatcagcatctatgtcatcggcatcttcaagagcgacagcagcatcttctccgtcctcgccgccgactttgagaccaccggcttcatgaatatgcccaaggccatcctcaacgcctttacctacgccggtttccagtgcgtgaccctccccaccatgatcgcctgcggcaccaccatgaagaacaaggctggctgcgccaaggccatgtggatctccttcgtgatgaacgccgtcgctctggtcctctccgtgttcatgctcatgagctggcagagcgtttacaccgccgtggagggcggctccaccatccccaccctcaccgtctgcaagatcatcggcatccccgctatggtggccgtttacggcacctgcctgctcctctgcctcatctccaccggcgtgaccaccatcttcggcttcgtggcccggtttgaaaagctccccgtgttcagcggcatccagtccgccccggtccgcagcgccatcgtttccgcattcatcatcgtcctctccatgaccatctccatggccggcctcaccaacatcatcaagtacggctacggctactgcggctatctgggcatcgccgttgtggtggtccccttcctgaccgttggcgtatacaaaaaccgtaaatactgcaaggagcacgccttcgccaatgccaacgccgaggaggaagccgctcccgccgttcgcagcagcgtccgtgccaatccggtgaccgccgactgagcccgtctcatcaaccaagcgttttttaagaggtgtttattatgcaaaaagctctttttccgggatataccgtaggccctgacgcctatgacgatattgtcaacatctgctctgcctatggcaaaaaggccgccatcatcggcggcaggaaggcgctggccgctgcggagcctcagatccgcaaggcggtggaaggctccggcatcgagatcaccggcaccttctggtacggcggcgaggcctcccgcgaaaacatggatatgctccggcctcaggtggcggacgccgacatgatcttcgcggtgggcggcggcaaggccatcgacacctgcaaggtgctggcccacgagaccaaccggcccttctttaccttccccaccatcgcctccacctgcgcctcctgcaccagccttggcatcgtgtaccatcccgatggcagcctgcgggaatactccttctccaagatcccgcccaaccacattttcatcaacacggagatcatcgccaacgccccggcccgctacctgtgggccggcatgggggataccatggccaagcactatgagtgcaccatctcctctcgcaacgatgtgcccgcccactccgacgctatgggcatcgctctcagctccatgtgcgccgctcccatcctccgctggggcaagcaggccatggcggactgcgaggcccacagggtcaccccggagctgacggagatcatcgaggccatcatcatctccaccggctatgtctccaacttcgttcaggtggactacaccaccggcatggcccacgccatgtacaacggcttcacgatcctgccctccacagaggaataccaccatctccacggcgaggtagtctcctacggtatcctggtcatgctcaccgccgacaagcaatacgcggagcgggaccggctgctggccttcaaccgctccatcggcctgcccacccatctggcggacatccacgccagaccggaggacctgcccgccgttacggaaaaggcgctggcgggcatcgacgtccgggtctggccctaccccgtcgcccagcaaatgctgatcgacgcggtaatggagctggagcaggtcggctgatccggcaaggcgaaccgtttccgccagaaaaagtcagaaaaacccccggagcaacaggtcgatcaagaccggttgctccgggggtcatcctttcatttggggagagaaacagcagactgagggaagcggcatgggagatcccccctgccccgccacgagaaaaagccctgtccggcgcaatcacacagattcctgcttctcccgctcgctgattttacattcaaagcggtccttgttggaatcctgcgggatgggggtgggatagccgccgccgaagcaggcggtgcagaagccgctctccgtatggtcggccagcttcaccacgtcgctgaggctgagatagccgagagaatccacaccgatgatttcagcgatctccgcaaccgtgtggtggttggcgatgagcttgtttttgtcgtcaatatccgtgccgtagtaacattcggacacaaagggcggcgcgctgacccgcatgtggatctccttcgcgccggccttgcgcagcaggtcgatggtacggcggcaggtggtgccccggacgatggagtcatcgatcagcaccacgcgcttgccctccaccacggagcggatggggttcagcttgatgctgacctcattttcccgcatatcctgcgtgggagaaatgaaggtgcggccgatgtatttgttcttgataaagcccatgccgtaggggatcccggactgccgggcgtagcccatagcggcgtccagaccggagtccggcacgccgatgacgatgtccgcctgcacgggatgctccagcgcgaggaacgcaccggcccgctgacgggccacatgaacgctgctgccgtcgatcacggagtcggggcgggcaaagtagatgaactcaaaaacgcacagtctccggggcgcgatgccgcagtgggatctgtcggacttgacgccgtttttgtccgccaccacgatctctccgggcagaatatcccgctcaaagctggcgcccacggcgtccagtccgcagctttcagaggcgaacaccacgctgccgtccttcagcctccccatgcacaggggacggaagccgtgagggtcccggacggcgatcagcttgctgggggacgaaatgaccagagaatacgcccccaccagacggtccatggcggtggaaaccgcctcctcgatggaaccgtgcttcagccgctcctgcacaatgatgtaggcgatgacctcggaatcagtggtggtatggaagatcgacccctggctctccagctggagacgcagctcctgggagttggtcaggttgccgttgtgggccagcgccatgcggcccttatagtggttgaccagaatgggctggacgttgcgcttgttgtccgaaccggtggtgccatagcgcacatggccgacggcgatgttgccaagccccagagagcggagccgctccttgggaaacacatcgctgaccagccccacatcccgccaggagcggaacaggccgtcatcgttgacaacgataccagcgctttcctgtccacggtgctgaagggcgtacagagcgtaataggctaacgaggccacatcggtggtgacattggagtaaacgccgaatacgccgcattcctcgtggaggtggcggtcatcgccggcagccggagccgccttatcaagatcagagcgtgccatacatttactgcgcatcgtgatccagcagacgcttcatgatctcggcgtaggcgtcctcaacgccgcccagatcccggcggaaacggtccttatccagcttttcatgggtcttggcgtcccacaggcggcaggtgtcggggctgatctcgtcagccagcacgatggacccgtcggccaccttgccgaattccagcttgaagtccaccagcgtcacgccgcactcggcccagaacgccttcagcacctcgttgacagcgaaggcatagttcttgatggtctcgatctcctctgccgtggccaacttcaaggccagcgcgtgataggtgttcagcagaggatcgcccagcgcgtcattcttataggaaaactcgatggtgggctgatcgaacacgatgccctcctccacgccgtagcgcttggcgaaggaaccggcggagatattgcggacaatgacctccagagggacgatggcaacccgcttcaccagcgtttcccgctggctcagctccctgacaaaatgggtggggatgccggccttttccattttggccatcaggcggttggtcatctggttgttgataacgcccttgccgaggatggtgccttttttcaggccgttgaacgcggtggcgtcatccttgtaatccacgatgagcagctcgggatcatcggttttgaatactttttttgctttgccctcgtagatctgttctaacttctgcatgttctgctcctcctgcgcatctgcgcataaaaatgatcaaaaatgtcaattggccgcgtacatctgccggtacgggtttttgctgtccggcgtcaccacggtgaagggcccgtccatcagcacttccgcgtcgccgccgaacagggcgcaccagcgctccaccagcggccgcagaagggcggtctcctcctccgtggggggatggggcgtcacctgatccgggaaacggatggcggaaacatcgcctctgaaaatcacgcgcccgccgtgctgtcccgtgcaggggaaataaccggcggcgggctttccgtccgtatgcagtcccagcaccaggatcgtgccgcctgcctgatattcccccagaaagctccccgcccggccgccaataacgatcaccggctgctggtcctgataggccttcatgtggatgcctgcccgatagcccgcgttgccctggacatagatctcgccgccccgcatggcatagcctgccgtgtcgcccacgctgccgcggaccacgatggagccaccgttcatcgtatcgcctacggcgtcctgcgcgttgccgttaacggtaagggaaccgccccccagatacgcgcccagggcgttgccggggatgccgtcgatctccacccggcgtccgctcatgcccgcgccgataaaccgctgcccaaggcagccggtgatgcggcatgacggtccggcagcccggatcgcctcatttaaggcccggtaatccagaccctttgcttgaatatccatgaattatcacacctccgctgtttttccggtggatcgagatttttttgccgcttactctccggcgtgggacacacccagaatggacagctccttttccgtcagccccatggcccgcagcatcagccggttgccccgcaaagcctcgatggaattgatccccatgccgcccatgatctccatgatctcgtgcttccacgccgtcatcagattgatgaggcgttccgtgccctcgtcgggatccagccgcttgaccagctccgggcgctgcgtggcgatgccccacgcgcatctgccgctctgacaggtgcggcagaggtggcagcccatggcgatcagcgccgccgtgccgatatagcaggcgtccgcccccagagccacggccttgaccacgtcggcagaggaacggatgctgccgcctgcgatcagggacacctgattgcggatgccctcctcccgcagccgctggtccacggccgccagcgccagttcaatggggatgcccacgttgtcccggatgcgggtgggcgcggcgccggtgccgccccggaagccgtcgatagcaatgatgtccgcgccgccccgggcaatgccgctggcgatggccgcgatgttgtggaccgcggctaccttgacgatcaccggtttccggtactgcgttgcttcctttaaggagcagatcagctgccggagatcctcgatggaataaatatcgtggtggggcgccggggaaatcgcgtcggatccctccgggatcatgcgggtgcgggaaacatcgcctacgatcttcgcccccggcaggtgtccgccgatgcccggcttggccccctgccccatcttgatctcaatggccgcgccggccatcaggtagtcctcgtgaacgccgaaccgtccggacgccacctgggtgatggtgttgcgcccatagcggtaaaggtcctcgtggagtccgccctcaccggtgttgtagcagattcccagcgcctccgccgctctggccagactctcgtgagcgttgaagctgatggagccgtagctcatggcggagaacagcaccggcatggacagctccagctgcggcgtcagctccgtgatcagccgcccctgagcgtcgcgccggatgcgctccggcttcttgcccagaaacacccgggtctccatcggctcccgcagcgggtcgatgggcgggttcgtgacctgggaggcgttgagcagcagacggtcccaatagaccggcagctccttggggctgcccatggaggacagcagcacgccgccggtggcggcctgcttccagatctcctccacggcatcggaggaccagttggcgctctcccgcagggtgcagcggtttttctcgatcttcaaagcgtgggtgggacagtacgccacgcaccgctggcagtccacacatttgctctcatccgccagcatccggccgtgggtctcgtcaaagcggtgaacgccgttgggacattgctccacacagaccttgcagttgacgcagcgctgcggatcccgcaccacctcaaattgcggcggcacatagaaatttttcatcagtaagtcccttctttcaaccggacgatgaccggctcaccgcccatgggcgcccatatattctccgcgtcaggctccatgacccggatggccgcctcctcgctggaaatgaacacccggtcatccttttcgcccaccaccatgctccgcagcttcagccggtcgttcagcgccatcagtccgccggaaaagccgaggatgatggagaacggccccgtcagcagcaggctggggaacaccttccggagataggccagccgttccgcctcctggggctccttgctctcaatggtgctccagaagggggccgccatgacggaagccgcctcctccagcgtcagcccctgccgccgcagaaggtagtctgcgatgtaggccatgacctccgtatccgtttgcagcgtgcactgatagccgaacatctccacgcagcggcggttggcgtcgtaggaggagatctctccgttgtgcaccacagaccattccagtagggagaatggatgtgcgccgccccaccaaccgggggtgttggtgggatagcggccgtgggccgtccagcagtacgcctcatactcctcaagacggtagaaccgacccacgtcctccggatagccaaccgccttgaaggtccccatatttttgccgctggaaaacacgtatgcgccccgaagctccgcgttgatcttcgtcacaatgcgggccacgtattcctccgcatccagctgcagccggttcagaacggactgcataggcgccagaaaataccgccagatcaggggcgcatcggtgatctccgggatctgccggatgggaatgtgctccgccttgacgatctcaaagccctccttcagcagcgcctcacaggttttgcgggtgtcccggctgtcaaagaagatgtggaaggcatagtagtctcggtattccggataaatgccgtatgcggcgaagccgccgcccagaccgttggagcggtcatgcatggggatcatgctctccacgatcttctctcccgtcatccggcgtccctcccgggagatcacagcggagatcgcgcatccggacgggatgcggacctgcccttctcttttcatgatgttcaccttcctcaaaacggcgttttttccgttacgaaaaaagacgtccatttttcagcagagggtcacgcctcttgccaaaaaatgaacgtcattgctcatcaaatatacaaatgatttgttatcatactataagtgttctgtcttgtcaatccttttgaactacccacaactgaagtcgcagacttccggcagcggcgaagccgcccggtcatggcgacagttgagcaagcactttccctgtgacaacgcgcatccccggcttttatcactatacattcaagttcagacgtgctatcatgtgcaaaatgggcgaatgtcgaagtgaaaacgaagcagaaaatttcaagcaactaacaagcaactaatttgaagcgattgagggacgcgttatgaaaatcagaaagtacagtgaaaatgatgtacccgccatggtacatatttggaatgaagttgtcgaagagggcgttgcctttccgcagctggagcttctcgacaaggaaagcggcagggcattctttgccgcgcagacgtactgtggtgtggcagatgacaacggaacggttgtcgggctttatattctccacccgaacaatgtcggccggtgcgggcacattgccaatgcaagctatgcggtcgactccgcctgccggggaaagcacatcggagaacagctggtttccgattgccttgtacaggccagaaacaacggcttcaagctaatgcagttcaatgccgtggttgaaaacaatacccatgcccgacacttatatgaacgtcttggctttgtgcaggtaggaatgatcccaaacggatttcttatcacgcgtggcgtaatacccctgcctttaggcatggggatataagccacacattgttccctcgtaacaagacttccgaggattgtgttagatgccgttgagtggtataataaatccatggaatataaaagcaatcacaatgtggtgtactcctgcaagtatcatgtagtctggtgtccaaaataccgccgcaaggtcttgatcaacggtgtcgatatacgcttgaagaaactcatagaggaaatctgcggcgaataccacatcgacatcatagagatggaaatcatgcccgaccacatccatttgctcatggaggtagacccgcaatttggcatacataaagcggtaaaactaataaaagggcgaacgtcccgtgttttgaggcaagagtatggatggctccgctcaaggattccgtctttgtggacaaattcatattttgtttctaccgttggcgaagcgcctttgtcggtcatcaagcagtacatagagaaccagaagaatgtgtgaggtatcgagatggaatacagctataaattccgcgtctaccccaccgcggcgcaagcgcggcagatacaaaggacgtttggctgttgtcggttcgtctggaatcactatctcgcgttgcggaaagacctctatgagcaagatggaaagacaatgaactatagtacctgctctggggatatgacacagctcaagaaaacccttccctggctgagagaagtagatgcaaccgctctgcaatcttctctgtgtgatttagacacggcatatcaaaacttcttccggcgtgtgaaacagggccagaaacccggctatccaaaattcaagagcaagcaccatagcaagaaaagctataagagcaagtgcgtgaggacgaatatcaaggtgctggacaaggcggtgcagctcccaaaactcggctttgtaaagtgccgtatctccaaagatgtcaaggggcgtatcctgtccgctactgtcagccagaatccaagcggggaatacttcgttgccctctgttgcaccgatgtagaaatagtgccgctgacctctaccggggcggtagccggtatcgacatgggcctgaaagcatttgcaatcacctccgatggcgtagagtatccgaaccataaatacctgacacggaaccagaagaaacttgccaaactccagcggcagttgtcccgaaaatcaaggggcagtaaccgccgggaaaaggcgaggatacaagtagcccgtctccacgaacacgtttccaaccagcggcaggatatgctccataagctgtccaccagccttgtgagaacctatgacctgattgcgattgaggatttggctccgtccaatatggtcaagaaccacaaacttgcccggtctatttctgacgcaagctggggcgagtttcggcggcagctggagtacaaagcggcgtggtacggaaaacaggtggtcacggtcgaccgcttctttccgtccagtcagctttgctccacttgcggtgctcaatggccaggaacgaaagacctgtccgtccgggagtgggcttgccccaagtgcggcactatccatgaccgggatgtaaacgccgcaaagaacattttgaatgagggcttgcgcctgttggcgtagcagaaacatacggtagggcgggacacgcccaaacctatacgctcggggacaccgtgtaagacctcgctggtgcaggcggtggtggctgaaccgagaatcccccggctttagccgtggagagtgtcaagaaggacggctcctaccagaatattttcctgtattaccatgtgctgtgaccattccgccccgcagcaagggggctccccttcctcggtcacagttggagtctggatctgccgtcagctaccgcacacaaaggaatagccgaagaaagcggatgcacgctttgtggcgtgcatccgctcagtttgttgaaaaagtctttttcccaccaggccgcgcaactctgttgcttacttcgatttgctttgagggaagcacttcaggcggtggcggagaccgccgagaacgcgtacccgccccggaccgtgcggatataggtgtggctgccgcccatctttcttcgaagattggagacggtattcgccacgaccttcagggtgtccgcgctgtcccggccccacacggcgaaaaacagatcctccttggaaagcgtgacccccggattgctggcgagaagcagcagcatattgaactcgatccgggtcagcgccagcgcggttccgttttgaaacgcctgctgggaacgcccgtcaatggtcagttccgggaaggtgagcgtgtgccgggaactgagggagacccgctccgcggcgatgtcctcccgccgcagaagggccaggatcttttcttccagatccctctctgccccatttgcttgaatgatgatcatggtgtgtctgtgtgttactccgcgtccagctcgtggagcagattgaccatctcgatggcgctgaccgcgcagtcgtagcccttgttgcccgccttggtgccggcccgctcgatggcctgctcaat

SEQ ID NO: 12133 - DNA, 12861 bp, Unknown
  gut microbiota DNA sequence
aaatgctgctcgatgtaagctatcaggcaacagcgccaaaggtgcgcaaaaagaagggctgacagcgtttgaaagggaaaacggcagctgctgaatcgaaaagaaaaggggacacaggctcctcggtgggtccggacacgagagaatcttaacgatttttagcaaaaacacgtcttgacaacgggcagaaaaccgtgtattcttcgttcaaaagggagtagcttgcacagctttgtgtatccgttggcgtcagtacgggccgtttggctccgctgcggattgaaatggcgagacttttgtatcaatgtgaaggcattgacgcaaaagggctcgccttttttgcgtccgccgaaaggagacacagtacatgaagcaggaaaagaacatttgggaacaatcccgcgtggagctgttccagaaactggattgccgggagaccggcctatcacaggaggatgcggcgctccgtttgttgaaatacggtgccaacgaactgcacgccggcaagcaaaagagtgtttggcagatttttctggggcagtttgcggattttctggtgttgatcctcgttctggccgccgtcatctccgcctgcatgggggacgtggagagcatgatcgtcattctggcggtcatcaccatgaacgcaattctgggcaccgttcagaccgtcaaggcctccgcatcgctggacagcctgaagcagatgtccgcccccaccgccaaggtactgcgggacggtcagatcgtacagatccccggccgtgaggtagttcccggtgatgtggtcatattggaggcgggagattccgtctgtgccgacggacgcctgttggaatgtgccagcctgaagtgcgcggagagcgccctcaccggcgaaagcctgccggtggaaaaggatacggagccgctcagtggggaaacggccttgggcgaccgaaagaacatggtgttctccggcagctttgccacctatgggcggggccgctttctggtgacggccaccggcatggacacagagatgggcaagatcgcccagcttctgaaaaacacggaggagcggaaaacgccgcttcaggtcagtctggatcagttcggcagaaagctgtcgatcatcattctggtgatctgcgcagtgctgtttggcgtcagcgtactgtggcggcacgaaaacgtgatgaacgccttcctctttgccgtggcgctggcggtggccgctatcccggaggccctcagctccatcgtgaccatcgtgctgtccttcggcacccggaaaatggccaaggaaaacgccatcatccgccatttgcaggcggtggaggggcttggcagcgtgtcggtcatctgctcggataaaaccggtacgctgacccagaaccgcatgacggtgcgcaagctctacaccggaggcgaggtgatcgacgccaaggacgcggacttccgggacccgttacaggagccgctgctgcggacggccctgctgtgcagcgatgcggtcatcagcggggatacggagatcggcgaccccacggaaacggcactggtgcggctgggggagaccaacggctttgacgaggatctcgtccggaaccgctggccccgcctgacggagatccccttcgattccgatcggaaaatgatgtccacggtccacaagctggcggggggcctgatgctggtcaccaagggcgcgacggatgtgctgctggaccgctgcgtggtgacggcggaggaacggacgaagatcgaacaggtcaacgaacagttttccaacgagggcctgcgggtgctggccttcgcctgccgcagcgtggacagcacggccatcactctggcggatgaaaacggcctgaccttcctcggcctcatcgccatgatggacccgccccgggaggaatccaaggcggcagtagcggagtgcatccgcgccggcatccgccccattatgatcaccggcgaccataagatcacggcggcggccatcgcccgtgagatcggcattttgcgggacggcacggaggccgtggagggcgcggtcatcgacggcatgagcgacgaggaattgcaggactttgtaccgaaggtcagcgtttacgcccgtgtgtccccggagcataagatccgcatcgtccgggcgtggcagcagcggggcaatctggtagccatgaccggcgacggtgtcaatgacgcccccgctctcaagcaggcggacatcggcgttgccatgggcatcacgggaacggaggtggccaaggatgccgccggtatggtgctggcggacgataacttcgccaccatcgtgaaagccgtgaagaatggccggaacgtgtatgcaaacatcaagcgggccattcagtttctgctctctggcaatacggcgggcattttaacggtgctctacgcctctctgatgggactgcccgtgccctttgcggcagtgcacctgctgttcatcaacctgctgacggactctctgcccgccatcgcccttggcttggagcctcacaccgacgaggtcatgtcggaaaagccccggccccggaacgaaggcatcctgaccaagcccttcctgttcagcgtgggtgttgaaggactggtcatcgccgccgccaccgtcacggccttctatctggggctgaacgccggcggcgccgctgctgggcagaccatggccttcgccaccctgtgcctgagccggctgttccacggctttagctgcaaatcccagcatccggtgctgctgacccgccacttctggaacaaccgtgccctgttgggcgcctttgccatcggcgcgctgctgttggggctggtgctgctggttcccgcgctggaaccgctgttcgccgtggcccccctgtccattgggatggtgggcgccattgtgggacttgccttcggctccatggtggtcatccagcttttgaagctgctgcggcggtaaggcgcaggcattgtgcggtaaacagaatcatgccgaaaaatttaccgtttcttgatggaaatccgattccttgcatgatacagtaaaagaagatggaatattaacaagaagggcaggaggaacaacatggagacttccatcaattttaacgagaaaaaaggcttcatctgcgatatggacggcgtcatctaccacggcaaccgcattctgccgggggtggcggagttcattcagtggctgcatgatgaggacaaggaatatctctttcttaccaacaacagcggctatacgccccgggagctgaaccagaagctggcccgcatgggccttgatgtgccggaggagcacttctataccagcgcgctggccaccgccgccttcctgcgggagcaggcaccgggctgctccgtgttcgccatcggcgaggcgggactgctcaacgccctctatgacgcaggcatcaccatgaacgatgtgaaccccgactatgtggtggtaggcgaggggcgcagctattcgcttgacaccctcacgaaagccacaaatctggtgatgcagggggccaagctcatcggtgccaactccgatgtctccggccccattgaaaacggcatcgcccctgcctgccgtgccctcatcgcacctattgagatggcaacgggcaagcaggcctacttctgcggcaagcccaacccgctgatgatgcggacagggctgaaaaagctgaactgccactccggcgaggcggtgatggtgggcgaccgcatggataccgacgtgatctccggcatggagagtggtatgtccacggtgttggtgctctccggcgtttccacgcgggagaccctcaagacctacgcttaccgccccagcatcgtgctggacggcgtgggcgatatcgccgccatggcccgcagagagaaggcataaactgcacaactcaccgtgccaggcgtaaatctgcaaagtggatgcagaaaagggaggacgttttcgtcctcccttatttttgcgacgcaaaagcatagtataataagaaatgtgccatttcctcgccccctgcggggcaaccggaaataatgcacgagaacttcatgcactggcatttgtgcatgttcgtgatgcgttgctcataaataaagttttatgcctatgttcacgctgcccgcaagtcaggtgaagattcagacatcattccgactgatcccagtagggataatccgtaaatacgaacttgcctgccgcgttttttccagtcggcagctccacatagactgtgctgccgttcgacggcatgctgacacccatcaccaccgtgaatttcccgtcaccgtcatcccggacgtgatccgcccagctgttgtaggaggtcttgcccttgtttttcctgtacgatgcatagacgttgccgttatattcaagcagatctttgctcgcaatggcggcattcagggtcttatccgtaaattcctcggaaaagaccgctaagaatttttctcgaacctgttcaatggtgtagacgccgttccgggcggggaacatgggcaggtacttccgcccctgaatttggacgggactcatgccctcggaatactccccggcgaaggtgaggcgcagccaaagactttgggcctgctccgacagctcccacgcttcctcttcgtacagaatcgagccgtcctccgggtaaaattcatacccgttcacacctcggagactttcgataatgacggcttacattaccggaaaccgtgttgtcccagtattccgagcgaataaaatgctctaaatggacgccggtctccgttttatagccctcgtagacatagctctgcgcggacataccgctttccgacagggaaaaatgctggaactccataggcgcacctccgtggtcggcaaaatcaccgggatcgtcggaagcgccgttccgtttggagaaacacgcggaaaaaatcagaggaaagatgcagagaagcgcgagacagatcagcagctttttcaaattacatttcctcctccttttgcggaatcacgacgagactgacttcggtcatggtaaaattctacaattatagtgcaccatcttccttgcggaatgagatgatccgatttgtgtggtcgatccaaatcacgcagatttcctgcgggcggcggtcttctttcatcggcggttctccatgatataattttagataaaacggcttgccgcctgttgatgagcaggcggcaagccgcatggctgcttcagcagcctcgcatccggcgcacaacagcgcgccgaagctgtttattcgacgatgacagaggtgccggaaacgatcttcttgggctccttcttggggatcaggacggtcagcacaccggattcatacttggccttcacatcctcggccttcacatcacccacataaaagctgcgggagcatgcaccggcatagcgctcctgacgcagaacgcggcccttcttgtcctcttcgtccttgtccagacccttctgggcgctgacggtcagatagccgtccttcacatccacatggatctcatccttctggaagccgggcagctccaccgcgaagcggtaagccttggcgtcatccgtttcatggatgtcggtcttcatcaggtttctctcgtgcttgccaaacagggggctgtgaccgccgaagaaactgttgtcaaagaaatcgtcaaacatgttttcaccatagatgctgggtaccataataattcctccattcgagatgaaattacaaaattgaatcgcggaaacagggcggcacgttctgatcgcacaagcaaacgctgcctgcggcgatcttcggcccatcggctgccatgctcggaatgtgcatcagttactgcacatcaccctggctgcttcctttttccctctttctgctgtatagtttatcttttttccttgcaaaaacaagaaactgtgggtacaataaaaaaagagatgcttgtgctgaaagcacaagtggaaaggggctgagggcgatgggagacgcacagtgggaaaactgcggcgctgagacgctgctggaggaattcttcgcacaggatgatctcagacaactggcggaaagcgcaggcaagattctggactgtccgctgctggtgctggacgatacctttcatgtggcggcataccgactgccgcagggattctccgatgagctttttcaaaacgttgtgagctgcggcgagatcacctatgaagctggtgtgcttatcagcagaagcccggccctttcggaagggcgggcggactttctacaactgccgggcagtccgtatccccggcgatttgcactccttgtcagcgcgggggtccagcttggctgcctcatctgcgtggacacggacggacatctggaaaaaattcccgctcagacatgggaactggtggagcgtatcctcgccaagcagctgtttgtggaggccggccggcaggacaagccctttgagaccgcagaggacatactcatgcatttgctggacggcggcttttcctctgctgcgtattttcagcttcaggccgccaatacctaccttgcggacttccacccgcggaccttcgcattggtggacctgacggcctatcgcagcgtttacgccgggaagcgccggttgaaggaggcgctggaggcgcggcttccggatagccacccctttctgtacaagggcgatgtgttcctgttcctgcacgaggacgagggtgctcaggcgttcgatgctctggcggaggaattccacctcaaggtcctcatctccgagccgctggacgagcttttcgacctgcccaagctttaccccaccgcgcgggaagcgctggagctgatgcgggatgagcgttttcacggggaacgggtctgctctgcggcgcagctccgcatacctctgctgctgaaaaatctggaggggcgcggcggtctgatctccatagaactgcgccgcttggccgcccatgaccgggaaaagaacacgcaatactgcgaaacgctctactattacctgatttgctgtcgctctctgaaaaagacctgcgacgcgctctacacccaccgcaacacggtgctttaccgcatccgcagattgcaggaggatttcgacattcctttggaggacccgtccctccatgccgacctgctgctgggcgtatccctcatcctgtttgaaaccaagggaccggatttcttcctgcataccccgaaaaatgaggcataaagccgtacatttaggcgaagattcaaaaagaaacggatgatatttatgaaagaaaacagaaagctattgagagaagttctgaaggatatccgccatgacatgacggacgaggaagtgctgaacctgctggcggacagcaaaatttccgaaaatcccgcgggcgaaaaggaaaaatacaccctcggtcagcgggcggcggacgccatcgcgaaatttgcggggagttgggcattcattttttccttcaccggcgtgctgatcctctggatggtggtcaacacactgctggcggcaaaggccttcgatccctttccctttattttgctgaatctggtgctctcctgcgtggcggccattcaggcgccgctcattatgatgagccagaaccggcaggaggaaaaggaccgccgccgtgccgagaacgattacaaggtgaatctcaaaacggaaattatgatcgaggatctctacgataaagtaaacgccatccttgccaggcagtccgccctggaaaagcatctggcagggcaggagaagggaacaccgaaagcggacggtgaaaaataaacgtgctttgaggcgtgtaccttttttgtaaattcaagcatgattttagaaggatcaacaaaaaacgggatatccaacaggatgtcccggtttttgcttcaggtgcctgcttgctgttccttggatttgctggagaccgtgcgatcacggtcagcttgaatatgatggattttatttagtactattattttgcgatagacacaatatcttgtgcttcggcagttgacagaacgtgcccgccattatatacttaaactctaagagacgatcagcgggagggggagatgcgtatgcggatcggcggactgcaaaaggtaacgctgctggactaccccggcaaagtggcctgcacggtgtttttgcccggctgcaatctgcgctgccccttctgccacaatcccgctttggtcctgccggaccgagagaccgacagcctttccactgaggaactgcttgcctttttggagacccgccggggaaagctggacggcgtctgcgtcaccggtggggagccgaccttgtacgaggaccttccggcgctgctgcggcagatccgggggctgggctttgccgtgaagctggataccaacggcaccaaccccgacatgctggaagcgctggcgcaggaggggctgctggactatgctgccatggacatcaagaacagcccggaccgctatgcggagacctgcggcggcgtggatcttctgggaccggtgaagcggagtgccgcactgctgatggcgggcgccgtggactatgagttccgcaccaccgtctgcgcaccgctgcacacaccggaggagatggccgggatcggccgttggctcaagggtgcgaagcgctatttccttcaaccctttgtggactccggcgaactggtgggcagcggcatgaagcccctgacaaaagaagagatcgaagcgctgcgggacagcgttttgcctgatattcccagcacacagatccgtggacaatagagaaaaggagaagaggaccatgtatcaagtcatcaagcgggacggccatgttgccgaattcagtctcaaccgtatctccagtgccattatgaaagcctttgacgccacccatattccctatgccccggatgtgatcgacctgctttccttgcaggtcacggcggattatgccgataagatccgggatggccggatcgatgtggagaccattcaggacagcgtggaggccgttcttcagcgtgccggctacgcggaagtggccaaggcctacattctctaccgcaagaaccgggaaaagctgcggaacatgagctccaccattctggactacaaaaagctggtggacgactatctgcgggtgtccgactggcgggtaaaggaaaactccaccgtcacctactccgtgggcggattgatcctgtccaactccggcgccatcacagctaattactggctcagcgagatttatgacgaggagatcggcagcgcccaccgcaacgcggacctccatatccatgatctgtctatgctcaccggttactgcgccggttggagcctgaagcagctcattcaggaagggttagggggtgtgacggggaagatcaccagcgccccggccaagcacctggctactttatgcaaccagatggtgaatttcctgggcattatgcagaacgagtgggcgggtgcgcaggcattttccagctttgatacctatcttgccccctttgtccggatggataagctcggctacaatgaagtcaagcactgcgtcgagagctttgtctatggcgtcaacacccccagccgctggggcacacaggccccgttctcaaacatcactctggactggaccgtacccgccgatctggccggtcagccttgtatcgtgggcggcaagcccatgagttttacctatggcgactgccagccggagatggacatgatcaacaaggcattcatcgaggtcatgatcgaaggcgacgccaacggccgcggcttccagtatcccatccccacctattccatcaccaaggactttgactggtccgagacggagaacaaccggctgctctttgagatgaccgccaaatacggcacgccttacttctccaactacatcaactccgacatggagcccagcgacgtgcgcagcatgtgctgccgcctgcgcctggacctccgggaactgcggaaaaagagcggcggcttcttcggcagcggcgagtccaccggctccgtgggcgttgtgaccatcaatctaccccgtattgcatatcttgccaaggatgaagcggatttcttcgcccggctggatcacatgatggatattgccgcccgcagtctgaagatcaaacgcaccaccatcgggcggctgatggaggaggggctgtacccctacaccaaacgctatctcggcagcttcgacaatcacttttccaccatcggcctcgtcggcatgaatgaggcgggcctgaacgccaactggctccgcaaggacctcacccatgaggagacgcaggactttgccgttcgggtgctgaagcacatgcgggagcggctgagcgattatcaggagcagtatggcgacctctacaatctggaggccacccctgccgagtccacctcctatcgcctcgccaagcacgataaggcacagtaccccaatatcatcaccgcacacgagggcgggacgccctactacaccaattccagccacctgcctgtgggctacacggaggacgtgttcgccgcgttggacgtacaggacaagctccagaccctctataccagcggcacggtgttccacactttcctgggcgaaaagctgcccgattggcgggcagcggcggcgctggtccgcaagattgcggagaactacgaactgccgtactatacgctgtctcccacctattccgtctgcgccgaccatggctatctggccggagagcagttcacctgtcccatctgcggacggaaaacggaggtttacagccgcatcaccggctactaccgcccggtgcagaactggaacgacggcaagagtcaggagtatcaggacagaaaaacctatcaggtgagcggtgcggcgcagccccatgcagccgctccggcggaagaagtgagagagaccgcgcccgtttcggggaaagcagaccgttatacgctctttgtcacggccacctgccccaactgccgggcggtgaagccgctgctgcaaaaggcgggcgttccctatgaggaaaaggatgccgcacagtatgcggaggaggcaaaggctcttggtctgcggcaggcccccacgctggtggcttggggggaggttcccaccctctacgtgggtgcagcccagatcaaggcgttcctccgggagtatgcccaatgatcgagcttgctgtgatcggcggtggtcccgccggactgacggccgccctgtatgccgcacgggcaggacgctccgttgccgtattcgagggcagcggcttcggcgggcagatcaccctctcgccgctggtggagaattatccaggccttggcgcggtcagcggcatggaactgggggaccggatgtatgcccaggcggaagcggccggggcggagctgaccttcagcggggtacagaggatcgaacgaaacacgggcggcacgttccttttggaaacggaggacgggcctgtgtcggcccgggcggtgatctttgccgccggagcgaagccccggacgctgggtctgcccggtgaagaagcattggtaggccgcggcgtcagctattgcgccctgtgcgatggcccgtttttcgacggacaggacgtagcagtggccggcggcggcaacaccgcctttgaggatgctctgtttctggccgaacgctgccgcagcgtgacactgatccaccggagaaaaaccttccgggcggagcaggcactggtggagcaggcggcccaacggaaaaatcttaccatcctgacggatacggtcatcaccgatctccacgccgataacggagagctggaacaccttttgttgaaaaatgccgacggacgggagacgcggctcccggtcagcgggctgttcgtggcctttggccgcgttcccgatacggaaatggccgcggcactggcggaacgggatcaagaggggtatctcctgaccaatgaccggatggaaacggccgcaccgggcttttttgcggcaggcgactgtcggcacaagcaggtacggcagctgaccacggcggtttcggacggcaccttggctgcggtctccgcctgccggtggctggcggaacagtgacgcgcaccggatcatcccaacaatcaaagcaaagagaggatacgcttatgaacgatgaacgctactccattatttattccagcagaacggggaataccaagctgctggctgaggcgatccgggagagccttccggcggatctgtgcaatcatttcggcacggacgaagccggtgcggtcgaatccgaaaagctgtatgttggcttctggacggataaggggactgcggatgaagcggcgcttgcgcttttgaagcgcctgaaaaacaagaagattttcctgttcggtacggcgggcttcggcgaaagcgaggcgtattttcaaaaggtgctggatcgggtaaaggagagcatcgatgagagcaattcgatcatcggcacttatatgtgccagggcaaaatgcccatggcggtccgggagcggtatgaaaaaatgaagcagcagcccaacccggctcccaatctggacggactgatccggaactttgaccgcgccctcgtccatccggatgaccatgaccttgaagaattgaaacaggctgtgcggagaggggaggacagttgatatgagatggttctatgagcttacgtggctgtggaaggggctgggaatttccctgctggcagccgcagcctgtatggcgtgtgtctggctggtgtgcagagccgccggaaagcggcttcggaccggcatcgcggttttggccgctgccgcgggctttgcggccgccgttgtggtgatcctcctcctcgcccagactccaaccccgatttaaaagaaccctccgtcgcccgtaaacggggacgggcagcgggaatacgataaggtaaaataagttgcgcaa

SEQ ID NO: 12134 - DNA, 55456 bp, Unknown
  gut microbiota DNA sequence
ttggaaaaatccacgccgctgtacccatcatcaataaagaacgtcgggttcggaaagtgctgagattttgcatactccattaacatgatctgctgatgctggatggagttcgacgggtcatccttaccgcctttttctttggtgtcctctacggacagtctgcaataaagcgctgtgattttgtcggttgcccttaacatattgttgtcctccttcggtggggcaactgcctgaacaggattggattcttgatttatatcaagagaaacgtcgttactcatcggcgtcctccgtgataccgtttttatcatcggcggcgttctgttccataatgcgtctgagcttcttgtcgagggtttccgttccctcatagctgccggttacggtgtattccgtgccgccgtgttcctccacaattttaacatcgggcaaccaaaaggcggacggatttttcaccacgatgttgcctttttcatcgaaagaaaactccctctttggggcatcgtcggggcgcggcttgaccttggcatacgggtcaggattggagaaataaaacgagcggatttcaccgtcctcctcgccgttatcaaaatcatcgtcggcgaaaatctgatccagttcctcgtcggtcagttcgatgatctcattgtcattttctttcggattcacttcgtcaagcctccttcgcttcgattcatttcattcaaaattatagtcggagtagcaaaacggacgaacgccgccaatggttaagatgaacggctgcgccgccattgacttccgtccgtttcgctttttggcagacaaggcggcggttgccgccgatttccatttgggaaatggcgcttgctaacatgggaaacggagaatagcaagcacagcaagtgtatgtacacttgcgaaaaccggcgtggtacgaccgggattttcttgcagaatagcaagcaaatccggtgagtacccacaccggagcttgccattccggcaagcaatgcacggcggtacccacttctcattacctgccaactgcgaaatgcacttggcaagcaatgctcgtgtttatacacccgtgcaatcttgttggggaaatacccccaaacccctgaacgatttcagagaaatcggctgcgctcctgcggagctgaattactccgttgatagttcttctttttggggcaataagaaaactgagtgcttaatagctagtgccaatttataagcgagtaatggaggaacggcatttcctacttgggtaaattgtcgtgcatttgccccggtaaaaatataatcgtcagggaaagtttgcagtcttgcacattcgcgtaccgatagcgtccgtggtacaaacggatgcaagtgagagcgcccgccgccttttgttccgccagcaattacagttttagatggtagccgaggatccaatctgtctactcttcctagtttatctcgaccgccatacggtaatttcatatatctacagatagactcggcagtatgctttcgtgtaacatgattttttgcgttttctgttgaacgtaagaataccgaaccgcatggcgtaactgtagccgtcggctctggtagaataatatttgtattttttcttgttcctgcaacaatccatctcatgcgattctgtggtacaccatagtttgcagcattcaatacccggggttcggtaatcgtatatccatctgacgctaaatcatctagtgctttttttatccgaccatcattatcgcattccataattcctgcaacgttttcaataagaaaagcaacgggacggaatttttcaatgaaccaaatatagtcaaaaatcaaagtacctttttcttcgtcatcaaatcctttgcgtttgaaattattgtcatctttgctaaatcgttgattagcagcaatactaaatgactggcaagggggaccgccatgaaatacaccaggaaagttttctgtaattccatgttcaatgaggattcttgcaagttcctctcttttgcttatgtcgccagaatattgtggaggaccgataacaattttgttgggattattagctcgtaaggtgttacaaaatatctcgttaaactcaatggatattatattctcaaatcctgcatagctaaagcctacatcaaatccccctgcaccggaaaagaaactgacagcaggaatattgtcagaacatttttcaatcgaatcaagtgtttcaatcggagaaagacattcttgcggcaggtcgcaatactcttcgtaccttaacgcatcatatgagatgccttttttttctaataattctggtaaatctccttttgttatttttgctttttgcaaaattgcgttttgctcagaaagctccattttattgacaggttcattcatcatgcaatctccttggttgcttgtacaaaaacatcatgtgcttcttgcttggatttgaagtcagcttgctcatttgctctcagccactttcgataatacatatgtactgcccggtgacaagagggacacaatcccacaatatctgccaacgatgtgccgctggacgaaatcgcgacggcagaggatagcggtaataagtgatgaatatccagcatatagtctgtccacgggtatcgtttgctcatatctgcaccacaagcacaacaaacaggatttggattaactttcttatagtattttttcagcaaaccactacgctcaacacggaaatgttccacacgcttacgattgccttcgataaattctatatcggaaggctcagatgtaaacacctcgaaagtaggaacaacaattttgtcgctaagagaggtcatttccaaaaattcttccattctgtctgcttttgcaaatctgttttcaggtctcaaaaagttgttgagcatttcatcctttgcgccatcactaatttcatcaagatacaagaatccgtcatacacttttagaacacttaactggctaataaagataaccatttcacgaagttgacgccgttcagtatcagtgtagttgtatgtcacaggaataagcgatttataatgcccaagatcctcaaaacctgtgcaattatttcctataatgtatttgaaaatatcatctaacgataatttggcttcaacgcccaattctcttcgagcaattaaaaacttcagaatagcgcaaaagggatacacacgctgttcggtagcgttatatttatcgaaggcaggaaatgggaaacgaaacttactaacataattgaacaaataatcatccgcgcttttaatctctccatctgcattagctaaatcgcggcaaatatcagttactaccagttggtttcccataaattttgctaaaaacgaacattgaaaaactctggaataattacgcttgactgtgtaataatctggcaagaatggcatacctgtttcagttacaagtgtttggcgaaacaaattctcacattttgaaatatctgcattatcgaatttcaccaaagtttttgcaatatctctaagtacgtcgaattgaaaatataaaagccgtccttgatcccaacgccacattgtcttacctccgttttattgttcttcgcgggaaaaactcattatgtcaccaatatcacactttagcgcagtgcaaatcctattcatacattccatggaaacgtattcatcttttccgagcttcgctacggttgttgtgcttattccagcaagatctcgtaaatctgtgcgtttaagttttcgatcaatcaatattttccacagtttgttataattggcagccatatattcgcctcctatgcgtttaagacattataccataaaattttcaagaaaatcaagcgcgtgcaaaaaaaatatttgataacgcaaatatttttgctttacgccaaacacatactaaaatgtatttctgcggcaattacacggatatgtgtggtcagatatgtccgtttttacacaagatggcacaggagagaaaatgatcaattttcgacccttagatgtacaaaaacaggcagcacccaaccgaagttgagtgccgcctgttttgttgtccaatcctgcttggcagatgccgattttgtagttttctcaaattactgtcttatcggcacacggcaaagccgctcctttttgatttggcgtgaaatagtcacagccggtcttctttcgtttccgcgtaccagagattataggtctggcggtagatgttcgcggcatcctccgtgtggcagaccatccgcacccggcagggatggtcatgggtccgaagatcctccatgatggctttcagcgccacggaagccgcctgcgccatgggatagccgtaaaccccggtggagatggaggggaagtccacggaatcaatgcggtgctctcgggcaagctccagacagctgcggtagcaggcggccagcgccgccgcctcgccatgcccgccgccctgccagatggggcctacggtgtgaatgacataccgggcctttaaccgatacccctgtgtcagcttggctcggcccgtctcgcagccgtggagagtacggcattccgctaacagctccggtccggcggcagcgtgaatggcgccgtccacgccgctgcctcccagcagagtgcggttggcggcgttgacgatggcttccgcgtcggacgcggtaatgtctcctgtgacaatggcaaaacggtccatataagcacctcccggatgtagagaatcgtgaatggtataaaatcagcatagactgtctgaaataaaaaagcaagagactgtcaataaaatggtaaattctctgcgatgggaaggtagggcagccgttagcggctttgccgctctacggatgccgcataccccttgcgggtgaagggtgtgcgcggaaaacccaagaaggggaaacaggcgaagtgccgccaatggagatttccgcgacggaaagaaagggtgtgtgcgggaaacccaagaggggtgtcccgcaccattgaaatcaaatattttcagaacttttacaagttctgaaaataagggcaacgggaagaaaagattttttcgacccgttgcgcccccggtttccgggcgcaaagcgcacggaaaccggctgggccgacggtgtattcctgctccacgcatggcgaaaagactttttcgacacgctgaaggcaagtgtaaactttttttgaactggtgaaaaatttcacgaattgggttgccgtcgaggcaaaaccacagtataataaatttggcatattaagaaatcgttaagaagcaggaggagacccgtgaacacgagccgctattatcagtatatttttccggggaccattgcgttttccgttgtgctgatgctcattggtctcagcatgggccatccggaacagctcctgtcggggctttggaagatcgtcaccatgcaggatcttctgatcacagactatatccatattgcgggccctgccgccgcttttgtcaatgcgggactggtgaccatcatttccattctcatcatcaagctggccaaggaccccttcaacggctttaccattgtggagatggggctgatggcgggcttctccctgtttggaaaaaatgtgttcaacatctggcccatcattttagggacatggctgtatgcccggtatcagaaggagccgttttccaagtatgcctccgtggccctgctggcgacggcgctggcaccgctggtgagctatatggcactgggcagcgtccacgccagcctgccgctgggcgtgttcaccggtattctggtgggctttttgctgccgtccctgtcagcttacacctataagatacaaaacggcatgaacctctacaacatgggctttgcctgcggtctgttcgccatgatggtggtgccgatcctgacggccttcggtgacaagccggactcggtgctctactggtccacgggtctcaattttgaactgagccttgcctgcggcgccctgtgcgttgtgtttatcctcatcggcaccttcggctgcggcgatcccgcatgggccgtgtgggccggataccggcgcctgctgagcaccacaggccgggcgcccaacgattatctgcgtatgttcggcgccgggccggtaatggtgaatatcggcatcaacggtctgatcggcattgcctatgtgctgttggtagggggcgacctcaacggccccactctgggcggtattttcaccatcatgggtttttccgccttcggcaagcatccccggaacatcattcccgtgatgttcggcgtgtggctgggggcctacggtatgcactacgaacccaattacccggcacttcagctggcgggcctgttcgggaccacgctggcccccgttgccggccactttggcccggtgtgcggcgtactggccgggttcatccactcggcgctggtgctgcagaccggcggcccggtggcgggattgaacctgtacaacaacggcttttccggcggtctcatcgccatcgtgctctatccgaccctgacggccattatccgccatcgccggccgaagctccgggatgcggattactatgacctctttgaggcggatcagcccatcaatatgtctaactggcatacccaccgccccacgcctgaggaaaaggccgcagaagcggctggccgcatgacggatgatctgccggagcgggagggcttccggcggatggagaaggatgggaagaaagagaacggggaggacttgccctttgggtaagtttgtggcataatatcctctgaaccattgagcttttgggtaaaaaggagcagaaaaaatgaccccaaagaaaattgccctgctgacggattccagcgccgacctgcgttgggatcaggccagggaaaacaatatcttttttgtcccgctgcggatcctgtgcgaggacggcgaatatctggacggcgtcaacatcaccggcccggatatttatcagcggcttcataacggcgagctgccccagacctccctgccccgtgtggaggacttcagcgcgaagctccgggagatctttgatctgggatatgacggcgtgatcgccgtcatgctgtccagcggcctgtccgggacctataatctggcccggatcctggcgggagaatgtgcggagcagggctatgccatgaaggtgtttgactctgtcagcggcgctttgggtcagggcatgacggtgctgcagctggctgaggacatcaaaaacggcatggactgggaagaactgacggagcgccgggctccgcagctcatcgccaacacctatcccttcttttctgtggatacgctggagtatctggtgaagggcggccggatcggcaaggtcacggctatggctggcaccatgctccagatcaagcctatcatcacctttgcaccggacgggcagctgcaatctgtggccaaggtccggggacggcatcaggtgatgcggaagctggtggatatggctgtggaccgctgcggcgaacacaagcgatacaatctggcggtggctcatggcggcgcaccggaggagatgaagaccgtgcggcagatgctgacagaggcactgcccaacagcgaccacctgtgggacggcgagatcgacggcaccctcagcgtctatatcggagacggcgtgctgggcgctgccgttcaggtgctggactgaccaaaaagcagaataccagaaacagacaccccgcctcggcggggtgtctttctatcatagacaaaatggcggaaaatgcttgcaaaacagaaaagactgtgatactcttaaaattagagaaatgtaacaaaggaggagcgctcatgctggatatttttgagatccttggaccaattatggtaggtccctccagttcccacacggcgggagctgtgcgcatcgggcggatggcccggacccttttgggagaaccgccggtgaaggcggacattggattgtacggttcctttgcggagaccggccggggccacggtacggaccgggcgctggtggcagggctgctgggtatgaagcccgatgatctgcggatcccggagagcttctccgtggcaaaggagcagggactgtcctttgtgttccatcccgccgagctgcgggaggctcaccccaacacggcagtgctgacggtggagggtgccagcggaaaaaagaccaaagtgcaggcagcgtccatcggcggcggccggatccgggtggatcagctggatggcgtggcggtggacttcaccggtatcttcaacaccctgatcgtccgtcacatggacgtgcccggcgagctggcgaccctgaccaaggtgctctctgacggcggtatcaacatcgccaatatgagcctggtacgtgaccgccggggcggcagcgttatgacgatttttgagatcgaccagccggtgcccgcggcggagttggagcagctgaagacagtaccacaggtgctcggcgtgatctattacgagaaggaggatgactgatatggccttgaattccatgcaggagatctttgaaaaggcggcttcccggtccatccccttctggcgggtggttctggaaaccgatatggaggagcggcaggtaacggaagagcagtccatggaaaaaatgcgggctgcctggcatgctatgctggaatctgccgtcagttatcagggcgaccagcgctcccgcagcggccttgtgggcggagacggtgcccagatgcggcgttacgccgcggcggatactacatacagcggcccctatgtgcaggaggtcattgctacggccctcagcgtaggcgagtccaacgcctgcatgcggaagatcgtggcggcaccaaccgcaggcgcctgcggtgtactgcctgcggtactggtgcctctgtaccagatgggccgcgccaccgaggaagagattttgcaggctctgtataccgcttccggcatcggcgcggtggtcagcttccgagcctgtatcgccggtgcttccggcggctgtcaggctgagatcggcacggcttccgctatggcggctggcgctctgacctccctgcggggcggcgatcctcagcagatcggccacgcggcggctatggccctgaaaaacctgatgggcctggtgtgcgacccggtggcgggtctggtggaggtcccctgcgtgaagcggaatgtggtgggctctgtcaacgccgtcagctgcgcggatatggcgctggccggcgtggaaagccggatccctgtggacgaggtcatcgactgcatgggtgaggtaggccgccggatgcccatggagatgcgggagaccgctttgggcggtctggctgccacgcctaccggcaaggccgtcaaggagcgtatggagcagcaggactgacctgaattgaatcaaaaaagcgttgggaacaatatgttcccaacgctttttttgatagttgcgattttatttgtcgagtatgtggacgttgaggtgatcgtaggtcatttcaacattgtgcttggcgaaggtgtcccgcagcttctcattgatggagtggtaggcgggccagtagttctccacggtgcaccagcaataaatggtgtattcaatggaacttgctccatagttggtgagatacaccgccggagccgggtctggcagaatgttggcggtggcttccacggcctccatacaagcggtcatgacggtttccgtaggcgcgtcataggaggcagtgacggtccggacgatccggcgtcggcccagaacggtataattgatgatcttggaggaggagaggtccttgttgggcatcaggatcatctgaccgttggcggtctccagcttcgtgtggttcagaccgatttcgcggacagtaccggaggtgccgccggcttcgatgaagtcccccagagcgaaggggtgggaggagaggatcaccagccccccagccacgttgcctaaaatgtcctccgctgcaagagtgatgcccagggtcaggacggacaacagcgccgtcagggaggaggtgttgatgcccagcgcttccgcggtgatgatgaccgtcagcacatagaggagcacctttacgctggtgcgaatgaccttttgcagccgctcattgaccttctgcatccggctcagcagccgggtgaccaccttcataatgagccgcacggcgatgaggcagaccagcagtgtcaccagagcggagaggatcttgctgagactgtatccccctacggcggtgttcagaatttgcttaatattcatgcaatcgtatctccgttaccgtccggccttccggtcggcctcaatgagccgcttcagaccctccacggccacctttacggaggcagaggtgtcctcgctcattttctggtccagacctgcggcctcccgctcctgattccagatcacatggaagcagcttccgcagcggcagcccagcgcggcagcctccacgaacaacgcggcggattccatctcgctggccttgacgcccagccgcttccagctctcccacttggccttcagctcatagctgacgggggaggcgtcagggctgtgctggccgtaaaagctgtccttgcactggaccacgccgatgtggaggggataacccatcgccttggtagcgtctaccaatgcgttggtgatctcccagtccgccacggcggggaattcgatgggggcgtattccagactggtgtgctcgaagcggatggcgccggtggccaccacaatgtcgccggactgcacgttcaggtcgatgccgccgcaggtgccggtgcggataaaggtgtccgcgccgcacttgtgcagctcctccatggcgatagcggcggaggggccgccgatgccggtggagcaggcggtgaccttttcacccagcagcgtgccggtccagacgttgaactcccggttgtaggccacctgatgcgcgtcatcaaacagggcggcgatggcgggcacccggcccggatctccggggaggatgcaataccggcctacgtcgccggggacgcagtgaatatgaaattgcttttccagtttctgcatgacattcacgttcctttcacgcggccaatccgaccggctgataacctttcgtataacagatagtataacagataaaagtctgatttgtaaagcctcggcaaaaggacgggagaggaaggcggttctcgccgctgacttgtctaaaatttggcaattatgccgaatcaattccttgcgtgattcttaacttgagtttagtgactaaaaaatatataataatggtggctttgtaggtgcaaaatgacgaagacaggaagaagcgaaggaaaggtgtgaaaccgacgatgttggatcagagttattacgaaattgccaacgaaattatcagccggtaccctctggaggaaaaatccctgatccccattattcaggacatccaggcgacctaccggtatctcccgccggatcttttggactatgtggccaaaaagatcggcattacagagaccaaggcttacagcgtggccagcttctatgagaacttctcctttgaacagaagggaaagtatgtgctcaagatctgcgacggaacggcttgccatgtccgcaaatccacgccggtgctgcagtacctgcgtcaggaactgggactcagtgagaccaagcagaccaccgatgacctgatgttcacggtggaagtggtgtcctgcctgggcgcctgcggtctggccccggccatgatggtcaacgagcaggtccatcccaaaatgacgccggaaaaggcggcggagctgctcaaggagcttcgggccaaggaagaggaggggcggaacgatgatcagaattgaaaaccggttccagctcaagcaggtccgggcggaatgccaggctgagactaagcaggaaaagtgccgggtgctgatctgcggcggcacgggctgtctggccggcggctccgccaagctctatgagcacatgaaggagttggctgcggagcatgaaaacgttcaggtggagatcggcccggagatcgcccatatcggcgtccacaagagcggctgccacggcttctgcgaaatgggccccctgatgcggatcgagccttacggctatctctacttaaaggtgcaggagagcgactgcggcgagatctttgaaaaaacggtcctccggggtcagccggtggagcggctgatgttccgtcaggataacaaggtctatccctctgaggaggagatccccttctacgccaagcagacccgcctggtgctgaagaactgcggccatatcgacgcggagcgcattgaggcggccattgctgccggcgcttacgagggccttgaaaaagccctctttgaaatgacgcccaaggccgtcattcaggctattaccgactccaagctccggggccgcggcggcgcgggcttccccgccggcaaaaaatggagccaggtggccgctcagaaggagaccgtccgctatgtggtctgcaacggcgatgagggcgaccccggcgcgtttatggaccgcagtatcatggagggcgatccccaccggatgatcgagggtatgctgatcgcggcctatgccgtaggcgcgcaggagggctatatctatgtccgcgcggagtatcctctggctattgagcgcctgaagctggccattgcgcaggcagaggaagccggatttctgggtgacaacattctgggtacggacttctgctgccgtctgcatatcaaccggggcgccggcgcctttgtctgcggcgagggcagcgcattgaccgcctccatcgagggcaagcggggtatgccccgcgtcaagccgccccgcactgtggagcacggcctgtgggagaagcccacggtcctcaacaacgtggagacctacgccaacgttcccatgatcattcagcggggcgcggagtggtaccgggggatcggcacgccggaaagccccggtaccaaggcgttcgcccttaccggcaacgtgtgcaacaccggtctgatcgaggtccccatgggcacgcctctgcgtgatatcgtgtttgacgtgggcggcggcatccccaacggaaagaagttcaaggccgtccagatcggcggcccctccggcggctgcctgtccgaaaaggatctggaccgccacatggactttgactccctcaccaagatcggcgccatgatcggctccggcggcatggtggtcatggacgaggacacctgcatggtggaggtggcccggttcttcatgagcttcactcagcgtgaaagctgcggcaagtgcgttccctgccgggagggcactcagcggatgctggagatcctggagcgcatcgtggccggtcagggcaccatggaggatctggataccctccgggatctggcggatatgatcgagaataccgccctgtgcggcctgggcaagagcgcgcccaagccggtcatcagcaccctcaacgccttccgggacgagtatgtggcccacattcgggaccgccgctgtcccgccggcgtctgctccaaacttcgggtgtacagcatcgaccccgccaagtgcaagggctgctccaagtgcgcccggaactgcccggcgtcggccattcacggtacgctgaaatcgccgtacaccattgatcaggacgcctgcatccgctgcggaagctgcgtggagcagtgtgccttcggcgcgatcaccgtagagaagtaaggaggatgctgctatgggatttatgaccattgacggtcagcgggtggaatttaccaacgaacccaatgttctgaccgtgatccgcaatgcggagatcgatataccgaccctttgttaccattccgaactgtccatttacggtgcctgccgtctgtgcaccgtagaggatgaccggggcaagacctttgcctcctgtgcggagccgccccgggacggcatggtgatctacaccaacaccccccggctcatgcgttaccgccggacgatcctggagctgctgctggcggcccacgaccgggactgcaccacctgcgtgaagagcggcgagtgccatctgctggagctggctcaccgcatgggcgtggaccggatccgcttcaagaaccgggaagccaagtaccccatcgacgaaagctctcccgccatcgtccgcaaccccaataagtgcatcctctgcggcgactgcgtccgtatgtgcgacaacgtccagtccgtgaacgccatcgactttgcctaccgcggcaccagcacgctggtgaccccggccttcaacaagaccatcgctcagaccaactgcgtcaactgcggccagtgccgggtggtgtgtcccaccggcgcgatcagcatcaagaccaacatcgatgaggtctgggacgcgctggcggatcccaacaccattgtggtggcgcaggtggctccggcggtccgtgtggcgctgggcgacaagttcggcatccccaagggtgaaaacgtcatgggcaagctggtcaatgccctgcaccgactgggcttccatgaggtctatgacactacctacggcgcggacctcaccgtgatcgaggaggcggaggagctgctggagcggatctccagcggcgccaagggtcccctgttcacctcctgctgccctgcctgggtcaagttctgcgagacccggtatccggagctggcggacaatatttccacctgccgctctccccagcagatgttcggcgcggtgatccgggaatactaccgcaatcctgagatcaatcagggcaagaagctggtgtcggtgtccatcatgccctgcaccgccaagaaggaggagatcctccgcccggaatccatgaccaatggccgacaggacgtggactatgtgttgaccaccaccgaggtggcctccatgatccgcaagtccggtatccgctttgagaatatcgacggcgagtccaccgatatgccctttggtatcggttccggcggcggcgtcatcttcggcgtcaccggcggcgtgacggaggcggtgctccgccgccttcagaccggccacagccgggtggaaatggaccgcatccgcaccagcggcgtccggggcgatgacggcttgaaggaactgacctttgactacatgggcaaggagatccgcgccgcagtggtcaacggtctgggcaatgccgacaagcttatcaagcgtatccagagcggcgaggtcagctatgacttcgtggaggtcatggcctgccgccgtggctgtatcatgggcggcggccagccggtcggcgccggtccccggacccggaaggcccgcgccaagggcctgtatgataccgacgtcaatatgcagatcaaaaagtccaacgagaatcccatggtccttgctctgtacgagggcctgctgaagggcaagacccatcagcttctgcaccgtaatctgggcgttaccgagaactgaatcacagaacagccgctgcggaaactccgcggcggctgttctctgcgtatggggagaggctctgagtgccctgaaaactgatgaaaaagctgcgaaaacctttctcaccgaggaagaaagaaatcaaaagccagcccctacgggctggcttttggcttattagaatgtccagcgggaaatgtccgtatcgatgctgtaagcgtcaacggtatccgacccggtgctgccggggaatatgagggtctggccgtcgctgtccagcgtcaggggaaaccaatcagggcagatgacctcccggccgtactcatcggtgagaacagccgctgattccagaatatccccggcggcaaaggggaaggagagaggctccagccgatagaaggtggcgttgtcaaagccctggtagctggtctgctcatcggcgctgataggctccgcccaggcgacaagccgctggtttttgaacaggcctacccgaatggaaacagccttcgtccgggggatcaggatattgtccagctgcgtgctgagcgtcaaggcatactccatggcgtccggcagggtcagcttgccgttttcaatctgcgcccggccttggagatccgcatccgcaagattggcaacgtccggcagggagccggaatacaggccggaatacgtttgcaggggctgggtctgccgggtgccgtccggcatgacgaataccgcggtgatggcgatgtcatccgtcagttcgcaggtcagctccgccgagaatttctcactgaccggctgcccgttctgatccggctcggacaggacggttttgctgttggcgttgtggccgttgtccgctgaaaattcaacgcgcataccctccacgtatgttttggggacggcgtagacggagaaggtcacggcgtttttggacagatcggcggataccagctccgttccatagtctgctgtcaaagcgttctgctgtttgaggatctcctccacctgaccggagatactgtatacctgattggacatactgcactccatctggttgatccggttgtaaacgccatcgaattgccgaccgattgtccgaatggaatcatagatattgtaggcggcacacaataccgccagcgctgccagcacatagggccatttcttccggggcttcggagccggcagggcggcgatgtaccgcgccgtgatctcctccaccattttcaactgggcatccgtcaattcgccgctgtccggggcagaggccgcctccggcgtttcttccacacctaacagccagcctacggtcacgccgaaccggcggctgagggccaccagcttgtcgatctccggcagggcggtatccgattcccacttgtatatggactgccgggaaacgcccagctccgcgcccagtgtctcttgggacaatccggcctcttttcgcttcagggcgatccgctggcctgtggtcatacgcgtcacatcctttcgtgggaacagtatcgctgaaagcgggccaaatcgccaccaacttcccggcgaaatttgtaaaccgtgggtttacacaggggttttacagctttttttcgtagagattcagggggcagtggacgtagcccatgaagaaggtgtccaccgtcccggcgaagcggtagccgatagtgggatagaggtggttggaaacggcgttgcccacgcctgtgtcgaaccgcatgacggtcttgccctgactgcgggcggtgtcttcagcaaaggccaccatctgccgggcaaggccctgccccgcccggtcaggatggatggtcagggtgtggataacggccacctgatcgtcctcggcggggatggaccagccgccgtttttgtattccggcagctggacgccgttgagattcatgctgccccagatcgcgccgtcctcgtccacgcctacatacagggtcccggcgttgaagatattccgggcggtgtcggcggtggggtaagcgccccgcttccagcctgtgtaatgcagaccggtggcgtcctcatggtctaaaatagcttcatagacggcggctacggcaggcaggtcagattccttggcaatacggatcatggtgtttcctctcttttctctcgttttcaaaaacaggcgtaccggacggtacgcctgtttggtggttattcggatctggagtcgttttcctgcttgggctcaggcttcccgtcagacggcgtttcgtcagagccgggcttgtccgcatcattcttctccccaccggcgggagcgtcctccggggcctcgatcttctcggagatcatgtggaccttccgggcggcaggctcgatgacctccggctgagaggggcggaagccgttctcatgggccagagtagaggcataggcgtcctccacagcggagggatcccggccctcgatgatggccaccatctccgcaccggtgatggtctccttctccagcagataggccaccaccttgtccatgtcctcccggttttcccggatgatgttcacagcgtcggcatagcacttgtccagaatatccttcacggccttgtccatagcggcggcggtgtcctgcgcgcagtccagaccgtagccgccgtccagatactggctgcggcgggaggccagagccatcatgccgaactggtcgctcatgccgaacatggcaaccatgttccgggccacgccggtggcctcctgaatgtcctgagaggcaccgttggtcatggtgttcatcaccacttcctcggcggcacggccgcccatggacacagcaatcttcgccatcagctcgtcccgggtccgcagctccgtcttatcctcctccggcatcagcaaggtgtaacccagcgcgccttgggtgtgggggacaatggtgatcttctgaacaggctccgtatttttctgcttgtaggccaccatggcgtgaccgacctcgtggtaggccaccagttttttctcaaattccgtcaggacgctgccctttttctccgtaccggcgatgaccagctcgaaagcggccagcaggtcctcctgaatcaccagcttgcggcccttccggacggcccggagagcggcctcattcacaaggttggcgagatccgcgcccacgcagccggcggtggccagcgccacctttttcaagttgacgtcctcggccagcttgatgttccgggtatggacctgaagggtggccagacggcccgccagattgggacggtcgatgatgatgcggcggtcgaaccggccgggccgcagaagggcctgatccagcacctcgggccggttggtggcggccagaaggatgatgcccttggtggggtcaaagccgtccatttcggcaagaagctggttcagggtctgctcccgctcatcattgccgccgaagcgcccggagtcacgggatttgccgatggtgtcgatctcatcgatgaatacgatacagggggctaccttggcggcctccttaaagaggtcacggacacgggacgcgcccacgcccacgaacatctccacaaagtcggagccggagatggagaagaagggcacattggcttcgccggccacggccttggccagcagcgttttgccggtgcccggagggcctaccagcaaagcacccttggggagcttggcaccgatgtcggtatatttcttgggattgtgcaggaagtcgatgatctccgtcagggattccttggcctcgtcctgaccggccacatcggcaaaggtgacgccggtctgcttttccatgtagaccttggcgttggccttgcccacgccgccgatcccgcccatgcctcccatgccgccctttttcgccatgatccgcatgacgagggagaacatgagcatgatgaacacaaagggcagaatgaagttgatggcgaacagaaggagcgggctcatctgaggctcgtacttcgtgtcatagtctgtttttccggcctcatgcatccgctccaccagagtgtcattagactccatctttacggtaaagagcttcagcgccgcagtatgctccttgccgtcggcgtcggtaaaagcgtaaacggccttgccgtcctgatccgtggacttggtgtaggcggtgccgttctcagcggtgtagacatagccgtccttggggacgatatacagcaggccctcggagaggtccacggtgacgtcctccacctgcttgccctccatcatggcgatgaaatcgctgtacttgatgttgatgttggaggcctgctttccggcggaccccatgtagctgctggtgcagtagaacaccagcgtcagcaccaacgcccaggccaccagcttgacagcgcccagcagattgcggttgccccgtcggtttttattgtttttatcgttctggtccattgagaactcctttcagagtgtgtgaaattaaaaagcagtatagcacaacctccttgaaaccacaaggaaaagagactgccttttcataaactttctgtaaattcagacgcgctaaggcggaacgatttttcaaattcatctttattgtggaccggttctgtgatatactgtaaaaagtataccctgcagattttgacaaattccgatcatgagaggatttcaatatgacagacgaaagaaaagaccagctgaccgccgaggccgacggcctcattgaaggccgcaacgcggtgatcgaagccctgcggacggaggccagcatcgacaaaattttcatccagaagggtgaggtggacaagaccctgggccacatcgcctccaaggcccgggcggcgggcatcgtggtggtggaggccgacaggcggaagctggacggcatgagccgcacccacgcccatcagggcgtcatcgctctggcagcggtgcgggagtacgtcagtgtagacgatattctggcagatgccgccgccaagaacgagccgcccctgatcgtggtgtgcgacgagatctccgacccccacaatctgggcgccatcatccggacggcttattgcgccggcgcccacggcgtcgttattcccaagcgccgcagcgcgggattgaccagcgtggtggccaagacctccgcgggcgcggtgtcccacatgaaggtggcccgtgtgcccaacatcccttctctgttgaaggacctgaaaaagcagggggtctgggtattcggcacggcggccaacggcaccaccggcctgtatgacgcggacctgaagggcgccgctgccatcgtcatcggcagcgagggggacggcatgacccgtctggctgccgaaaactgcgattttctggtgagcatccccatgaagggtgatctgaattccctgaacgccagcgcctcggcagcgatcctgctgtatgaggccgtgcgtcagcggatgaactgagaagtttggagagaacacggtgtcaaaggatgtcgagaaaacagaatacggcacaggcacctgggatacgccgccgtctgacgaggattacaccttagaggagattctggcggagtacggctccagccgccagcagaaaatcatggaagaggtggagcgtgagaccgctccggcagagccggatacgcccaaggcaccggctcctgcacagccttccgcccctaaaccgacagagacggccccatctccaacgcccaaatcggcaatggccctctgggaggaacggatcgctgcggcggcgctggaacaggacggggaggccccccttgccgacgattcggacccggaggaagaaccccggacagatgacggcccagagccggaggctacccgcttcctgagtctggaagaactggtagggacaacggtaggggccgtgatggaggagcaccacgaaacgctgctgaagccgaaatgggggctgttctcccggaagcggcaggaggaaacggagcagctctacgattccatggaagccccggaggaatcggtaaagcctcttaccgaggcagagagcatcggggaagaaccggagcttagcgaggtcgcgtctgaggagcgggaagcctataagagccgtcaccggtctctgggatttgccttttttacagcgctggtgcctatcgccgctatggcggcggagcagtacggcgtcacggtccccttctggaccggagaccggcagatccaaggcgttgtcatgctggcctgtctgctgatcgaattggtactgtgctggcacgtgccggtgtacgcgatccggaagctgagtgaaaaacgttgcgtcagcgcactgctggtatcgttggcggtgctggcggcggcggtggactgcgcgttgtggctatttgttccggggcggggagaagcgcttccctataccgctgcggcgggactggcgctgtgctttgcccagtggggcatcagccgggaaagccggggcagctatgatagcttccgtttggcatcgctggacgatcaccccccttacttggtcacggaaactccaaggggtgcctgcaagcagaggggagacctgcggggcttttacaccaccgccatgcgggatgattatgcctcccgtcttcagacggtgttcctgccggtgatttttatggccgcgctggtattcgcgggcctgatctctttgggacggggacacggaattgacttcctgcggaactggtccgtgatcctgacggcgggagccacctgttccctgccgctgtgctggagcctgccatggtcccggctgacccgccgacagcagaaaagcggctgtgccgtggcgggatgggatggcgcggcccgtgtaggaaagcgccggggcatgatcctgacggataccgacctgttcccgccggggaccatccggctcaacggtgtgaaggtctacggcgaggaactaggaaaggtgtcggcttatgcggcggcagccgcccgtgcggcgggctgcggcctggagcgggtctttgagggactggcggtgggggagaacgccccacgggaaacggctcaggacctgagcttttacgagcagggcggctttggctgcacgatccacggggaatccgtcctgttggggactgcctccttcctgcggaagcaggatgtgcgtctgcccagcagcatcaatctgaaaaccggcattttcctggccatcgatcatcagctggcggcggtgttcgccgtgaagtacgaggcgtcggaaaatgtggattacgcgctgcggaccctgcgccgcagccggatcacgccgatcctggcggtacgggaccccaacatcaccccggcgctgctgaagcggaaattctataagaagataaaagtggagtatccgcagctgacggaccgggtggccctcagcgaggcggaggaggaccggggcctgccccgggcactgctgctgcgggagggcctgctgccctacgccgaagcagtggtgggcagccgccgtctgcgaacggcggtgcgccgggcgacctggctgtccctggcgggcagcgccgccggcgttttgctgacggcgtatctggtgtctctggggaagttcgatttgctcacccccttgtccctgacggtgtttttgctgctgtggactctgccggtgctgctgatgagcgactggaccggccgatattgacacttgacagaataaagtaccgggaggcaggctttttccctgcctcccggtactttttcgcactgtccgggaccaaaagacttttttttaagaaaaatgatttttgcgggaccccacaaaaataagcgaccctttttgcctacccctccaaaatgtaagatctcacaaaattcttgttgtattgcccatgaaaaagcggtataattaacacattgagtgagtctcaatggttgacagatcttttatcggcccattcgggccgtgtcaacagcatcaacataaggagtggaacaaacatgagctattcagtacagaacatccgtaacgtctgcctgctgggtcacagcggcagcggtaagacttctctggcagagagcctgctgtttatgaccggcgccatcgaccgtatgggcagagtcgcggacggcaataccgtttgtgattatgatcccgaagaggtcaagcgtcagatctctctgtccaccgctgtggcgcctatcgactataagggctgccgcatcaacgtgctggatactccgggcgcattcgacttttccggcgaagtgatggaggccctccgggccgccgacgccgccatcatcgtggcctccgccaaggacggtgtgtccgtgggcgttgagaaggcgtggaagtattgcgaagagcggaatatgccccgctttatctatatctccaagatcgacgaggatcacagcgactataacgccacctttgatgcgctccgtgagcgcttcggcaacaagatcgctcccgttgtggtgcctacgctggacgaaaacaagaaagtcaccggcctcatggacatcctgaataagcgcgcctatgagatgcaggacggcaagcgtgtggagatcgagctgcctgaggataaggtggccgtcatcaacgagttcaacgatgcgctgaaggaatccgtggcggagaccagcgaggaattcatggagcgcttcttcaacggcgaggacttcacctacgccgagatggctcagggcctccgtcagggcgtccgtgagctgagcgtattccccgtgttgtgcggcagcgccgtggctgatatgggcactctgatgctgctggacaacatcatggagctgttgccctctcccgagcagggcaactatcataaggccactctggctgacggcaccaccgaggaattcgtggtgtccgccggtggcgtacccactgctttcgtgttcaagaccatttccgaccagtacggcaagtactccttcgtgaaggtcctctccggcagcatcacgccggatatgaccatggtcaatgcccgcaccggcgacaacgagaagctgggccgcctgtataccatgcgtggcaagaaggccaccgaggtcaaggagctggtgtgcggcgatatcggcgccatcgccaagatggataaggtcaagaccggcgataccctgtgcgacagccgtaaggtcgtggcgctgaagggcatccccttcgctgagccctgctactctgtggccatcgcccccaagacccgcggccaggacgataaggtggctcagggcctgaaccgtctcaatgaggaggacccctccttctccgtggtcaacaacgccgagacccatcagatggttctctccggcgccggcgatatgcaggtggatgtgctggtcagtaagctcaagacccgcttcaacgtggaagtggagctgagccctgtccgcgtggcttaccgtgagaagatccgcaagaccgtgcagaagcagggccgtcataagaagcagaccggcggcagcggccagttcggtgacgtgtggatccgcttcgagccccagaccgagcaggatgacatgatcttcgctgaggaagtgttcggcggctccgtgcccaagaactatttccctgctgtggaaaagggcctgcgggaggcctgcgtccacggtcctctggccggttatccggtggtgaatctgaaggccgttctgtatgatggctcctatcaccccgttgactcctccgaaatcgcattcaagaccgccgctcagctggcctacaaggccgctctgcctgaggccaacccctgcctgatggagcctgtgggcgagctgaaggtcaccgtgcctgacagctacatgggcgatgtcatgggtgacctgaacaagcgccgcggccgcgtcatgggtatggaccctgctggcaatggcgagcaggttatcaccgctgaggtccccatgggcgagatgagcacctatgccatcgacctccgctccatgactcagtcccgcggcacctttaccctgcactttgttcgctatgaggattgccctcccgcggcgcaggagaaggcgatcgccgaggccaaggcccggaacgaggaataagatcaaccagtgtggccggggaagcgatcgcttccccggccgctgtatctgtgtgggatagtcccagggcagttcaataactctaacaaagcgtgaacaattttaggttcttttaaaaagttgcatttgcaacttgcaaatagaaacgattcctgatatactacactcacaaagcaaaaaacgctcagggaaagagcgaagataaggtaattatttaaggaggatacatctatgaagaagtgggtctgcaaggtttgcggttatatttatgagggtcccgaggctcccgtcgagtgccccgtctgccacgccaagaatgcgtttgaagaggtcaagggcgagttgaaactggctgctgagcacaagttcggcatctacgcagagaccgtgaagaacaacgccgacatctccgaggaggataagaagtacatcttcgatcagctcatggccaacttcaacggcgagtgcagcgaggtgggtatgtatctgtgcatggcccggatcgctcaccgtgagggctatcccgagatcggcctctactgggagaaggccgcttatgaggaagccgagcacgccgctaagttcgccgagctgctgggcagcgacctggagagcaacatgaccgcctccaccgagaagaatctggcctggcgtgtggactgcgagtacggtgctactgccggcaagtttgagttggccgcctgcgccaagaagaacggtctggacgctattcacgacaccgtccatgagatggcccgcgatgaggcccgtcacggcaaggctctggagggcatgctgaagcggtacttcaacaagtaagttccgcaaaaaccaaaatcttttgagagggaatcgggaaaccgattccctctctttctgcgtcctccgccgttgggatggaagtttctgtggaagtctatctctgttttccttctgaaaatgccatatgtggaagtcagcaatgtgaatgtgtcctattttgctgtttttctgtcatgttgactgatttgttctaacataccaaaaagcggtccgcagacatctgcggaccgctttttgacgatatggacaggtaaaccgtttggatgctgcttttacagcttttccagcagataatctacgaactggacgcaggaggccccgtcccggtgaccagtcatgaccacccggcgctctgtctccgtgcagaggcccatagcggcggcgagctgatctgccttgtccgccatggcgatgtgccgcagcagcagctctgccgccttcaaaatgctggcgggattggcgtagtccccctcgccgtcggcgatgagccggggggcggtgccgtggacggcctcgaacatggcatattgactgccggtgttggcgctgcccgccgtgcctacgccgccctggatttgggcggcctcgtcggtgatgatgtcgccgtacagattgggcagaacgaatacctgaaacctgctgcggatctccgggttcaccagattggcggtcatgatgtcgatgtaccagtcctcggcggtgatctccggatagtctgccgcgacctcatggcagatgcgggtgaacattccgtcggtctttttcataatgttggccttggtgacgatggccacattggttttgccgttggcccgggcaaagtcaaaggcggccttggcaatccggcgggtaccggcgtctgtggtgaccttgaaatccatgctcagcataccgggcacctcaacgccccggctgcccagagcgtattcgccctccgtattctcccggaagaaggtccagtcgatgcccagcttcgggacggatacaggccgcacgttggcaaacaggtccagctcccggcgcatggccacattggcgctttccagcgtaccgcccttgggagtctccgtggggcctttcagcagcacgtcgcagtccttgatggaggccagcacctcgtcaggaatggctttgccctgagcagtgcggttttcaatggtcaacccctcgatgtcccgcagttccacccggccattggcaatctcgtccgccagcagcttttccaacacccgccgggcctgggccatgaggatgggaccgatgccgtcaccggggatcaggccgatgacgatgcgctccatacgggaaaagtccttggcgggggagccttgggccatacgctcctgccggtttaactgctcggtcagtaaggtgcggaaatgtgccgccgcctgctcgatatatgtgttctgatccatcagtcattgccttctttcgtgtaattcagcagaccgcctgcccggagcattgccgcctgccgcttggtgaagctgccgcagacggggatttcacggtttccagcgtgaagcgtcatggtgccgctgtccaggccggcgtcgatgccggtgagggtcagggtctcaccttgagtcaaggcgtcatagtcatcggggtcggcaaaggtcaggggcaggatcccggcgttgatgaggttggcggcgtggatgcgggcgaagctcttagcgatgaccgcccggacgcctaagtacaaaggcaccagcgccgcgtgctcccttgaggagccttgtccatagttgctgccgcctactaaaatggtttccccggctgccttggcgtttttggcgaactccttgtcgcacacggcgaaacagaactccgacagcttggggatgttggagcggtagggcaggatcttagagcctgcgggcatgatgtggtcggtggtgatgttatcccctaccttcagggtcagcttggcggtgatggtgtcgcccaccggcttgccctgggggaattccttgatgttgggaccgcggagcacgtccagatgggctgcctcctccggggaggcgggggccagcacggcgctgtcgtcaatgaggaagtggtccggcatctccacatggagggcctccatccccaggtcccggggatcggtgatctcgccggtgagggcggcggccacggcggtctccggggacaccagatacaccttggcatccgccgtgccgctgcggccctcgaagttgcggttgaaggtccgcaggctcacaccgccggagttgggggagaagcccataccgatacaggggccgcaggcacattccagcagccgcgcaccggagaccagaatatccgacagcgcgccgcagttggccagcatggtcaggacctgccgggagccgggggacacggacatactgacagagggcgccacggtcctgcctttcagcatggcggcggttttcagcagatcgtacagggaggaattggtgcaggagccgacgcagacctgatccaccttgacgcccttcagactgcggacgggcaccaccttatccggcatgtgggggcaggcgatcagcggctccagcgtgtccagatcaatgtgaatgacccggtcataggccgcatcgggatcagcggaaaggggtgtgaagtcggcttcccgcccctgtgccttcaaaaaggcgcgggtcacttcatcggaggggaagatggaggtggtagctcccagttccgtacccatattggtgatggtggcccgctccggaacggacagtccggcgatgccgggaccaccccattccatcacatgccccacgccgcccttgacggagaggagccgcaggacctccaagctgatgtccttggcggtgacgaagggacgcagcgcaccggtcagctcgaccttgatgaccctgggcatggtaatgtagtaggctccgccgcccatggccacagctacgtccatgccccccgcgccgaaggccagcatcccgatgccgccgccggtgggggtgtgactgtcggagccgatgagggtctgccccggtacgccgaagcgttccagatgcacctgatggcagatgccgttgccggggcgggagaaccagatgccgtgcttggcggcaacggattggatgtaccggtgatcgtcggcgttttcaaagccggattggagggtgttgtggtcgatataggccacggatcgctttgttttgacccggtcaatgcccatagactcaaattccagataggccatggtgccggtggcatcctgcgtcagggtctggtcaatgcgcagggccacctcagcccccggctccatgctgccgctgaccagatgagcggcgatcagcttttctgtcaatgtctttcccatggttcagccctccttttggatgatgtctgccagattggcccgggcgttttccacatggcgcagggacgcctccgcagcccgttccccatcgtgggcggcaagggcctcgtagatggcggtgtgctcctctaaggcgtggaccgcccggctgtggtgggtgacggaggccttgcggtacttgatgatcttcttatggagggagatcagtgtatccgcatagggacggctgccgcagctgttgtaaagcaattcatggaaccgggagtccaggtttttgacctgatcggaattttcgcccggctccttttcgctttcaatgtagaagcgctgcaggtccagaacctccttcatttcactcagtacatcgtcggtgatgctggcggcggcccgctttgcggccagcccctccagctgaaggcggatctcgtagatatccagcatatcctgccgggagatgccgatgaccaccagaccgtgtccggagtcctccaaaatgcgctcctgctccaagcggcggatggcctcccggatgggggtgcggctgacgcccagttcgccggacagccgcagctcgctcagaatctcgccctgagggtatttaccggacagaatatcccgttccagcttttcaaaaacctgatcggcgatggaaatgggcttatgatctctcatcatggtgggttcctcctcaatggcggggcttcagcacgccgccggacagttctgcgattttttcttccagttcttcattggaaagggcggtggtgcggcctccggcgtactgttcgtccacccagaccttcagcttttccaccagtgcgtcatgcttgctgagctggtggtcgctgcggagccggtagttctggttgatccagtaggcgatgcctgctagcccggatgttttgctgatggctacggcggcaggccggtccagcagcttttccgtattgaaaatgttgtagatctcctcgtccttcaaaagcccgtcagcgtggatgcctgcacgggtgacgttgaagttccggcccacgaagggcgtcatgggggggatgtgatagccgatctcgtgctcgaagtagtcggcgatctcggtgatggcagtggggtccataccgtccagagagccacggagagaggcgtattcaaacaccatggcctccaacggcacattgccggtgcgctcaccgatgcccagcatggagcagttcacgccgctggcgccgtacagccaggcggtggcggcgttggcaacggccttgtagaagtcattgtggccgtgccattccagatattcgctctccacgccggaatagtgctgcaaaccgtagatgatgccgggaacgctgcggggcagggccacctccgtgtaggggacaccgtagcccatggtgtcgcaggcccggatacggacggggatcttggcctggtgggaaagctccatcagttcattgacgaagggcaccacgaagccgtaaaagtccgcacgggtgatatcctccagatggcatcggggcatgaccccggcgtcaaaggcgtccttcaccgtggccagatagtagtccaacgcctgccggcgggtcatctgcattttcttgaagatatgatagtcgctgcaggacaccagaataccggtctccttgatgccaaggtccttcaccatccggaagtcctcccgggtggcccggatccaggtggtgatctccgggaagcgcagccccaaagcctgacagcgttcgatggcctcccggtcccgcttgctgtaaatgaaaaactccgtctggcggatcaggccgtaaggcccgcccagcttgctcagcagcttgaacaggtgctcgatctgctccggggtgtagggattcatggactgctggccgtcccggaaggaggtgtcggtgatccagatgtcggcaggcatggacataggcacccggcggtggttgaaggccaccttggggacctcgtcatagttatatacgtcccggtacagcaccgggtccttcacatcctgaagggaataacggtagtcattttcctccagcagattggttttggcggataattcaagcatggcgggctcctttccagcgatacgcttgctgtatacttgtatacatatatacacccgtggcgaaaacttgtctacccctccgaacaaacttcgtgcaggatcacaaatgggtcccttcatggcggtcattgaaaagacagatgtcctcgatgtgcggagtttttgcgaaatgcactgcattttcgccagaatttctgtgcagtccgcgcagagcggggaaaattgaccgatttcccccgtatccggaaaaatcccttgcaaaccggggcgaatagtgctatgataccctttgtcaacaggggagcttgcgcaagcaggctgagagtgggatgtattgcccagacccgtaaacctgatttggataatgccaacgtagggagataccgtcgctgacacgctcatggagctcgtaatgcggatatgtctttcaggcatatccgcgttttgttttctatccggtcctttgtgccggacagacaagagcggtgcccgccgggatttcaaaagatgcagaggtgttcaatatgaaatgtgatcccaaagatctgctgctgtatgccgtcaccgaccggcactggctgaacggacggacgctggtggacgtggtcaaggagagtctggatggcggcgtcaccatgatccagctccgggaaaagtctctggatgagggcaaatttctggaagaagccaaggagctgcaagccctgtgccgggagcggcatgttccctttatcgtcaatgacaacgtggacatcgccaaggccatggacgccgacggcgttcatgtggggcaggatgacatggcggcgctggatgcccgggccaagctgggaccggacaagctcatcggcgtctccgcccacacggtggaggaagccctgctggcagagaagcagggggcggattatctgggcgtgggagccgtgttccccaccagctccaagagcgatgtgggggagatgtcctacgagaccctgaaggctatctgcaaggccgtgtccattcctgtggtggccatcggcggcatttccggcgagaacgtaggcaagctggcgggcagcggcatctgcggcgtggcggtcatcagtgctatctacgctgccaaggacgtcaaagccgccgccgctgatttgaaagccaccgtgaaagaaatgctgcgggcatgatccgggggaccattttcgacttagatggcgtcctgctggactctatgggtatctgggaagatctgggcgcccggtatctccggcggctgcacatcaccccggagccgggactgaatgaggtcctctttcccatgagcatggagcagggggctgcctatctgaaagcgcattacccgcttcaacagagcgaggcggaaatctgcggcggcattgcccggatgctgaaggactactatgctcaggaggtccctgccaagcccggcgcggcagcactgctggcatttctggcggaacggggcatttccatggcggcggctacctccagcccgcgggcgcacgtgaccgccgcgttggatcggctgggcctgctgccctgcctgaaagcagttttcacaaccggcgaggtgggcgtcagcaagcatgagccggtgatctaccatctggcggcggaagcgttggggacggccccggcagaaacgctggtattcgaggattccctctacgccctgaaaaccgccaagacggcgggtttccgcactgtcggcgtattggacgcccacggggaaacagatcaggcggggctgaaccgggcggcggaggtctatctcacgtccctgacggagtttcccggccattgggtacatctcaacaagtaaattcggaacgctcagggccttgccctgtgttcaggcggtacattgggggcaccaccttgtatcgctttataaaactgtgctgtaaaagagaaaggaagtattcacatgaaaacagcattgaccattgctggaagcgattccagcggaggcgccggtattcaggcggatatgaagaccatgacggccaacggcgtttacgccatgagcgccgtcacggccctgaccgcccagaacaccaccggcgtcacagacattctggagtccactcctcatttcctgagtgagcagctggacgctatttttaccgatattttccccgacgcggtgaagatcggcatggtttcctccgccgacctcatcgtggtcatcgcggaaaaactgaagcagtacaaagcgaagaacatcgtggtggaccccgtgatggtggccacctccggggcaaagctgctgcgggatgatgcggtggaggccctgtgccgggagctgctgccgctggcggcggtcctgacccccaacatccccgaggcggagatcctctccggcatgaccatcaccgatgctaccggcatggaggctgccgccaagtacatcagcgagaaatacggctgcgccgtgctgtgcaagggcggccataaggtcaacgatgccgacgatctcctgtggcggaacggcttcggcaagtggttccacggcaagcggatcgacaatcccaacacccacggcaccggctgcaccctctccagcgccattgcctccaatctggccaagggctatgatctggacgagtccgtggagcgggccaaggaatacatctccggcgcattggcggccatgctggatctgggccacggctccggccccatgaaccacatgtttgccctgaagggagcttttacggaatgatcacctctacggttgcgatcttattcgccgtgggctatctgctggcaacgatctggctgtgccggggcttccgactgacggtccgggacctgtgcctgggcggtatcgtctgcgccatgacgctggtgctggccacgatccgcattcccctgcccaccggctccaacatcacctgcggctcctggatccctctgatgttgctggccctgctgtatgactatcggctgtccatgctgagcggctgggtgtgcggtattctggcaatgatcctgatccccggctggcaggcggtccactgggcgcagatctttgtgcagcagttggtctgcttctcctgcttgggctatgccggtgtgttcggcagcgacaagcgctggaaggccatctgcggcatggcgctggcggtggcgatccgctgcttcggtcatgtgatcagcggtgtgatcttctattcccagaacgcatgggacggctggggcgcctggggttacagtctggcctttaacctgtcctcccggcttccagagggaatcttgagcattctgatcgtatcggtgctgccgctgacgcttatgcggcgggccattgccagaagggaggcaaaatgatgggtactgttgatcggcttctgaaagccaccgaggatatctgggccagctaccacgaaaagccctttgtgcagggattgaagtacggcacgctggatcagaagaaattccgcagctatatcattcaggattactggtatctcatggactataccaaggtttttgccatcggcgtagccaagagcaagagcgtggaggtcatgaaactctttgccaagtacatccaggcgatcctggacggcgaggtcaacgttcacaacggctatatggccgattttgggatcacccaggaggaactggaccacacgcctatccagcaggataaccgctcttacacctcctatatgctcagcgttgcctaccggggcggtgaggcggaaattctgacggctatcttctcctgcgcttacagctatgaggtcatcgcccgcaagatcgtggaggagtgcccctccgctcccgagcaccccatgtacgggcgttgggtacggggctacatcactccccgctacacaggcaacaacgtgatcctgaaggatatgctggagcggctgaccaaggactataccgaggagcagctccgctatctggaggagatctttacggcgtgttcccgctatgaggcatccttctgggatatggcggaccgcttcggaacggaaggcggggtgcaggcatgaaaaagacgtccaccttccaaaacggactgatctggttcggcgcaggtgtttctctggcggagatcctcaccggcaccgcctttgcgcctttgggtatggccaagggtctggcggcgatcgtcatcggtcacatcattggctgcgccatgatgcttctggcgggcctcatcggcggccgcaccggccgcagcgccatggagaccgtgaaaatgagctttggacagaagggcggcttgctgttcgccttcctgaacgtgcttcagctggtaggctggactgccatcatgatctatgacggggccttggctatcggaggtattttcaatcttggacattgggtctggtgtctggtcatcggtgtcctcatcatcctgtggatcgctgtgggtattacagatctgggctggatcaacaagcttaccatggcggccctgtttcttttgaccttagtgctgtgcaaggtgatcttcttctccggcagcgctatggcggcctccggcgaggccatgaccttcggcgcggcggtggagctggcggtggccatgcctctgagctggctgcccctcatcagcgactacacccgcgaggcggaaaagcctgtgcaggccacctgggtcagcgtggtggtgtatggcctggtgtcctgctggatgtatgtcatcggcatgggcgcggcgatctttaccggggagtatgacattgccgttatcatggtgaaggccggtctcggcattgccgcgctggtgatcctggtgttctccaccgtcaccaccaccttcctggatgcctggtccgccggtatttccgccgagtccctctccaagaagctgaacgggaaaaagaccgccattgcggtgacggtcatcggcgctgcgggggccattctgttccccatggatgatatcaccggcttcctgtatctgatcggctctgtgtttgcacccatgatcgcggtgcagatcgcggatcatttccttctcaagcgggatcgctttgctgtggcggcggacagccggaatctggtgatctggctggtgggcttcatcgcctaccgctggctcatgggcgtggacaccccggtgggctacactctgccggatatggtcctgaccgttctcctgtgcgtccttgcggaaaagctgtgcgccggcatgaagaacggctgatcggctgaccgaacaataaatgaccggcggatacgtgtatgcgtatccgccggttttgctgtgtgtgatttgtaggtttttcccttgccctccggccggttccgtggtacactttcttcctgtacgagcattgaccgaagggaaaggataaccatgaatcaaaaagaactcaacgagatccgtcggcgcttcaagctggataaaaacagcatttccaagatttttggctgctatgtcaacagcaataaggagatcatttcctggatcgacgcctctatgggcctcatgcagcaggaggagcaggaaatgtatctgggcctcctgaaaaaggccctctccggggccttgggcaaaaatctggtggatatcacgttttccacggcgcaggtagcggacagtgacgagcatcgcctgctgcagaccatgcggcagacagaactgaaggaccctgcctcccgggagaatttctgccgtcggctgatcgacgcgctgaacatgggagagaccaactacctgatcctgctggctgcggacacctacgatgtgccccacaagagccgggacgatgaatttcaggcggacgcgggggacacggtgtatcgctactttgtctgcgccgtctgcccggtaaaggcccctactctggagctgcggtacgatcatgacctgaacgaattccatcccggctccaccggccatatcgcgctggccccggagcttggcttcctgtaccccgcctttgacagccgcgccgccaacatctatgacctgctgttctacgccaagaacccggcggagctgcatcaggaggtcattgacgcgctgttccgggtggagccgcccatgtctgcggcagaacagaaaaacgtttttgatacggcgctgacggaggcgctggatgaggcttgcagctatgacgtggtgcagtccgtccatgagcagatccgggcaaagatcgaggaccacaaggaaagccacgatccggagccgctggagctgacggtttccgacgtgggctgcatactggccaacagcggcgtggacaccgaaaaggtggaagcgttcaaagcaaactgcgaaaagcagtacggcgaaaacgccgcactgaatccggtgaatatcatcgagagccgcaagtttcaggtcaccaccccagaggtgaagatctccatcgccccggaaaacagctatctcatcgagacccggatcatcgacggccgcaagtatctcctgatccccgccgatgacggcgtggaggtcaacggcatcggcgtgaacatcgccgccgaccagccgcaggaataagcgcagagcctttcctacatgataaaagccccgccggattccttttggaatccggcggggctgtatttattcggaacatattacgggcggaagggaactcagccctcctccgcgatcttgcggcccatgaggacacccatgacggaggccatcatcaagccacgggtccagccggagctgtcgcccagacagtgaaggccctgaaggctggtgttgaaatccgtgtccatcttcacccggttggagtagaacttcagctcgggggaatacagcagggtctcgtaggcggcgaagccgggcaccacataatccatggcctgaatgaagttgatgatgttggtcatggcccggtagggcatggcggcggtgatgtcgccggccacggcgtccggcagagtggggcggatgttggactgggccagctccttctgccaggtgcgtttgccgtccagaatgtcaccgaagcgctgcaccaggatctggccgttggccagcatgttggtcagctcgcccaccttctgggcgtaggcaatgggctggttgaagggcacggagaagttgtgggagcagagaatggacaggttggtgttgtcgctcttcttctccttgtaggagtggccgttgaccaccgccaggttgttgtcgtagttttcctgactgacaaagccgccggggttttggcagaaggtacggaccttgttcttgaagggccggggatagcctaccagcttggactcgtacaggacccggtttacggtctccatgacctcattgcggacctccacacgaacaccgatatccacagtgccgggggcgtgagcgatgttgtgctccgcgcagagcttttccagccagtcggcaccccggcggccggtagcgaccacggtgtgcttggcgtagatctccatgtccaccttgccgttggacacggaaacgcccttgcagacgtcattttccagaatcaagttgctgcactcgtagccaaagtacatctctacgccgtgctcctgtaaatacttctcgatggcgtagtagataccctgagccttttccgtgcccatgtggcggatggggcagtccaccagctttaagcctgcctgaatggcgtgcttgcggatctccttgcgctcctcgtcattaccgagaccctcaatgtgcgcgtccgcaccgaaatccagatagatctggtcagcgtagttgatggtctcctgcgccagctccggggtgatgagggtgggcagatcgccgcccacttcatagctgagggacagcttgccgtcggaaaaagcgccggcaccggagaagccggtggtgatgtggcagtagggcttgcagttgacacacttcttcgtcttgtccttggggcagtggcggttttctaccgcctggcccttttctaccatgatgattttctgcttgctgcccttcttgaccatttccagggcggtgaagatgccggcagggccggcgccgatgatcacaacatctgcgttcataatatctcctatctctttatttggctgacaattctacctgatggcgtaccagagtcataggcggcaccggatggggtagcctgagcttcagcagcatctggggatttcggggttcttcaatcacggttccggtctcatcccgcatttccgggaccgtcatggaaaagggccgcaggtccggccctaccagctccaccgtgtcaccggtgcggaatttgttccgcagggaaatgacggcgttgccgtcggggtcgcattccgtgaccagcgccaccacctgccattcccggatgtagcgggaattttcgtagtactggccggggtagccgtagtaaaagccggtggcgtagggccggtggctgacgtgctccacctcatcccgccacaccgggtcaatggggcggcccgcggcggcgtcatccagacagtgccggtaagcgccggtgacgatagcggcataataggcggatttggcccggccctcgatcttcagactggacagccccacatccagcaggtcatccagatggtcgatcatgcacatatcacgggaattcagaatatagctgcccttttcgtcctcctcaatggggaaatattcgccggggcgtttttcctccatcagggcgtaatgatagcggcagggctgggcgcaggcaccgcggctggcatcccggcccgtcatataattgctcagcagacaccgcccggaatagctgacgcacatggccccgtgaacaaaggcctcgatctccagctctgccggggtgttctcccggatggcccgaatttcttcaaggctcagctcccgggctaaaatcacccgggaagcgcccagatcataccaggcgttggcagtgacatagttggaaatgctggcctgagtggagatgtggcgctggcagttgggggcatatttccccgccagcgtaaaggcacccaggtccgccacgatcaccgcatccacaccggcgtcattcagccgttccagatgcgccggcaggcggacgatctcatccccccggggcatggtgttgatggtgcagtggacccgtacattgtgcgcatgggcataggctaccgccgccttcagctcatccgggtcaaagtttccggcgaaggcccgcataccgaagtcggtgcccgccagatatacggcgtccgcgccgtagagcacggccattttcagccgttccatatctcctgccggagccagcagctccggcagctttctctgtttatccaccataggagctgctccctacaaaggcattgtgctcagacagggtcttggagaagtgatgcttcccgtcggtgcccaatgcgtagtaataataatccgtgtcattgggatccatagccgctttcagagccgcgctgccggggttggcaatggccgtaggcggcagtcccttatggagatacaggttgtagggggtatcgaccgccttgtccgcgttggtgatggcgccggtgtgatccggcagaccatagagcagggaagcgtcgatctgcagcagccctgcggtctcgccgggcttttgcaggcggttatagatgacggaggcgatatcccgctgatccgtaccgtccgtctccttttcaatgagggaggcgatgatgaccacgtccttcatgctgtaacccatggatttggccttggaggaggcgaacgcatcctcgtcgatatggtcggcaaaggcatcgatcagcttacccagagcgttcttggcgttgtgattcttgtagaactcataggtgtccgggaacaggtagccctccagacggctggggtcttcggaattgttgttgatgaagctgtaatcatacgtggcggtcctggcggcctccagcagattttcttccgtattgacgcccttttccgccaacagacggatggtctgccgcacggtatagccctcggggatggtgacggtgacagtctccgccgtcaggttgccggaggagttgtgcattcccaggatcagcgcccggtaatccatctccgtattcagcgtataggtaccgatgccgatctttttatcggcatgggagatcccggcgtagagcttgaaaaaccacttgtacttgatgagccccgcatcctggagtttattcgccacggtggatacgctgtcctctgccgtcacctccaccgaggtctcccgcagagcaccccggttgaaggcacagaaatccgagcccagcatccagcccatacccgccagaatggcggaagccagcaggacaaagatcaggtaaccgaccagcaccgccagcggattctgtctccgtctgcggggacggcttttgctgtggtgggcagacgccgcttcacgccgcgccccctgcgcctgccggacctcctgtgcgtcccagctggcagtatcatctcttctgaattcagacattggttcctccttgctttcccggtccccggcagggaaggggaatacaatttccggatttttgtccggtccaagcccggtttccggtgacagcggcataagatagcctatcaaacagaaagcggggtagtggtatgtgctgcaacaacaatgacagctcctggctctggatcattctcgttctgatcgtggtactggtatgctgcggcagcgggtgcagctgtggaaacggctgtgtccacaacggctgcgattgctgctgaaccggcggggacgcaccgcgtcccgctggggggacaggcattacagcagcgacttgacagtcttgtacacctcgttgtggatgtcctccacggttcggggagcatcgcccttggcacagtggatcacggtccagccgcagtccttcacgatttcacgggcggcctcccggcagcttttcagataagcctcgtcctgctcgtgaatgtcggcatgggtgccggtggcggcctcccggctgcgcatcatctgctccgtgatctccgtgggcatatccagatagagcaccagatccggcttcggcaggcccagcttgccgtattccagctcaaagagccagttcaaaaagaccgtccgttcctccggtggcagcttggacgcctgatggacggcgttggacgtggtgtagcggtccgcgatcaccagcccaccggctttgtagaaagccccccagtcctgcttgtaggaggcatagcgatccatggaaaacatcagcgacgctgcgtaggcgttcacatcgccggggcgcctgcctaaattgccatccagatactcctgcaccatggcggcggagggcttgccgtaccggggaaaagtgatgtttttataggggatgctttctcgctgtaaatgctcgcacagcagccgggactgggtggctttgccagaaccgtcggtcccttcgaatacgatcaaacgtccgttcatttccgttttcccttctcctgccgcacatggaccagaaacagcggcagcttcatcatccggccgatgcgcttcggctccttacacaggcggtaaaaccattccagaccgtgatcggaccagaatttcggcgcacgctccacggtgcccgcgaatacgtccagacttccgccgaggccgcacagcaaatgggcgccggtggcggggccgttccgcgccatccacagctcctgcttgggggctcccagacagacgaacacgcagtccgcgccgctttcccggatggcttccaccacaggggcgtcctccttgaagtagccatcatgagttccggcgatcttcaatccggggtactgcttttgcagccgttccgccgccaggtccgccacgccgggcttggcgcccagcagatagagggatctcccgcgctcggccatcttttccatcagccccgcagcaaattcgatgccgggggtcttttctttcaggggcgttcccagcatggccgctccctttaccacgccgatgccgtccggcagtaccagatccgcaccgttgacggcctgcatggccgccggattttcccggcagacctccacgatctccggattcggggtcactacatagtggcaccccggttcctccagcagtgccgctccgcgggacacggcttccgtcatggtcagattatcaaaaccaacgcctaatacgtcgatccgcatatttttcacctcagttatggattccatactcatacagactaaagtatagcacatacctttgcgaatgtccacgaaaaaagcggagccaacaggctccgcttccgaaaaaacacgcagggcttatgctttttttctgtccggcagctgtgccagcaccaccgctgccagcatcagggcgcagccgaaatattcccgcccgctgaggcggtctcccaaaatcgccgcaccggaaatggtggcgaacacggattccagactcagcagcagagagatcaccgtggggttggagcctttctgagccagaatttgcagcgtatagcccacgccgctggaaaggagacccgcatacaggatagctcccgccgccatggtcagtcccgtccaggtgggatgctcgaaaagcagggagccgatcagggaaaacgccgtgacaaagaagaactgacagcaggacagctccacgccgtctaccacggtgacaaagtgatccaccagaaggatctgtgctgtaaacacaaaggcgcacagcatcacgcagaggtcgccgggggcgatggtaaagctctccgtgatgcacaggcagtacagtcccgtcaccgccagcagcacactgacccacaccgccttgggtactcgcttcttcaggaaaatgccgaaaatgggcaccagcacgatgtaaagggcggtgatgaagcccgccttgccgggggaggtggtgtccagacccttttgctgaaggaaggaggccaggcccagcgtcaggccgcaccagaagccgcccagcagaagatccttccgggagcgggtgacggaggcagcctgccccttccggcggcggccggatcgcatgacggcgcacagcaccagcaaaaacacaaaggcgatcaccgaccgggcggcattaaaggccagcggcgggacatgttccgcgcccacgctctgggctacaaaggcggtgccccagatgaaagccgtcagaaccgcataggcggacgaacgcagagaaccctgcttcatatacttgctcctccccaccggatgtggtatgatgataaaaatttctcccgccggttttggacggcaggcagcgtagaatgacgcatcagatcagccttgcgcgaaagttggcacagagaccgcgaatgtagcgattatagtggaaaactgccgccgccgcaagaggggctggccgacttctccgaaggccgcaaaggaagttctggaaacgcggctgtttttgtggatttttactgcttttctgcgaaattctgcatatttgataaaggaggctctatggcgaagctgacccatgatttcttcaacggcgacaccgttgccatcgcgcaggcactgttgggaaagtatctggtgcggaaccggaacggcgagctgctggcgggccgcattacggaaacggaggcctacgtgggccggtgcgacaaggcctgccacgcctataactaccgccgtacgccccggacggaaacgctgttcatggctccgggcaatgcctacatctatttcatctacgggatgtaccactgtctgaacttcgtcacggagccggagggagaaccttccgccgtgctgctgcggggactggaaccggcggcgggggcagagaccatgaagcacctgcggttcggggatgcgcccatgaacgcctaccggcggaaaaactttctcaacggccccggcaaggtctgtaaggcgctggacctcaccacggcccagaataagctggatctggagggggatgttctgtttctctgcgattccatggcggatgtggggctgacggacccggtgaccggaccagagcacatctgcgccggcccacggatcggcgtggactatgcggaggaggccaaggacttcccgtggcgattctggctggaaaaggagaactgatatgtatttatttgatatggacggcaccctcattgattccaacgatgtctggaaggacgtggacagggaatttctggcccggaggggtctgccctacacaaaagcctattacgagggggtggcccacaccattttccccttggcggctaagttcaccaaggagttctgcaatctgcccgacagcgaggaagacatcatggcggagtggatggagctggccaaggacgcctacgcccatgtgacggtgaagcccggcgtccgggcgtttttaaagcagtgcaaggcggagaaccggcggatggcgttggtgacctccagcgtgccggtgcactgccgcaccgcgatggaaaagctggatctgatgaagtacttcgaatccgttacctttgctcaggagttgggtattgagaaaaaggacaagcgcctgtggttaggggtggcggagcggtacggcgtggagccggaaacctgtaccctgtttgacgacagccttgccgcctgcaagggcgcccgcagcgccaaaatgcgggtggtaggggtctatgacagctttttcgccggggacgagaaggaaatgcgctccttctgcgacgtgtatatcaagagctttgaggaactgctctggaagccggagtaccgaaaggactgacgaataaaaaggaacatagcaaacatagtaaaagtcagacgttggttttccaacgcctgactttttatgcggttcagctgcctgaacgccagtgagacacgatctgccattcgtccgttcccggcgtcagacgcagggtcaggactgcaatatttccgttttcaacagatttacgcagataaacgtagtttccgacctgttcgccggattccgctataaaatagaacatattgaaatctgaggtatatgtatagtaagcgtcatattcctccagatagcagacgccggaggtgtccagatcgctcgtggtgatgccgccccagcgggtcagcacctcgttgatgctggaaatcgtgtgccggtgaatgggtaccggcatatcctccatgcgcgccacccgcttgaacggccagtcatccagctttttcaacgcctcaaattccgcctcggtcgcctggccgctgtccgggaaatagcggataaattcctcaaaattcaggttcctgacatttttataataggaggaaaagaagtaactgaagggctggatgtgaaagtccacaatgtcaccgctctcatcccggaccgcagggtccataacggcgttgtaggcggccagctcctcttgcgtcagggtgtgccggggactgtactgccctgtcagcgagatctccaccacggcctgaaaggtttcccagccattgccccggtcggcctcgtagaatactggaacgaggtactgatataggcccgaaccgaacagcgactgatgctgctccaccgtggctgccagatgtacctgctcccagccgtgaacgtttctggcccgggcgctgtccagagaacagagctgcggctcgccgtttttctgctccaccgtgtaggagaccgtaagatccgcggcacgcccgtccacctccgcccggtaggtggaggtcatcgtagtccgggtggacgcgccggcggcgggaaggctctccgtcggcgtgaagctctccgccatgaggtacatcacctgaggctcgatgaagatgtagggatagtcgctgatgcccagatccgtccacaaagtccagacccgccagcagccgttcccatcggcggtggggtaaaagtagtaccgctcgtttatgccgtcctgccgccgtttccagatctgcttggtatcgtccagcggctcgaagccctgcttccgggaagtaatatattcgtcctccaaggtctgggtgaaccggtctaccgtaaggatggagccggtatcatagccggaataccattcccagtgaccgtgactgcgatgggccgtcacgtccgccatgatccatgcgctgccgggaatatagaggtagccgccgtccacatcgtagcggtggacgggataattaccgggcttgccatcttccgtgttgtagttgatctggtcgatccagtcctccacatacagcggcagatccaaattttgatccgtcacataccagtcataaatggcctcctctatggtgttgtgatagccgaagaactcgccgccgtcattgatggggtcatcgcagaggatgtcgtagctgccgtcatcgtgccgcagggccactattacatgacgatcatctaacgagaagtattcctcgttgtcataatactgtccgcctaccagcgccaccgaagccgtgtccacatccagctttaccagatagtaatactcccattcctccaacacgccgttggggtccagtccggccacctcgccgcccttcgtcagatattccagctttcgatccgtcactgcggcggtatggggctggccgctgacagtgccgtcggcgttttctgcgtaatatcgcgcttccgtctgggacagcattacctgctggacgtaggcttccacgctgggccactggccggtttccgtccggtccgccgggggatcttccgttgggatgccgctcccctttggattggcggcgcagagggcgatcagtcccacgcagaccacggcgcacacggcgatgatccacggctggggccgtttccagttcagcaggttccggatgcgtccgccggtgtcgccctcgccgaaggcaaggggcatccccgccacgatgcggcggccggtggcaaggctcagcagggaggcggagtagtccgcccggatgtcctcgcccagttcccttaccaccgcctcgtcgcagctcatctccatgtccttccccgccaaaatgaacgccgcccacaccagcgggttgaaccagtggacgcacagggccagaaatgacaggagcttcaccacatgatcccggcggcggaggtgatactgctcatgccgcaggatgtagccccgctccgtttccgtcagggtggagggcaggtagatcttgggccggaacaggcccatgacaaagggggaggggatgtagtccgccagatagatgttgtcctccaatcgcaaggctcccaccagacggcggcggagccgcagcagcgagaccacgctgtaaaggagcagcagggccatgccggtcagccacgtcagggtcaggaccgccactgggccgctaaggggtgagaccggggcagcatcaggctgggtcacgctgggggcggtgctgacgatgttcttaccgggttccgccgggaacggctcctgaggtaaaggcgtcaccgcgggggccatattgcggacgatatccgccgggacatactccaccacgctggtaacggcacttcgctcctgggccagagcgcccagcgcccccagcagggatacggcggaggtgacggacaccggacacagcagccggaacagcaccaccgcccacagggcataggaaaagaccttgggggcccgccgcagcagcaggcggactgccagtaccgccagaatcaccacgctggcggtgaggctcatattacagacgatgggaaacagccggtgcattacaaactcgcccatacgctacctcctgttctgatcgatcagcttttgcagctccgcaatttcgtcctctgtcaacttttttcgccgggtaaacgccgtgataaacgcgggcagggacccggaaaagctttcctccacgaattgctggctctgggcggtgtcatagtccgcccgggacagccggctggtgacggtgccgccctcgttttggaagatgccccggtcacacagccgtttcagaacggtgtaggtggtggactttttccaaccaagggcctcctccgccagccggaccaactccgtggagcccaccggttccctgtcccagataatctccgcgaaccgggtctccaccggccccattttcaaatcgctcataggttcacctccaaggtttactacatgtagaccttctacttgcagtctacaatgtgtaaaccaaattgtcaagggggcttttaaggaaaaaacgccgggagagcggcatgaaaaaggaaatcagcgtgtcgaaaaagccttttcgtcccgctgaacaagtttttggaactttataaaagttctgaaaacttaggatttcaatggcgcaggacacccttcttgggtttcccgcgcacacccttccttaccgtcgcggagaatttatcactttattgacagtctcaagaaatgttagtatgtttctgtacaaatgcagaagaatacttgacaaaagagagaaaaagcaacataatagtaccagttttgggcagcacaatgttctgtgacgaccgtttggccgtcgcttttttatgcggcggggaactggttgccgtttggaccgctgcccggctatgacggataataaaaggagcctgcgggaaaaccgcggactccgtgatgaaaggataccgacatgatcacagtcaacaatgtaagcatgaacttcagcggccagaccctgttcaaggacgtagaactgaagttcgttcccggcaactgctacggcatcatcggcgccaacggcgccggcaagtccaccttcctccgcatcctctccggggatctggagcccactaccggcgaggtcatcatccccaaggaagagcggatgtccattctgaagcaggatcacttccagtatgacgcctacaccgtgctggatacggtgatgatgggcaaccagcggctttacgatgtgatgaaggagaaggacgccctctatgaaaaagaggacttcaccgacgaggacggcgtgaaggccagcgagctggaggccgaatttgccgaaatgggcggctgggaggccgaatccgacgtgtcccggctcattcagggccttggcctctccaacgatattctgtacagcgaaatgtccagcctgaccgccaaggaaaaggtgaaggtgctgctggctcaggcgttgttcggcaagccggacatcatcctgctggacgagcccaccaaccatctggacattcaggccatcgagtggcttgaggacttcctgatggattgcgagagcctgatccttgtggtgagccatgaccgtcacttcctgaacaccgtctgcaccaacatcgtggacgtggactacggccatatcaagatgtatgtgggcaactatgagttctggtacgagtccagccagatggtccagcggatgatgaaggaccagaaccggaaaaacgaggaaaagatcaaggaattgcagctgttcatccagcgcttctccgccaacaagtccaagagcaagcaggccaccgcccgccggaagctgctggacaagctgacggtagaggaaatgcccgcctcctcccggcggtatcccttcgtgggctttaccatggagcgggagtgcggcaaggagatcctggcggtggagggcatctccaagacgctggacggccgcaaggtgctggataacgtgtccttccgggtgaacaagggagacaagatcgcctttgtaggcgaggatgagatcgccaagaccaccctgttcaagatcgtcatgggcgagatggagccggacgagggcacctacaagtggggcaccaccattaccaccagctatttcccgctggataactccgctttcttcaacgactgcgatttgaatctggtggattggctggcgcagttcacccccaagatcccggaggccaacaccgagtccttcaagcgggccttcctgggccggatgctgttttccggcgacgatgtgttcaagccggtgaaggtcctctccggcggcgagaaggtccggtgtatgctctcccgcatgatgctctacggttctaacgtgctggtgctggatcagcccaccaaccatctggatctggaatccatcaccgccgtcaacaatggcctgatggacttcaagggcgtggtgctgttttccagccatgaccacgagttcgtgcagaccatcgccaaccgcattatggtgctggaggacggcaagctgaccgaccgccttggcacctacgaggactatatcgcctcgatggcaaatactgctgaatgacccaactcgggggctgcttaaaaagcagtccccgtgattttttacgaaagcaatgataaaacgaaccggaagatgcaacttgccggtctgcggcaaaaatgcggtccagatccttttaaataacggtgccgggcataatactggcgaaaattgagaaaaacacagattttaccgtttttatttccgcatagccgatccttttcgtgtcaaactatgcttgcgatacccaagtgacccacacatgtaagagattgaaaaggagaaactgttatgtccagtaagaacaccaacaagatcaacgttcccgaggcccgcgctgctatggataagtttaagatggaagccgccgctgagatgggcgtcaatctgaagcagggctacaacggcgacctgaccagccgcgaggccggttccgtgggcggccagatggtcaagaagatgatcgagtcctacgagaagaacctgtaagcgtctgcgcagaaggaacttctctggaaaaaggaagagcggacggctgtccgctcttcctttttttcgctggatatgctataataccacgttacttacttgttctgattttcggcaaaagaaacggtccgggggagggattcgtatggaaaatatccatcagggacatcgtgaaaaaatgcggcagcgttttctgaaaagcgggctggagggcttcgcggatcacgaagcgttggagcttttgctgtattacgccatcccccggcaggacaccaaccccatcgcccaccggctcatggatcgctacggctccctgaccgccgtgctgtcagccccggcggaggatctgaaaaaagtggagggcatcggcgagagtgctgcggtgctgctgaaggtggcggggcagatcggccgcaaggcccgcctggcagacgctgttcagagctgtcccatgacagatgtggaaactgcgggcgcctacttgctggaacggtacgccggggagacccacgagatcgtttacgaattgtgcctggatcgaaagggaaagctgttagcctgcaagcggctcaacgacggcggggcgtcctccgccgcgctggacatccggaaggtggtggagaatgccatcctcacctccgccagcacggtgatcctggctcataatcatcccagcggcattgcgctgccctcggacgatgactgcgccgccaccacccgcgcggcgcaagccttgcagaccatcggcgttgcattggcggaccacatcatcgtggcggatgacgattttgtatccatggcccagagcggctacctgacctcatgggagcacctgtgaccgggcagctccctgtagacaacagaatagaacaagtgtttgaaattttagaaaagttgtggtagaataaccgggaaacggggagagccacagactgtctttgcgaagggggagagaaccatgcagatccggcgtggacgggaggccgacacggagcggctggtggctctggcgggccagatttttgaaacggaacaggagatcccccgggcgctgaccccgctgccgccggaaaaccgccctcagtggtggtgcgtggaggaggacgggacacttctgggtggcgtggccctgtattgggaggacgacgcatggcacatgggccgcttcgtcatctccccggaactgcgggggcgtcatgttgggaccgcgctgctggaaacggccctgacggacatttttgcgcaggacatccgggaggtcaccatggaggcccgggataccacggtgcatatcctgaaaaaattcggcgcggagaccaccggcgcgcccttttccttttatcggggcacggtaacgcccatgcgcctgacccgtgaggcattttggaacagccacaccggcgggcagatttgaatgtgacggagagacggctatgccgaaatttgaagtagtatccccttatcagccctccggcgaccagccggaggccatcgacgcgctggcgaagggcatcgaaaatggtttgaaggagcaggtcttgttaggcgtcaccggctccggcaagacctacaccatggccaaggtcattgagaaggtccagcggcctacgctggtgctggcccacaataaaactctggcggcccagctttgtgcggaattcaaggagtttttccccaacaacgccgtggagtattttgtctcctactacgattactaccagccggaggcctatatcccccacacggatacctatattgccaaggacgcatctaccaatgatgagatcgaccgcctgcggctgtccgctacctgcgccctgttggagcggcgggacgtgatcgtggtgtcctccgtgtcctgcatttacggcttgggcgagccggacgactttgcccagatggtgatttctctgcgtcagggggcggagtgggaccgggacgagctgctgcgccgtctggtggagaaccgctacgagcggaacgacgtggcctttgaacggaaccgcttccgggtgcggggggacacggtggagatctaccccgcctactacaaggaccacgccatccgggtggagttctttggggacgagatcgaccggatctccgactttcaccccctcaccggtacggtgaaccgggtgctgaaccatgtggctatctaccccgccagccactatgtcaccaccaaggagaagatggacagggccttgggccagatccgggaggaactggaggaccaggtaaaatatttcaatgacaatgagatgctggtagaggctcagcgcatccgccagcggacggaatatgacatggaaatgatgcgggagttgggatattgctccggcatcgagaactattcccggatcatttccgaccgtccggcaggcagcgcccctatgaccctgctggacttctttcccgatgatttcctgctgtttgtggacgagagccatgtgacgctgcctcaggtccgggccatgtacaacggcgaccgggccagaaaggaatcgctggtgcggtacggcttccgcctgccctgcgccttcgacaaccggcctctgaaattcgaggaatttgagagccgcatcggtcaggcggtgttcgtctccgccacgccggggccctacgagcgggagcgggcggacaacatcgtggagcaggtcatccgccccaccggactgctggacccccgggtggaggtgcgtccggtggagggccagatcgacgatttgatggaggagatccgcgcccgggccaagcggaacgagcgggtgctggtgacgaccctcaccaaaaagatggcggaggatctgacggaatttttccggaccaacagcatccgggtacggtatatgcacgccgacgtagccaccatcgagcggatggagatcatccgggatctgcggctgggcgagttcgacgtgctggtgggtatcaacctcctacgagagggtctggacctgccggaggtctctctggtggcggtattggacgccgacaaggagggcttcctccgcagcgagacgtccctgatccagaccattggccgggcggcccggaacgcggagggtctggtgatcctctacgccgataccgtcacgccctccatgcgggcggctatggacgagacggagcgccgccggaaaattcaggacgcttacaacaaggcccacggcatcgtaccgaagaccatcatcaaggatgtccgggaaattctggagatctccaagagcgaggacaccggccgcaagaccaagggcaaacccaaaaagctgacggacgcggagcgggcggcggagatcgccaagctggagcaggagatgaaggaggcttccaagctgctggaattcgagtacgcagcggtgctgcgcgaccggatcatcga

SEQ ID NO: 12135 - DNA, 182 bp, Unknown
  gut microbiota DNA sequence
gcggacaccagcagatatgtatatgcgtaatagtggagcgtcagcacaatgatgatcgccagacggccgtaagcgatgggagacagaatggcttcgatccgctccgtggatatgcccgcattcatcatgagggccgcgataaagccgggagcgccgccgacgcggggggtcttgaacatact

SEQ ID NO: 12136 - DNA, 412 bp, Unknown
  gut microbiota DNA sequence
tgacttatttgatcgttcttcccctggtagacatgctctccaccacgttccagctcgcgcagcgggacctgagagccaccggcggcaccatggccgacgtaggcaaatttaccctgtactattggcagcggctgctggccagtgacctttcctggaatctgctgttcaagcccctgctgaactccctgaccatcggcgtcggcgtttccgtatgcgccatcgcccttggctccatactggcctggctgatggtccgcagcgaccttcccttcaagcccttcttctccttggcggtgatcatcccctatatgatcccctcctgggtcaagtctcaggcatggctgagtatgttcaagaccccccgcgtcggcggcgctcccggctttatcgcggccctcatgatgaatgcggg

SEQ ID NO: 12137 - DNA, 6476 bp, Unknown
  gut microbiota DNA sequence
ccctcaccggccgccgcttgcagatcttccgggccatgggcatcgacagcgaccataccaccccctccgccgaaaagctccgggaggagctggctctgggctttaccgtccaggtgcaggaatgcatgctgagccgggagatcgttcaggccatgaacgacgcaccggtccaggaccgcatctgcctggtgacggacgacgtgcccctgccccggctcatgcgccagggccacctgaattttgtggtggagcgggccatcgagttggggctggaccccatccgggccatccggtacgccaccatcaaccccgccgttcgcctgcggctgtaccgcactggcggcatcgcccctggcatggaggctgatatacagctggtgcaggatctgcgtcatcccagaccggagctggtgctccgggccggagagatcgtctgggaccatggcagctatctgccccataccgctccttaccaaattccagaccacctgcagggctccgttcatctccgtcccgtgacggaagaggattttgccgtcacggtgccggtacgccccggcttctccggcggcaccgccgtggtgaatctgatcggccaggatggcgtctccatccgcacccagcgggtccggaaggccctgcccctgtccgctgaaagagacggctttgcctgtctgaaaacagctccttacttaaaaatggcagtattcaaccgctacggccgggatcagcacggcatcggcctgctgaccggcatggacggtgtcaccggtgccgccgcactgacctacggccacgactgccacaacctgacggtctatggcggtaatgacgctgatatggctctggcggccaacaccctccgggaatcccagggtgggctctgcaccgtggaaaacggcaaggtactgaccctcatcccgctgcctctggcggggctgatgtgtgatctgcctccggaggtactgctggagcagatggagcagctcctgtcggactgccgccgcatgggcttcaaccatcaaaatttgctgacgttcttcacccttatgccgctggcggtttcgccggagctgaaatgcacggatcggggtctggtggatgcgctgcacaagcggcttctgcctttgattgacgagataaaggagataagttcggatggaacgtaaacaccgtgcactgctgctggcactgcccaccgtattgaccctgctgtttttcttcgtggcaccgatggtctacattctggtccacaccctgcatgaaaacggtttttccgattttgtggatttcttcggagatcccttttaccgcaacatcctctgggtcaccctccgggtgtccctggtgtccaccgccatctccctggtgctgggctatcccacggctttttacatggcccggaccaagtcccgtatgaagcaggtcatgatgatcgtgatcctgtttccctttttggttagcgccgtggtccgttcctacggctggatggtcattctgggcaccaacggccttttgaaccagctgctccagtccttggggcttatctccgcccctctgaaaatcctgaacacggagacggcggtcatcatcggtatgatccacctgctggtgccctatatggtcctctctctggtgggtgtgctccagagcattgaccctaacgtggagtacgcggcctacagcttgggtgcctctcctctgcagaccttttccaaggtggtgttccccctgagcctgccgggcattatctccggctgcgttctggtgttcactatgagcatgacctcttacgtgacgcccaagctgctgggcggctccaagttccggatgatggccaccatggtggtccaggagatcaatgtgaatttcgactggggtgcggcctccgccatcagctatattctgctggcagtgatcctgctggtgcagatcgcggtggtgctgtgcacctccggatatatgaaacgtatgggaggaggaaagtgatatgcgcgaaaaagatgtgaatctgccctgccggatctttgccattctggtgatgctgttcctgctggcgcctctggtggtgattgtcatcgcctccttcacgcccacagccctcatcaccttcccgccccagggcttctccctgaaatggtacgccaatattttcggctcctccacccactttatggatggtctggtgaacagcctgaaaatcggtattctggccacagcggcggatattctgctgggcgtcacggcggccctatccgtctgccggtacagctttaagggcaaggacgctctgctgaactactacacctctcccatgtatgtgcccagtgtggccttcgcctttgttttgctgcaggtctacagccagatcggcggtgtgtccggtatgctgcgcattttcatcggccatctcattatcattctgccctacatcgtgcggaacacggtgtctgtactccatgtgttcaactggacgctggaggatgcggctacctccatgggagccacccctattcaggtgttcttcaagatcaccattcccttggcccggcccggcatcatggccggtgcgctgctggcttttttgtattcctttgacgaggtggccctgagcagcctgctctccaccccgaggttcatcaccctgcccatccgcatcatgaactatatggagctgaccttcgaccccactctggccgccatctccacactgctgatcctggcatctctggttctgatcgtactgatggagaagtttgtagggttggacatgtttgttaagtgagaacggaaaggtgtaaactatggctactttggaattacagggactgaccaagcgattcggcgagttcactgcggtggattccatgaacctgaaggctgccgaaggcgagatgatcgccctgctgggcggcagcggctgcggcaagaccaccacactgcgcatgatcgccggctttactgaacccaccgccggacagatcctggtggacggcaaaaacgtttccactatccccccctaccgccgcaatatcggcattttcttccagaattacgcgctgttcccccacatgacggtttttgaaaacgtggcctttggtctgaagctccagaagctgcccaaaaacgagatccgtgagcgggtggagcacatgctcgctctggtaaagcttaccggcatggacaagcgttatccccggcagctctccggcggtcaacagcagcgggtggccctggcccgggctctggtgacccgtccctccattctgctgctggatgagcccctctccaacctggacgccaagctccgggtagagatgcaggtagagatcaagcgcatccagaaggagctgggcatcaccaccatcatcgtgacccatgaccatgaggaggccgtctccttggcagaccgggtcatcgttatgaacgccggacacattctgcagatcggcaagccccaggaggtctttgacaggcccgcctctccctttattgcagactttatgggcttttccacctttcttcacggcacggccgccggaacggaaggggatatgcgcctgatccgctgcggtgcccacacgctccaggtcccggcagaggccgcccaggagctgactgagggggatgcctgcattctggccatccgctccgaaaacatccggactgcagagcaggaaggtgtcaataccgtccggggcaccgtcaaaagtgccacctacaagggccataccacccggctggaggtctccggctgctttgaggaaatggtataccccgctatccacgaatatgcggacgtgcaggagggcagtgaagttctgcttcacttccccgcccagcatttctgtgtatataaagacatcaaataaaatctggaggatgtaaacaaaatgaaaagcaagcgcatttttacactgatgctggctctggtcatgaccctgagcctggccgcctgcggcggcagcaagcaggaggaaactcccgctgataacgccggaaacggcgaagcagctggcgatactcaggatttcggcggcgctgagctggtcgttgctacctggggctgggccgaggccggtctcaagaccctggccgccgactttgagtccaagtacaactgcaccatcgtggtggaccccaccagcggcaacggcgaccgtctcaacaagctgatggctgagcagaacgatcccaccgccgatgtggccctgctgaccaagagctttgcccagaccggcaatgaggcgggcctgtttgagaagatcgacaccaacatcgtcaccagcctcggcgatctgtatgacatcgctgtcaacgccgacggctacggcccctgctactccctgtgccgctacggcatcatgtacaatgccgacgctctggagaaggccggtctgcccgcccccacctcctacgagggtctgtttgatgaccagtatgcgcacatggtggctctgcccgacatgacctccaccgccggtccctacatgctggtggctatggccgaggccatgggcggcagccaggaggatgtgacccccgccatggagctgatgcaggagaagaaggacaacatcgatctgtggtattccacctcttccgacgttgtcaacgccttcaccaccggtgaggccaacatcgccgtgttcatggacatcaatatgcccagcctgaccgacagcggcctgaacatggtctgggtggacgccgccgagggctccttctccgctcccgccaccgccaacgtggtgaagaactgcaagaaccctgagctggcccagctgtttgtggaatacctcatcagcaaggacacccaggacaagattgctgaggtcatgaacgaggcccccgtgaacaagaacgccaccatggacgattccctgaagacctatctggccttcggcgacgaatccatgaacgccctgaaggaatttgacgaggcctacatcaccgccaacaaggaagcctggatcgataccttccagcgcactgttgccgttcagtaatttccccgaccatacaaaaacggaggagacgccccggcgtttcctccgttttttaaacaactgacaaggagaagagcctgccatgaagctgactgtcttatcagaaaacgccgttctgtgccccggccttgagggggaattcggcctgtccgtctacctggaggaaggagatacccgcctgctgttcgacgccggtgagcgggacgcctgcctgcggaacgcggagaagctgggtatcgacctccggcgggtcactgccgtggcgttcagccacaaccaccgggatcactgcggtggttttctgcgcctggcggagctccttccgccggacgtacccatttacgcccatagcggctttttcatccggaagtggtgggatcaccggtgcgacccgcctcagcaggaaacctattcccagacgctggagttggtaggcccgcccatggaggcatcctggttcttccagcaggggctgaccggcttccgctgtctggcagatgactgcatacagatcgctccgcatgtgtatcttctgggaaactttccggaccctgaaccggaagaggcggtccatccctcctccgtgatggaggggccggacggccgccttgtcctggataccttcccggaggagcaggtctgtgtggtggataccccagcagggctggtggtactcaccggatgcgcccacaacggcatccgcaacattctctccacggtggaacggcgcttcccggagcggcccatccaggccgttttcggcggtacccacctggtacccccggacccggaacgcattgcccggacggcagactatttccggcacagctccatcacctgtgccggtgtctgtcactgcaccggccccatgggtctggaagtctttgcccaaacagtgcccgcctatctgcctaccggcgcaggctcggtatggcagacgccctctttcgcaaggacatccgcaggcagaaaagagaactgaccgccatacggaaagcctgcaaactcaggaataaaaacccccggataccttatcctccctgtcaggggagcaaggtatccgggggttttatctattacggaatcggacagttctgccccgctgtgcggtttttccccggatcattcccgcaaggtaggtgtgctgccagataagcgcacatcccgggcagaaactcgtggtgcttcggcagaggccgtgcaccggagcgcagccgtccgatgcgggagggattcatgctgatctcccgtcccagctggctgttggaaagttccgcaatattcgtcagtgcgtcaaatcgttcgacaaacatggtgatctctctgcttttttctccattatatgacagctatccgcacgagccaacaattttggcacggtttgtgccgaaaatctggcatggtcattcgagcgcgttcgcttgtttttttcctctttcagcccgtaccctatataagtaaggactt

SEQ ID NO: 12138 - DNA, 47359 bp, Unknown
  gut microbiota DNA sequence
agacggtcaagggagtccctttcaacctattgcctaatacacgatccgaaagtaatccaaatatgctttactggagtgctttgcgcgtcagtcatccaactccgactcatgcttgaggatcgcgccggtggcggcgttgatctcgtagtcatattccatattgccggatttgaactcgacctcgtagacgagtattccatcctcatcgtccagttcgatatccatgtcatacgcttcgttttcgctcacacctgcgtgattcagggcaatagattttgccttggcgtgaccgatgtccgcgctgccggacggctgggcgggatgggaggactgggcaggcgggctgacgggctgggagggcttttttaccgtgtcattccgagcggaaacggtggacggcaggtccttttgcccgctgatcacctttcccgtgtaagcgtccaccagatactcgaactcgccccacgccgtgtgcagctccacctcgtagtgggcgggaaattcgtccagttcggaatcgacctccgctgtgacggagtccagcgccgttgttccggcatactgctccgcggcataggcggcggcagctttgccgatgggcatggcaggcgcacccgcttccgcgagatcctttagttcctcgactgagagctttgccagttcgtcaaacttgagtgcggagttgagtgcgagcacgtggttcaccagcgccgcttttccggtggaaatgttgttttcccgggcctgctgttcccgccctgcgtcctgcgtgagcgtctgcgtcaggacggcggccttcgcttcgctcgtctgcagcacgccgtccacggtgttgctcagctcacgctggagcttttccgcacgggcggtatccttgtcctccaccgagatcatgatggcggaggaaatgctgtcgagatagccgttgcgcacgagacttcccacgatggcgtttaccgccacatcgagcttcgcgcccttgaggtcagctccattgctcatatccgcaaggatgtcttttgcatcctcgttgagcggcgtacagacgagcaccttttcactccgattcaccttcagctcaatgctggggttcacatccagcgacaccacggacgccaccgcgttcgctcgctggtagaacacgcctccgccgcccagcagcattacagcaaggcaggcggccacaagcgttgtccattttctatttgccattttctttgttgtcatgggaattaccgttcctttccgctcttcacagcgggagagaacgccgttcacatcatccggtgcggtcttttcaagagccgcggccagcctctgctccattttttcattggtcatcgggcgtcatctccttccagaaagctgcgcatctttttcaatgctctgtgatatttcgacaggacggtgggaagcggcagctccagcagcgccgcgatctcccggtgcttcaggcccgtaacagcgtggagcagcacgatgcgccgctcctcgtcagtgaggcttgccaatgcgccttgcagcagcgcacgctcatctgcgtccagtccgcactcccgcgcgggaatggcgtcccattcctcctcgctgagggcggcatggcgttcctcccgccgcaggcgcgtcaggcacagatttcggcatacagccagtagccagcccatgggcgagccggtgagtcggtactgctccgcgcggtcccacacctgcacatagacgtcctgtgtgagatcctgtgcgtcgtgcgcgtttttgaggtatgacagcgctaagccgtacaccgccgatctcgtgcgctgatacagctccgccagcgcttcgcgctcaccgccggcaatgtgaatcagcaactgctgcagctcgtgccgatcctctgccggagcatattcggttgtcatcagcatactgagcataggcttccatctcctgtcatccgtgtaatgcacggaaaggacgatttattgcatgggattttattttttatgattcttcaagttcaaattgccagttcttttctgctgacatagctgcacctcacttcttgcttaatatgcaattctaaaataatccaaatatgctttatacttatcctgtacggtcaggcaggtatctgtcagatagcctttttcattgttccattccttcaatccacggtaatagaacatcttcagatcgtcctcaatgatgaacggaacgatattgtatttcagacactccttaaacatgatcaatctgcccacacgaccgttaccgtcctggaatgggtgaatccgctcaaatttcacatggaagtccagaatatcctcaaaagtctttttttccttggcgttgtattccgtcagcaaggcctccattttatcggcaacttcttccggaagggctgtatctctgccgccgacttcattcaggagtttcttatactcgccaacagcaaaccaatcttttctggaatcgctggtgccgtttttcaaaaccaagtgaagttctttgatgaacttctccgtcagagctgcttttgcatgatcaataatcatgtcaatgcagcggaagtgatttgctgtttcgatcacgtcatccacattcagcacttctttttctacgccgatggtgttggtttcaaagatatatcgggtttgatcgtgtgtcaggcggcttccttccatatggttggaattgtatgtcaattcgatctgtgttttatggtagatcccaccggaacatttacttgccttctgttctttcagaatatccaacagagtagtcggtttatcttttcttttgttggtacgctccggcttttctgcgttttccggaatgttccatgtcttgccggtaagaaacgcaccgttcacacgcccctgggcgcagtaatttctaacactgcgctcggacacatcccattttttcgctatttcagcaactgaaagatatcgcatccatgatcctccaccataaaatccatcaaaaaaccacgttaatctattacatagtataccatgccatcggcaaaaatatcaatagcattcaaaacgaaattgttgtactttttgccgacacaggaaatgctgcttctggatatagaaatccggactccatcgaaaatgaagtccggtaagatattatctataaacttgacctcgatctcaagatttttgtcacatcgagactcactggtgtagtagtggtgtagtagcactaccttcaagcccgaaaaaccttgatattacaggggattttagagatttctgcaaataatgccgtgacacacaaaaaacagttttgccaaaacgcaattcctcttatgagaaatataaaaatccggaatgggagccgctgcttatcgggcggccgtgttctccaccatcagcctgcggcggtcacgctccagatagatcaaatggatcaggaaagtcaggagccagctgaccggataggaccagtacatgctctccacggtgcccaccgcttcaaacacggtgtaccgccagaccacccgcagcagacacgcgccgatgagggtggtgacggtgggattcatggagtggccaagtccccggagggtgccgcaggccgtttccatcaggccgccgacccactggaaccggctgagggccagcacccggaccacaccggcggcgatgaccgcgtcgtaggccggatcggtggactggacgtacagtcccagcaggggcgcctgaaagatctgggccagtgtgcacagcacaatgcccagccctgttgtcagggccagattgatccgaaagacccgcacggcccggcggggatcggaggccccgatgctctgaccggtgaaggtgatggcggactggtaaaaggtgttcagcgcggtgtggatgaagttctcaatgccggaggcggcggagctgcctgctatgaccacggagccgaaggaattgatggcggactggatcatcacgtttgaggcggagaagagaacgccctgcagcccggcagagaagcccagccgcagcatttggcccgtccggtccggatacagccggagcttccgcagctccagacggcacggcccccggaaggtacacaggcggaccgtcaccagcactgcggagaggagctgagagacagaggtggcaatggccacgccggccacgtccagagggatgaccaccactaacagcagattcagcgcgacgttcagcgcgccggagacgatcatgaacagcaggggataaaaagtgtcgcccaccgcccgcagcagagcactgccgaagttgtagaccaccagagcggggacgcctaagaagtagatccgcagatacagcaccgacaggggcagaacgtcctccggggcgtccgcccagcgcagcaggggggtggagagcagaagcccgcacacgcaggccagcagtccgagaataacgctcagcaaggcggcacagtgcaccgtccgggacaggccctgtgcatcctttgcgccgaagtcccgggcggccatgtagttggcgccgatggagacgccgttgaacagcgtgatgatgaggaaaatgatggaggtggtggagccgacggccgccagagaggcgtgacccgcatagcggcctacgatgatggagtccgctgtgttgtacgccagctgcaagatccctgtcagcatcaggggaatggaaaagcgaagaatcgcggggagcagaggtgcttcccgggaacacacagtttgtttcaacatgtttcctcccgtccggtccggcggatgccgaagctccgccagctaaagatgagtattgcagaaaggtcggagcttgtcaatagccggggcaagcaggggaagcgccgcagaaatggccgtatcggcagatgaacgccgtattgacaggaacgggcgcggcccctataattgtccgtgagagaaatacaaccggaaaatcggaagtttgtgaaggaggtcctatgagactgatttgtgcgaaaaattatgatgacatgagcctgaaggctgcgaacatcatcgccgcgcaggtgtccctgaaccccaagagtgtgctgggccttgccaccggctccacccccatcggcacctaccgccatttggttgagtggtatcagaagggcgagctggatttcgggaaggcggtttccatcaatctggacgaatactgcggcctgtccggggagcatccccagagctaccgccgcttcatgcgggagaatctgtttaaccatatcaatatcccggcggacagaagcttcctgccggacggcacccagaccgacagcgctttggagtgcgcccggtatgaccggatcatcgaggagcataacggcatcgatctccagctgctgggcatcggccgcaacgctcacatcggcttcaacgagccggacagctgctttgcctgcggtacccatcaggtgaccctgacggagagcaccatcgccgccaacacccgcttctttgaaaacgaggcgcaggtgccccggcaggcgtactccatgggtatgcaggccattatgcaggccaagcgggtcctgctgatcgccagcggcgcggacaaggcggaggccatccggaacagcttcttcggccccgtgacgcctcaggtcccggcgtcgatcctgcagctccaccgggatgtcatcgtcatcgccgatgaggctgctctggcggactgcccggcagaggcgtaagtgaatcgctgcccgttaagaggacggtaaacatatagagcttcccggccggcagtcaaactgtcggccgttttttcgtgcagacgctgttgcgcacaggcgtgagccgtgggaaacaccgtgtcaccggcggcggtggatgccttgcgcaccgctgcttgcacctgcggatagattgccatgttcctgatgcaaaacagtaaactgaccgttgaattattctttacatttcccgtatgggtatggtacaatgccaccggaatcaggagacacgagggggaccttttatccaaaaggagcaaactacggcagaactgattaacattaaaatcaagcgctgacagagtgcattgaggacaatctcatccggtatattctggatgaacggctggcggtgggtgcaaagctgcccaacgaatatgaactggcggaccggttcggcgtcagccggggaatgatccgggaagcggctgaagctgctgggctacgaggccatcaacggccttgccatgatggccgtcagcacactggtgttcggcgtgctgaagctggccggctgaccgggaggatttctatggcaaagatcatcgcgcctgttgtcacgatcttcaacgaagaggaaaagcccgactacgcaggcaacaaaaaagtcattgattttctgatcgagggcgggctggacggcattcttgtgctgggctccgccggagagttcccggatctgaacgagcaggagcgtctggacttcttccgcttctatgcggagtatgtcaacggacgggtggagctgctggctggtaccggctgcatccgctatgccgatacgctggccctgtccaacgcggtgtatgagctgggctacacgcccatggtcatcagcccctactatttcgagatggatcaggaaaagctgttcgtctactatgaccgtctggctaaggacgtgaagggggacctgtatctttacaacttcccgccccgcaccggacattccatcgctccggagacgatccgccgcctgatcgacgtgaaccccaacatcatcgggctgaaggattccgtgtccacccccggccacaccaatatggtgtgccgggcggtagaggggaagcccttcaccgtctactccggctttgacgaccagttcctcagcaacatcgccaacaacgggggcggcgggtgcatcggtgcgctgtctatcatcgtgccggagatctggagcagtttggtgaaggctgccaacgaaagggactttgcgcgcaccttcgccctgtaccacctgatccagaagctgatgcccatttacgatatggacaccaactgctccctgatcctcaaaaagctgctggtgcaccggggactggagatcagcgaccgggccgtttgccccttcaaccagatgaacgccgccatctatcagagcgccgcagatctgctggacagcgtgttggctgaataccggtccatgcgctgacggggaaaccgattcaaggctggcccctcggtcggcaaatacaataacagtaaaagggcagggccggacagaaattttctgtccggccctgcttgctgtgttctcttttgcatcgtttccggcaaattcacaatacagtcattgcaccgcagggcggggcgttgtccaactcgggcattgtgaaacaccgtggtttgtggtaaattaagtccataaaacaacggaaagaggaatacacatgaaggatttccggcaggaattatatgaaaacggctacttccggcaggaggagctgtgctttgccgactgcgaccggtatcagcgggcaagggtctccggccttttgaacaaggcggcggcctacgcggggtatgactacaacgcccggggcctgacccatgacgtgctgtttgaaatgggggaggtgttcctactctcccggctggccatgcgcatccatcagatccccatggcgggggaggtgctggacatcgccacctacgaaaacggggtcaagggcgcgcatatgcagcgggtctacgagatgaaggatcagaccggtgaggtgcgggtgtcggtgaaaagcgactggatcctggtgaaccccaccacccggaagatcatgcggccctccgcctttaccgccaagcccatacagacctgcgaccgggtcatcgactgcccggacccgaaaaagctcctgctgccccacgagggattggaggaactggggacccggcaagtggtctggtccgatctggacggcaacggccacctttacagcgccaactacggtgacattatctgggactacctgccctgtgacttgcaggagcggacgccccgggaattctacatcaattacaaccacgaggctacctttggcgaaacgctgcgtctggtgggcttccggaacggggacggcagctatctcatggaggccctaggcccggacgccgcctgcttcaccgccctgtgcgtgttttaatttataatctttagtacaaggacaaatgtctctggtaaaaatacaaaatgtgcttgcattttgcggcaagacccgatatcatgatattgtaataagtaataccattggggcgtttgcgccgcaaaagtaatgccaagcggggctgacgcccttctcttacaagtaaataggcgctgggggtgcggtggggaaaccggcgcaccccctgttcaaattgcggtcagccccctgagggctatgtcggaatcgggaggaacgaacgagcggagaagcgatcggctgcggaagaaaggagcggcgcatgaagaatctgaaaaagctgacgatcctgcactcgaacgatatgcatggcgattttctggccgaacagatcgacgagcggctggtgggcggcgtgtcgctgttgtcgggctatgtcaataaagtgcggcgggaggaaaagaatgtgatctacgccgtggcgggcgatatgttccgcggcagcgtcattgattcggagtacaaggatacctccaccatcggcatcatgaatctggtggggccggacgtggccaccatcggcaaccacgagatcggctacggcctcgcccatctgctgtttctggaaaagtgcgcggattttcccatcatcaacgccaatctgcacatcaaatccaacggacggcggatgttccggcccttctggatcgcccatatcgacaatatgaagatcctgttcatcggcatcatcacggaggaggtgctggccgccaccaagacggatgagctgatcgggtcttttgtggacatcggggaggcggcccgggaggtgggcaatatctgcaacgcctacaacgccatcgacattgatttcaccgtgctgctgacccacatcggctttgaggaggacaagaagctggcggcgatgctggacccggactggggcgtggacgtcatcattggcggccacagccacacgaagctggaggagcctttcaaggtcaacgatatctacattgtgcaggtgggcaccggcaccgacgagatcggccggttcgacatcatggtggacaccgacctcaacgccatcgacacctttacctggcagatggtccccatcgacgatgtccactgcccccgtgacgaggaggtggagaacttcattcagcgctacaggagcgccacctctcagaagtatgaccgcatcatcacccgtctttcctgtgagctgacccatcccaagcgcaatcaggaaacgtcgctgggggacctcatcgccgacattctgcgggacagcttcggcatcgacctgatgctcatggggtccggggccatccgcagctacgccctcggcccggtggtccactacgcagaccttgtggagtgcctgccctatgacgacgcggtgtatatgctcaaagtcaccggtacccagctggagcggatgatccgccatatcctgcgggacgaggctttccagggggagcacacggagttctaccagttctctcacgggacgcacatcgtctggtcccggagcgagcaggccttccgcaccctgacactggacggcgaggccctgtacgctgagcggctttataccgtggcagtgcagaagtaccactacaacaacctcaagccgtttttggacatcacgctggaggaggtggagaaaaacggcaagatccgggtgctgtccacctccgcccgggacgtggtggaggaatacctgacggtgaaccagcacctcagccgggaggtggagggccgcctggtgatggaggactgagggccgctcccggaaaagcgacgagtttcctgaatggatctctggtacagaaaagcggaaacgagacggcgttctctgatgtgccgcataaaaatacccgccgcagtgaaaaactgcggcgggtactgatatcagttccattcctcagccaagaggaagtcgcggatattccggtgtttgatcccgtttcggctcatatcgaactcatcgagagaaacaacgtacttcgggaagttgtcgcggatgctgtcatacgcaccaaactcacggttgacggtttcttccgatgccagcaggtaaatgacctgaacatacagcttttcgccgcgcttgtcgcatacaaaatcaatttccttatcgcccgttctgccgacagtcacttcatagccccggcgcagcagttccagatacacgatattttccaaaatgagattgatgtcccgcatattgccaccaaagaccgcctcgcggataccatgatcggcaatataatacttctcgttggacgcaaggatctgtttgccctgcaagtcctcccgtttcacctgatagaacaggtacgcctcacagcagtatctgatatagttcagaatcgtttccggggcaacggtgcgttgctcgtttttcagaaactttgcaagcgaggtcgccgagaaggtcgttcccacattggcgatcacataggcaatgatccgttccagcaaatctacatcccggattttattccgcttcacgatgtccttgagctggacagagttgaacagatcgtgaagatattgcttggacggcgcatccgcatatcggagatttgcgagatagggcatccctccggcgagcaggtacttttggaaacactgctggatggacgcatcgggggcaatcgaacggtacagctccatgaactccccgaaggagaacggatagatcacaaactccacataccgaccgcccaaataagtcgcaagctcaccggacagcagctttgcattggatccggtgatgtagatgtcgcaatccagcgaaacacggagagagttgatgcacttctcccagtccttgacctcctgtatttcatcaaagaataaatagaccttgccctctatttctgcggctcttgcggtgatctcatcatgcagcgcctgtgcggtttgcaggtgggaatagctcatatcttcaaaattgatggagacaaactgcgtcgagctgacaccggactccgtgagttcctgcttgatcagctccaacatgaccgacttcccgcagcggcggataccggtcatgaccttgatcagctccgttccgataaacggacggatgcggctcatatacagttcgcgtttgatcataagtcttagcctcctttccgtggctgactatagtatagcacacttacggttgaaattcaatggagaaattgcgagtctataagctataactgatgaaatataaaatttgacacaaagcgacagttacgaacagaaaatgtatggccagttatcaaaaggttccgaggcgcttgcggtggtggaggactgagggccgctcctggaaaagcgacgagtttcctgaatggatctccggagcagaaaagcggaaacgaaacggcgctcccggtcggagaagaatctccggcagagggcgccgtttttggtgctgtataagtctgtgtcccttctgcagaactgatccgggattggctttttatggcaaaatttacaattccaatttgccgggattccgcaaatttttggaaatgctacgaaagataggtcgatctatcaaaaccggattgacaaagcgcttcatgagtggtactgtaaccacatcttacgagaggggtgtggacaggatgagaaagatgttcgatcatactgtcgcagcggctgccaaggcagacgccgtatcctcttgcgccgcaagctcccgctctatgatcgccattattatggacgccattatggcgtccatttttgttgccattatttccattattggcacaattccatatggctggcgtggggtacagaacggttgagcttgtaagaaaaacgagccgaaagcggtcccgctggtcagcggggccgctttttttgctacttgtacggggaggaaatcgacatgaaactcacaggcgcgcggatcttgatggaatgtctgcgggaacagaaggtggataccattttcgggtatcccggcggcacgatcctgaacgtgtatgacgctttatatgactgcaaggagatcacccatattctgacttcccatgagcagggggccgctcacgcggcggacggctacgcccgcagcaccggcaaggtgggcgtgtgcttcgccacctccggccccggtgcaacgaacctgaccaccggcatcgccaccgcgtacatggattcctcctcggtggtctttatttcctgcaacgtgccccagaacctcatcggccgggacgcgtttcaggaggtggacatcaccggcattacgatgcccattacaaaatccacctatctggtgcgggatgtgacaaagctggcagacacggtgcgggaggccttcgccctggcccgcagcggccgccccggtccggtggtcatcgacatcacccgggacgtgaccagcgccgagtgcgactacgagccgctgcctctggagcagcacgccgcctccgggcatctggcatccttgatccgccgggcctacaccagcagcctgaaaatgccggaggcggatctggacgacgtggaaaagctggtggagatgatcgcggaatccaaaaagcccatgctgatctgcggcggcggtgtggtccgcagccgtgcccacgaggaattccgacagtttgtccgccggatcgacgcgccggtggccatcaccgtgatgggtggcggcggcgtttccggccgggacgtgatgaccaccggcatgatcgggatgcacggctccgtggcctccaacatggcctgcgacaactgtgacctgctgatcgccgtgggctgccggttctccgaccgggtggcgttgaagccggagaccttcgcgcatcaggccaagatcgtccatatcgacatcgaccgggcggagatcaacaagaacgtccagacggaccaccacatcatcggcgacgccaagcaggtcctgaatctgctgctggagcgcctgccccagtacgagcataaggagtggaaggacttcgtgctctccttcccccgggaaacggagtacggcgaaagcgagagcgtcctgacgccgaagcaggtgctttccgccatcgcccgaaaatgcccgcaggactccatcgtggccacggatgtgggtcagcaccagatgtgggccatccagcacctgcatttcgactatcccggccagctcctgacctccggcggcttcggcaccatgggcttcggcctgggggccgccatcggcgccaaacaggggaacccggacaaaacggtgatccatatcaccggcgacggctgcttccgcatgaacggcaacgagctggctaccgaggcctattacggactgccggtcatcaccgtgatcttcaataaccggaatctgggcatggtccggcaatggcagagcctgatctacgaccaccggtattcccagacgtctctggaaaaccgcagcccggacttcgtgaagttcgcggacgccttcggtctgaagggccgtcgggtcacccagcccagcgagctggaggaggccatcacggaggcgctggcagaaagcgctcagggccggggctacgtcatcgactgcgccatcaacgctgacgagatggtgcaccccatggtcaacggcggccatcacatcacggaattcctgctgagctgaggagaggaggacaacatcatggaaacgacattacgcaccttttccgtcctggtggatgacgagcccggcgtgctctcccagatctcccggctgttttcccgcaaggggttcaacatcgaatctctggccgtcggccccacggaggaacgcggcctgtcccgcctgacgctggaggtcctgacggacgaccagcagacggagcttttgtgcaaccagctgtccaaaatggtgccggtacattccgtccggctgctggcggaggaacactccatccgccgggagatggtgctctgcaaggtccgggcggaggagcggagcgtccgcagcgagctgatccagctggccaacgtgttccgggcctccattctggacgtttcctccacctccatgaccctggcagtcatcggggaggaatccaaaaacgaggcgctgacggacctgctgcgggagttcggtattctggaaatggtccgcaccggcatggtggcgctggagcggggccggtacaccattcaggacgagcggaaggaaacactggaattcaatcttggaaaaatgctgtaaatcgggcatttatcattcatttcaacacaaaaccattataaaaaggagaaatctaccatggctaagatgtattatgaaaaggattgcgacctgaactatctcaacggcaagaagatcgccgtgatcggctacggctctcagggccatgcccatgccctgaacctgaaggactccggctgcgaggtctgcgtaggcctgcgggaaggctccaagaactgggcgcaggcggaggccgcggggcttaccgtcaagaccgttgccgaggccgccaagtggggcgacatcgtgatgatgctcattaacgatgaggtacaggccgacgtttacaagaaggatatcgccccctatctggaggaaggcaacgccctggcctttgcccacggcttcaacatccgctacaagcagatcgtgcctcccgccggtgtggacgtgttcatggcggcgcccaagggccccggccacaccgtccgctccacctatgtttccggcaagggcgtgccctgtctggtggccgtggagcagaacgccaccggccgggcctacgagatcgcgctggcctacatcgccggcatcggcggcgcccgggcgggcatcatggagaccaccttccacgatgagaccgagaccgacctcttcggcgagcagaccgttctgtgcggcggcgtggtggatctgatgcagtgcggcttcgagacgctggtggaagccggttacgccccggaaaacgcctatttcgagtgcatccacgagatgaagctcatcatcgacctcatcaacaagggcggcgtggccgctatgaattactccatctccgacaccgccgagttcggcgagtacgtctccggcccccgggtgctgccccacgaggagaccaaggcccggatgcgggcagtgctggcggacattcaggacggcacctttgccggccgctggatcgcggagaacaagagccggggccgtaccttcttcaactccaagcgggaccagctggccaagcacctcatggagcaggtgggcgaggagctgcgccgcaacatgatctggggcggcgacaaggatctggacaccgcctccaactgaccgaggggaggagaagcgtatgcgttctgaacagatcaagaccggcgtggagcggacgcccaaccgcagcctgctttacgcgctgggctataccgatgaggagcttgcccggcccctcattggcgtggtcagctcctataacgagatcgtccccggccacatggggctggacaagatcgccgaggctgtaaaggccggtatccgggccgcaggcggtacgccggtgatgtttccggccatcgccgtgtgcgacggcatcgccatgggccatgtgggtatgaagtattctctggtgacccgggacctcatcgcggattccacggaggccatggtcatggcccaccagtttgacggccttgtgatgatccccaactgcgacaagaacgtgccgggcctgctgatggcggcggcgcggctgaatatccccaccatcttctgctccggcggccccatgctggcgggccgcctcaaggatggccgccgcacctgcctgagccacatgtttgaggcggtgggggcgtatcacgccggaaagctggacgaggccggggtggcggattacacagaaaacgcctgtcccacctgcggctcctgctccggtatgtacaccgccaactccatgaactgcctgacggaggccatcggcatggccctccggggcaacggcaccattcccgccgtgtactccgcccggctgcggctggccaagcagaccggcatgaagatcatggagctggtggagaaaaacgtccggccccgggatattatgacggaagccgccttccacaacgccgagaccgtggacatggcgctgggctgctccaccaacaccatgctgcacctgcccgccatcgctcacgaggccggggtggagctggatctgcgcatggtcaacggcatcagcgacaagacccccaacctctgccatctggctcctgccggtgacacctatatcgaggatctggaccgggccggcggcgtctgggccgtgatgaaggaactgaccaaggccggcctgctggatacctcgctgcctaccgtgacgggtaagaccgtaggggaaaatctggaaacggcggagaatctggacaccagtctcatccgcccgctggaggagccttattccaagaccggcggcatcgccgccctgtttggcaatctggccccggacggctgcgtggtgaagcagagcgccgtggccccggagatgctgcggcacaagggtccagcccgggtgttcaacagcgaggaggaggccatcgccgtcatctacgccgggggcatccgtcccggtgacgtggtggtgatccgctacgagggacccaagggcggccccggtatgcgggagatgctgaaccccacctccgccatcgccggtatgggactggacaaggacgtggccctcatcaccgacggccggttctccggcgcgacccggggagcctccatcggccacgtcagcccggaggctgcctccggcggcgtgattggtctggtgcgggagggggatctcattgagatcgacattcccggccggtccatccacctgtgcgtggaggacgcggagctggcggagcgccggaaaacctgggtctgcccggagccgaagatcaagagcggctatctgacccgctacgccaagctggtgtcctctgccgacaagggcgctattctgcaatgagggcggaacttatgcacacagttgaggcattagacagcctgattttgttccggcagaagccggacagccttctccggcggctcatggcgacggaggaagccgtccgcgtggccgctcagggggagctggtggcgctggccgtggaaaacggctggcagggcgacctgtggcgctgctgtatcgcccgggagcttgtgtcaagcgaaaaccctttctccctcgcgtgggagcggcattccggcggacaggacacactggaagcattggcactggcagatatgaagctcttttttgagctgttgaacgcgccgctggagggcggggtgtggccgctgctgcgggacttccgccacgagagccgccataccgcagattgcgcctcgtttctggcgttcagtggggaactggccgccgccaattccccggaggggctgctggaccgcctgacggcgttctaccagacccggggcgtcggtctgctgggcatggggcaggtgttccgggccagaaggacagggaacggcgcggagctggtccccgtggaggaccgtcctcctgtgcgtctggcggatctggtgggctaccggcagcaaaaggatctgctgatccgcaatacggaagcctttctgcgggggaagggcagcaacaacgtgctgctctacggcgatgccggtaccggaaaatccaccagtatccaggccctcgtcaacgagtacgccgatcagggattgcggctcattgagctttacaaggagcagtatgacctgatccccgacattctgcggcaggtaaagggccgcaactaccgttttcttctgtttctggatgatctgtcctttgaggaaaacgagacctcctataaatatctgaaggccgtcatggagggcggggcggaggcgccgccggaaaacgtgcggatctgcgccacctccaaccgccgccatctggtgcgggaggtgtggagcgaccgcggcgatgtggagcacaacggcgacattcaccgctccgataccgtggaggaaaagctgtctctggccagccgcttcggcttgcagatcttctacccggcccccaccttcgaggaataccagcagatcgtctccgcactttcggaaaaggcggggacggacctcccgccggaacaactccgggccgcagccgccacgtggcaggtccgcagcggcagccgttccggacggacggcccggcagttcgtggaccagctggagcattgaactgattagatgtaattgcgaggtcctctcggtccttatttcggtgtatctgcacgtttttgggaaatgaaaacggtataagcacaaggggcataaaagaaaaacacggcatgcttgccgtgtttttctttgcgctttttcactctaagccgcgccattatcagagaaattccgaatttgcggtaaaatgtgcgtccatttccgcttgcgcctgcgcaagggcctcctccggcgtacagacgccgaggactgcccgctgcacataggctgccaggatattctccatttgcagctcgctgaagttgctgtaataggcacttccactccggcgctgggcgctgggaaagctgcggcgggccgcagacagccaaggataccgctccttgatgtcccggttgctgtatgccgaacggcagggtgacaacccgcccagtaaggtgaacgccggtgcggtctggttggaatacagccaggacaaaaacgcacaagccgtttccgggtgcgcgcagcttcgggtgattcccaccacgccgccgcctgacaggggcttgccgcctggtaccggcgcaaagccaagcttgccggcgatgctggacatcttggagtttaaaatgtgggaggcatagttgataaacaccactgtcatggcggcggagccatccgcaaagccttccagcacgtttttccagatgtcatgcacggtcctgtcggagcaggcatacgtttcccggtagtttttcagggctgccaaggcttccggggtgtcgacagtgatctggcctttggcgttgaacagctttccaccctgctcaaacaaacggggcagaaattcactggggcttaccaccacgttgccgatggctaccgtcgtaccatactgcacaggggaagccggattgaggctgcgggtgaaaaagcctgcgatccgattgtagtcttcaaagctctttggaacctccagttcccgccggtaggcttcaaaatacattcgcttgtaggtggggtcgcaaaacaaatcccgccggtaaaacataagctgtgtgctgggatcgtaggggacgcagatgcgctctccgttgacggaggtatagctgtctccgaactccggcagcgtctgcgccagcagacggtcccagtcaaagggaatttgatggagcggccgaaacagctttttagcaagctcgtccatccaggccacatccatccggatcagatcataccgtccgctgccggaggattggatcacctcgtagacatctctcagggaagggagcaccgtcagttccaaatggatccctgtgcttttttccagatgcggcagcaggcgtttcaacgctgtggtggaaggggacgccatcgtgagcatccgcaggtttgattctgtcaactgcggcaccggcacctggtttcgaaaaccattgttctccataaaaagggtcggcggcaggggggatcgcgttttcaggtgcgccaacagagtcttaacaatccggtgcgccagacgcttgtaatccagctcatatgccaacgccaacggatcggtcacagcagaccggggggcagcagacacgatcagcggcagcggccggcggctggcataagcacaggccgcccggacagccgattcccggcgctgatccgtgcatacgatggcatcaaacggttcgtcctcttcaaaaagctcaaaggcccgcagatccacctgatgatttgggcaatccagaacacttgtctcatccgcacagactgtccggaatccgtttagaaacagcgcggtatccggaaacgcggcaggctctgtaaaaataccgatccgccgcagtcctttccgccgcagatgccaggcgatgtctgttcccattcgctcgggatcgaacgcggcatacataacattttcgagtgcacggctttcccgagaaaggagtacaattggaagctccggggcctctgcccgataatacgccgcggcatccaacagacacgaacggctgatgaccgcgctgacccgctcagccagagcagaggccagcagttctttctcagtggtctccatagagcgggtggaatatagctgaactgagtagccgtgccggataaactcgttctggaatacctcatacatggccgcccagcggcggtcctcaatgctcggcagaagcaccgcgatgctgcggtcctgaccttgccggaggctttgcgccttgctgttgaccttgtagcccagcttctccgcagcctgccacaccagttgtatcttctccacgctgacgttgccccggccgttgataacgttggagaccgtcccgtgggaaacacccgcctctcgggcaatatccttgatggtgggcatacgtcatcctccccctatgcttgtgatacatttattttactatgattttgctgctgcatcaagtcaatggacgcaagagcgcactgtgcaatgcgctgattgttgttcatattatatatgcacaataacgaaaacgatgagaatatgtatgaaatgctaaaataataattgacacgttccaaaatatttggtacggtatagatgcagaaacgcaccgcgttttcctcaaaatcaatatgatgaaaaggagctgtgtcccatgaagaagtttttgagcttagcactggcgctgactatggcgctgactctggccgcatgcggcggcaaaacggatacccctcccgcagacacgaatgacggcagcaccgcaggacagaccggcggcaagctggtggtctattccgcactgaacgaggacaataccatcgccatcgcagaccagttcaagaaggataccggcattgagatcgagtacatctctttgggcggcggcgatgccgtggcccgtgtgcaggcagagatggccaatccaaaggcagacattctggtaggcggctctgtggacctgtatggctctttggccaccgcaggtgcttttgaggcatatgactctcccaataatgacagcctggatgcccgctttaacgatcccaatcatttctggcagggctggtacatgggcgttctgagcatcatcatcaacgaggagcgctttgagaaggaattgactcccaagggtgtcaagatgccggaaacctgggatgatctgctggatcccaactataaggacgtgttcgtgtgggccaaccccaccacggccggcggcgcttacatcgccactgcctgccagatcttccgcttgggcgaggacgctgcgtgggattatctgaaggctctggatcagaacgtacatcattattataagggtgccggcgatgtcatcagccctgtggctaccggtgagttcatcgcctccatcgcctgggctcatgatagcttcaagatccagcagcagggctatccgctgaagctcatcatccccaagcagactgcttatgagatcggcggctccgccatcattaagggtggccccaacaccgagaacgccaaggtgttcatcgactggctgctgacgaaggaagcgcaggaactgagcgttgctacttcctaccgctatcctgtccgcgccgatgtggcagcccctgccggtctgcccactctggaggaagtagaccttgttgactatgaccgtgatcaggccgcttctatgaaggaagccgttctggagaagttcgacgctgagatcatttccaaccgcgcctgatttcatttctcatttacccttgggccgcctgcctgcgttgtgggcaggcggcccatgctatttttagacaccctatactttcaacgaacctcttttatcaccttatcggaaggagctgatccttatggcctccggtgttgcgctccgggaatcggtcaaagaaatgaagcggctgaaaaacgaaccgcttttaatgctggccattatcgcgattatccttttcgttggattcttcgtggtatacccggtgatccgggttatcacgttccccagcggacaggactatatgcagctgttccagaaagcccgttggtttacagccctgaaaaacagcctgttcatgaccctgatttccacggtgtcctgcacggcggtggcattcctctttgcatacgttattgcccggctggatgttccttgtaaaggccttttcagatttgtgacgctgttgcccatcgtgtccccgcctttcatcgtggcactgagttatattctgcttttcggcgtacagggtatcgtcaccaaacagcttctggggctgcatgttgatatttatggccggctgggcctgtggatcgtccagaccgtcacgttttttccgtatgcatattctgtcatttatggcgtgatccgctccatttctaccaatttggagtatgcggcctataacatgggcgctccccgctggcgtgtattcaaggatgttttttggccgctgtgccgccccggcgtggctggcggtgcgttggtggctgccatcaatgtacttaccgacttcggcaatccccagatgattggcggagatctggccctgttacccacagaggcctatatgcagatctccggttggtacgatatgaagaccgcctctgtgctggcggtggcactgctggtccctgcggtggtgttattcctggtgaagaacttctgggtgggcaaacggtcttatgtgacaatcaccggcaaggagatctccttgaaccccttcccggttcccaagtgggtcaaatgggggctgttcagcctgacgatgctgatctccctctttatcctattggtctacggtacgcttttctacggcgcgtttaccaagacttggggctatgactggtcgctgaccatgaagaatatccagtatgtgttcctgaagggaaagcagatctggaactcgatccgctatggcttcctggcttctctgggagcttcgttcctggcgatggtcctggcctacatcgtgcagaagaagcaggtgggcattaaccgcctgttggatttcctgggtattctgcccggcgccattcccggtatgttcctcggcatcggcttcgtgatggcctttaatgcgccgccccttgagctgacgggaacctccgtgattatggttctggccctgctgttctggaatattcctacctgttacagctctgccacggcggggctgcagcagatcggcgcatctgtggaggatgcggcgctgaatctgggagccaacagcttccgttcctttaaggacgtcatcattcccttgctgaaagcgccctttatgtccagctttgtgttgtccttcctgcggtccgtcacctgcctgagcgtggtgatcttcctgtatgcgccctctactactgtgggcaccatctcggttatggtgctggtgcagagtggacagtacggtgaggcggcagcctttaccatcgtactgatcaccattgcgttcaccgttttgaagttggcgcagtgggttttgggtaagcagggcattgagctggaattgtaaacaggaggcgaagagatatgagaccttacattgaatttaaaaatgttgttaagcagtttggaaactttacggcactggatcatgtgtctcttgagatcccaaagggtgcttttgtgacgcttctgggtccctccggctgcggtaaaacgaccctgatgcgccagttggccggcttttccgagccggaatcgggtgatgtgttggtagacggcaaacggatgaacggactgccgccctttaagcgcaacaccccgctggtgttccaagagtacgcactttttccccatatgactgtctatgagaacatttcctatggcctgaagctgaataaaacccctaaggaagagatggatcgccgggttcaggaaatgctgaagatgtttaacctggtagggttggagaagcgattccccaaggagatgtccggcggtcagcagcagcgggtggcctttgcccgggcactggtgatgggccaggaaatcctgcttctggacgaacccctttccaacctggatgccaagctgcgtgtggacgtccgcacggaactgcggcagatccagcagaagctgggcatcaccactatctatgttacccatgaccaggatgaggcactctccatgtccgacatcattgcggtcatgcgcagcggacacatcgagcagatcggctctccttgggagatctatttccggcctgccaaccgctttgtggcagatttcgtgggcacggtcaatttcctgaccgccagaattgtgtctgctgaaggcggcactgttgccgctgaccacaacgggatgctcctccagattcccacggaggtccctgtggaacccggcgagaccgtgacgctggtggtgcggccggagtgcatccgtctggcggaacccggagagtctgtgccggaagggaagagtctggaaggtcagatcgaaaattacagctttctgggccgcatgatccgctactgggtgcgggtcggtgaggaacagtttattatcgacgatgccaatgtggacctgagcggagccagaagtggagccgtgcagctctgtctggatacccgaaagctccacatcctgaaggatggagggagccatgacacttgattttatcaatgtgggctatggggatgccattttgattcgtagcggcagctccaccatgctggtggactgcggcgattggaccgtcggcgatggggggcctgattctcagcgaatctctgccgcggacttcctgcggcaggagggaatagagactctggatctgctggtgctgacccatcttcacagagaccacagcggcggtctggcgaaattgctggaatgcgttgcggtcaggagcttccggtgcaactatcttcctgacagaatcttctgggggaaacgtgtaccggtaccggaagaattttccgccggagccagatgcctgctggaatctctgaatgtattcttaagcgcacttgcgattatggaacggcagggaacagagatttctcttgcgtcccccggcacgtggccgctgacgccggaactgacagcagaatgcttcttggaagcgcagcctatttttgagcgtcaggctgccatctggcaaaatgtgctggaagaccgggccgacaatagagagctggaagagttggacggctttatcaacaacaccagcatccgcctgcggctgatctgcaaggaaactgccgtggagctgcccggcgatatgtatgccggctgctgggagaagcatgagatcccgccctgtacacttgtcaagctgccgcatcatggccaccgggattccattaccccacatctgctggatatgctggccccgaagacggttgtgatctctgtctccaacacccgtaccgatgattgtcccgctgcctctgtccttcagatggtgcgggagaagggctgcacgttgtatgttacagatgcgatcccagatagtaacgggcacgtgagtaaccatccagccattcattttgatatctaaaccggcagttgcctccgctgcgttcaagccggatcaaaaagtcagcgatcaattaaaatactactaccgccaaaacgaacagcgtataaaattaccctgccgattccggccaatgtcagtaagttaagctgacaaaacctcctaccctcagaaatgagagggtaggaggttttttcgtaataattcaaaacagggcttggcaaaagcatcatttcgtgcggccattttgctaacttcggttagcaaaatggcctttgtagttagaagcgtgtcccgacacgccaaactacaaggaggcttacttgtgaatccaaaaaccgtaaaaaagcactgaaagatgcaattcaagctacgaatctggatgcatccgctttccctttacatgatattaagaggcttcatgcgatgcgctggggtattgagaagctaacgcagaaatcttctgccagcttcacctgtagagtagcataattcatgtgatttgaacattctttttaaagcggattttccgatccgctttgttgtcatgccctgatgtcgcaaaaaacagcacacagcttgctttcgctttgctgtgtgctgtctttgtgaggttccttacttgctaactaagtgacattggccgaaaccggcagggtaattttgtgggctgcttattttagcggtcaagcacggtgatacgaaagcaccccgctgttacaggatcagaccgaaggcgatatagagggccgctgtgcacgccgcagtcaccagcgcataggggagctgcgttttcacgtgagaatacagatcggtgcccacggacatggaggacaggatcgtggtatcggaaaggggagagcagtggtcgccgaaaatgccgccggacaccaccgcgccgatggtcagcaggatgttgccgttcatagccaccgccatggggaccgcaatgggcatcatgatggagaatgtgccccagctggttcccgtgcagaaggccatcagcgcgcccatcaggaagatgatggccgggcagaaggcaccgtcaatgctgtcacccagcaggctggcaaggaactggccggttcccattcccttgatgacccctccaatggagaaggacaacaccagaaggatcaccagacccatcatgctgctgacgcccttcataacgctgtcgccgaactccttggcggtcatgatcccctgctttgtatacatgacgcacatgatgagcagcgtgatgacaacagagtagaggatcgccgtggttccgtcgcccgccgccagatttcctccgccggtgaccagcaggccgatgaaagcgccgccgatcagggtgatgagcgggaacatcatgttccacttgttctctttgccttcctccaccagttcctcaaagccgtcattgtcgttgagcagcggcgttactccatcatcatacagcttgccggtgttccgcacccgcagctctgcctttttcatggggccccagtcttttccagtgacaatatagaacagcacgaacagcagggagaggatgctgtaaaactggaagggaaggctccggatcagcagattcataggctcgccctggatatatccggaggcgatctccgcggagatcaggcccatcagcatagcgccccaggagttcaggggaatgatggcgttgacgggcgcggaagtcgcgtcgcagatgtaggccagcttttcacgggagaccttgaatttgtcgatcagcgggcgggtcaccacgccggtgaacatgatgctgagcagaccgtcgataaaaatgatgatgccgatcacataggcgatgagcatcgccatccgcgggctcttcacgcgcttgctctgctcggtcaggtaattgacgaagcccttgacgccgccggagatgcgcaccaggatcacaaacgcgcccatcagcgccgtgaacaggaaggttttcagatttccggtgtcggcgcaaacacttaaaatgccgttgacgctttcgttgatggcggcaaacggattccatccgcaaataatcagttgtccggtaaaaatgcccaccagcatggccagcggcaccttccgcgtcgcaatggccactgccagcgtcagaatcggagcaaccaaagtcaaatagccgtaatccataagtttttccctctttctcgatcaatactgcgcaaataaggagccgagcccgcctgtatgcaaatagcagacggggccggacactttttcctgttcgatccagtccatcatccccaccaggaccttgctggtatagacgttttcgatgaagatcccctcactgcgggcaaaggacaggactgcctgctggctctcctttgtgttttcaccccagccgccgccacggtaggcgtctgtgatctctgccgcctgttccaccgacacatccatggggagaccggtgatctcctccgcttcggagatggtggagcggatatgcgccgtcagcgtttcccggtcatcctcgacgctgacgatcacaatgcggaagggctggcccatcagctgatttccgtagatcagcccggccgcgacgccgccgtttccgccaggggcgaaaatcgtcatgcggccaattccaagatcctcgcactgccgcttcatttccaccactgcggcggtatagcccaacgcgccccggccggtggtcgcgccgttgcggaccacatagacctgttcgccggcggactggtaagcggcggccagctcctccatgcggcggttccgaaccgtgccgtcacaagggccgaggaagtgtattttggtacccagcagctcctccagcaggagatttccctctttgcgggctggctccgccgcgttgatgataagctcacagtccagcccggccttggcacaggccgccgcggtcagagcgcatagatttgactgctccggtcccgctgccaggattttggaagcccccttggatctggcttcccctaagaggaactcaaggctgcggatcttatttccgcccggaccgacaccggtcatgtcgtcccgcttgatgaggaggctgacatcctttcctgagggctggtaatgcatggggtgcaggggcgttggcataggcatgagcggcacgcggtctgtctcacgcagaaaacgttcgatcggtttcatgttctttctccaattagccaagtagtaatttacttgcttaaagaataacgggcattttgccgaatgtcaatctttttcgggggctcgccgccaattaccatgaaacgcacagaaacctcccggacctgcttctgtttattagaagatatacgcaatcgcgggcgcttttttcttgttttgggggcgcttgcggttgtgcgtgcttcggagggtctgaacagtgttagaaaagggatagaagagggaagggcctgtattgccccgctgtcacatcgtttccgctgcgctttcgggatggttggactgacggtccgcttcgtgagggcgggctttccgccgatgtccgataggcaggtgcatacgcatagtatgtatacaaatacaaatatactgtataacatttatgtttgcttatagcacccactatgcgcttatacgcatgaaacacaaatgcttccagtgtatacagccatattctcgtatatatttacaataattgaataattatacaaatttttgcaaatttgctattgactttcagcgtgagaaaatatacaatccgttcatccgaagcacacaaacggtgcaagcgagaaggaggagaacgccatgggcattacagagatatttttgaactactaccaatacttcctccgaggaacgcagaccaccgtcatcgtttccctgatcaccgttctgctgggcacggtcctcggctgtctcatcgcgctgctgcgattgtcaagattcaggctgtgctccgggtttgccaagctgtatatcaccgtcatccggggaacgccgcttctggtgcagctgtacatcgtttactatcagcttcacttcattccgtggccggagggttccattctgggcgtggagctggcgcgggtcatgccctgcatcctggccctgtccatgaactccaccgcctatgtggcggaggtcatccgttccggtattcaggcggtggacttcgggcagacggaggctgcgctgtcctgcggcatgacccggacgcaggcgatggtgaacatcatcctgccgcaggcggtcaagaacattctgccggcgctgggcaatgagtttgtgaccatgatcaaggagacgtccatcatccagtacctcggcgtcggcgacctgatgtacaacaacggcatcgtcgtcaccgccacctacaacccgctgccttgctactatatttccgcgatcatctacctgaccctgaacatcgtgctggggaaggggctggatctttttgagaggaggatgaagtgcagtgaccgctgacaacgttctgtttgagatcaagggactgaaaaagaatttcggcgatctggaggtcctcaagggcatccacaccaccatccgaaagggggaggtcgtggtggtcatcgggccctccggttccggaaagtccaccttcatccgatgcctgaacctgctggagacccccacggagggccagatcttttttgagggcagctgcatcaccgacaagggctacgccgtccataagcaccgggaaaaggtggggatggtgttccagcagttcaacctgttcaacaacttgacgatcctggagaatgtgaccatctccctgaaaaaggtaaagaagatcccggctcaggcggcagaggaaaaagccagagcgctgctgcggcgcgtcggtctggaggacaaggcggatgcctatcccgctcagctgtccggcggacagaagcagcggatcgccattgtccgggccatggcgatggagccggacgtgatgctctttgacgagcccacctccgcgctggacccggaaatggtgggggaggtgctctcggtcattcaggacctcgcaaaggagggcgtcaccatggtcgtggtcacccacgagatgggcttcgccaagaaggtggggacccgcatcctctttatggacgacggcgtgatcgccgaggagggcacgccccagcagatctttgaggccccgcagaatgaacggaccaaggactttctgtccaaggtcatccatgtaatctgaaacaacacagccgcatcaagtggcttacaaaaaattggaggaatttattatgttaggtacgatcaatcccgaaattctgtttctgcagcaggaagaccagatcaaggccggtcttttggatatgaagatgatcctgaaaatcacggaggatacctataaaatgctggggcagggccagatccagaatcccccgaaggtccatctgggcatcccggaagggacggagtgggaatccttcttcaacaccatgcccagctacatcggcggcgatatgaatatcgccggtatcaagtgggccgccgagtccaagaagaacgccaccacccccggcatcccttacggcatcgacatttccatcctcagcgaccccgtcacggtcctgcccttctgcattcaggacggcaccatcatcaccgccatgcggacctctgctgtggcgggcttgcaggcaaaatactgcgccccctccgacacggataccgcgacgctgatcggtgcgggcgtcattggccggaccatgatcatggcgatctgcgaggcgatccccaccgtcaagaccatttacctctgcgatctggatctggaaaaggcagagcaggtggccaaggagtccgagggcaagtatggcgtgaccatcatccccacctccgacagcaaggcggcagcggcaaagtcccagctgatcgtgggcgagaccaccgccagaacgcccttcatcgacaagagctgggtgaagccccacagcgccatcgtctgtgtttccaacgaggccacgacggacgtggtaaaggctgcggacgtgaatgtggtggattactggaagcagatcatcaccttcaagaacaaggccatcacgcaggtgttcgacgccggtgagatcaccaaggaggaagtgctggaaaccagcgacctggtgctgggcaagccctgcagaacctctgacgagcagttcatttacgcttgctctctgggtctgggcgcgctggacatcaccgtggcctacgctctgtatcagaatgcggtcaagctgggccttggcaccaaggtcaagctgtgggacaagcctctgtgggaataaacgccccggtcgaaaacgagaagaggagagaatattatgaaaaaagcgattgctttgctgctggcgttggtaacgctgctgtccctgacggcctgcgccggcaaggaggatgcggcctcgtccgcactggatcagatcaagcagaagggggagctggtggtcggcacctccgcggactacccaccctatgagttccatacggaggtggacgggaaagacaccatcgtgggctttgacatggagatcgcccaggccattgccgacaagctgggggtatccctgaaaattgtagatatgtcctttgacaatctgctgatgagccttgccaatgacgagttcgatctggtcatcgccggcctgaccgcggatgaggagcggcgcaagaccaccgatttctccgatccctatctggaatccaaaaacctgattttggtgcgggccgaggatgcggacaagtacgccagtcttgacgatctgaagggggtcaagggcggcgcgcagaccggctccaagccctataacaactgcgttacctactgcggcgaggagaccgcggtcggccttgccaaggtgcaggatctggtcatggagctggaggccggaaagctggatgtcgtatttctggactacatgaccgtgctgtcctatgcggatgccaaggaggatctggccgccgtggatctcggcatcccggagaccagtgacggctactccatcgccgtcaagaaggggaacacggagctggccgagttcattaacggcgttctggcggagctgaaggagcagaacgccatcgagcagttcattgtggaggccaagaagctggaaagcgcggcggagtaacgccggaatcaacgattcaaatttaagctgacacaacaaaaagagccgcgtcagcggctctttttgcgtattcttcttccggtttggctggggggtcacagatcacgccgccgtccggcaggggggagaggggttctgcatcgagcgtgggttccggcggcagaggggtggtctccgctgcctcaggcttggggaccgggggacggaaggtgccgtccagcttctgaaaacagcggcggtaggccgccgtatccggcgggtaaggggtgggccggtaatcattccggttggagacgctgctgacgcagcaggggatataggacatctcccacgaacggtccccgccggtgccggacacagtgagctgggcgatgaccgtgtccttgtccgacggattccggttgccgccgaagcagaaattgccgatgctgtacaggatcacgctgccctgataggcttctatgggctgcaaaacgtgagggtgggtccccaccaccacatccgcgccgcctttcacggcggcatgggccagcgccgtctgccgcttggtggggacgtaggttttttcggccccggcgtgcatgaaggccacaatgatgtccgctccctcatccctaagctgtttacagccatcctccatctgcttggcggagccgttgaaggggtggacgtaggcccccagccgcagggtgtccccattgccgtggcgcagcttgaagcattgcccctgattgccggggatcccggcaacaccgtattccgccagcgcggcctcagtgtcccggaggccggtgtcatcgaaatcgcgggtgtggttgttggacatggtgacggcctccacgccgcccagcaccagagactgcacatacttgggatctccgcagaaggcgtattccgagtcggactccagacggcgggaggaaaaggaacattccagattggccagcgtcagatcgtcagccagcagaagctccgctacgttggaaaagggataggcgtagtcgtcctccaccagcttttcaaagtggttggtgtggtggctggaggtcagggtgcagtcccccaaaaaggagatgacgaagggcgtcggttcggcagacagctcctccatctgcggcggggccggggggatctccggttctgaggagacgtccgttcctacagggccgtccggcagagtgaccgttccccctgacggaacggacgtaccagaagggtggaagtgccagaaaagcgtccccgcgaggaagcctgcggcaaaaatcaggacaaacagcagaatcggcgggcgcttccggggcagttcccgttttccgcgcatggggacctcacttcctttccgaccggccagttaaactgcgttggcaggttcgtttcaaattgcccggtcctcagaaaaccgcagtttcccaagcagcacatcgggcagttgaaattatatcatgcttttcaccaaacggaaagatgatcataaaaaaacaaatacactctgttatccctgtttgctgtcgaaacggggataattttttgctataatttttgaaaccgtgtaacctggctgccccaaagggtgcttatatgggtgaaggcccttcaatcgaaaccggaaggagatgaacgccatggatgaccgcagcatcgtcgcgctgtacctgcggcgtgacgagacagccgtccggcagaccgccgagaaatacggcagccgtctgcgcgcgctggcctacgggatcgtcaatgacttacagacggccgaggaatgtgaaaacgacacctacatggaggcgtggcacacaatcccgccccatgagccaagcgatcacttctacgccttcctcgcccggatcacccggcacatttccctgaattgctgccgtgaccgcagccgcctgaagcgcagcgcttttatctgtgagctcagtgcggaaatggagcaatgcatcccggcacctgatgagagcttgtgccgcatggatgatctggcacttcggacggccatcaatgactttctcggcaaactggatgaggaaaaacggaacatcttcgtccgccgttactggtttctggactccgtggccgatattgccaaacgctatggcatatccgaaagcaaggtgaaaacaacgctgttccgctgccgcaaccggctgcgggagtatctgaacaaggagggttacacagtatgagaggaaacgaactgttagataagatggaattgatcgaccccgcttatattgaagcggcggacgccgcaccgaataagcggaaaagtgcttgggcgaagtggggggcggcagcggcctgcctttgcctgatttgcggactggcggttcccaccatagcggctttcagcccgtcgttttacgagctgttgtacgccgtctcccccgccacggcccagttcttcaagccggtgcagcggtcctgcgaggataacggcatccgcatggaggtgacggcggcttacatccacgagaataccgccgagatctatctctccatgcgggacctcacgggaaagcgtttcgatgaaacggtggaccttttcgacagctatcggctccacacgccctttgactgcacgggccactgccagttggccagctacgacccggacacccacaccgccacatttcttgtgacccttgaacagtgggaccggcagagcatcgagggcgagaagctgacgttttccgttcaaaagctgttgagcggtaagaaaacctgggagggtacccttgacggcgtggatctgggcggcagcctgacctccgccacgcagacggtccaaccccggggtctgagcggggacctgttcggctccgacggcggaaaaagcgtgacggtgctgaaaccgggcgacgcgatcgcatctcccgtggacggcgtgaccctgacggggatcggctatgtggacggatggctccatgtgcaggtgtattacgcggacatcctcaaaacggacaatcacggctctatttctctggtaaaccgggagaccggcgagcaaattgagtgtgacggttcggcggccttcttcgatgatgcggggacgggcagctatgaggattatgtgttcaccggtattgaggccgacgcccttgacacttacgcgctgtacgggatgttcgtcacatccgctgggcccgtggagggaaattggagcgtgacgttcccgctagagaacaccgcggacaactgagggaccgagcgcacccaaaccggattctttttcattcttctgtttcactgtcctatagcggcaaaaatccggcgctgaaaagcgccggattttttgtgggagaaaacccacactttccggagactgtggagggggcaacaggcgcagatcgcttctgcctcgccacccccgcagaaggtgaagcaaacccccgatcctctaactgggacgcagttctctgtgctggccgtcctgcccggcctcggctgtttgacaggccggataaaggcgttccctccgtaattttacggctggaaaaggcagaaaaatacggatgatgtttacacttgcggataaaatcggtataattacatacaaaccgaaaccgttatagacaaagaagtctgttgaagcgcatcggagggcggaaccatgccgaaaccgaaatggaatttaaatatcatttacatatccgagcggctgcaggagagcctgcggcccatctcccgctgcgccatgaccacggtggtcgcccccatgggctacggaaagaccacggcggtgaactggtatctggaggagcgcgccaaggcggaaaccctgaaaatgatccgcatcagcgtatactccgacaacctcgccatcttctggaaaagcgtacaggaggcgtttgcccgggccgggtttgacattctgcgcaactatccctgccccacggacgccgcgggcggcggactgctggtggacgatctctgtcatgcgctggcagatgagacgccctgctatctcttcatcgacgattttcacctgctgaccgacaagcgcgcctcgctgttcctctgtatgctggcaaaccgcctgcccgcaaatgtacatctgatcgttgcaagcagggatcgttttctgctcgccgcggaggcggtgcggcttggggccaaagtgtatcagatcggcacggagcaactgcgccttaaccacaccgagctggccgtctatgcccaccgctgcggcacagagctttccgacgcgcaggtggaacgccttctctattccagtgaggggtggttctccgccgtttatctgaatctgcgcacgctctccgagcgcggcgtactgcccagccgccattccgacatctacgccacctttaccgccgccatgatcgatccgctgccggaacagcagcgggcgtttctggcagtcatggggcttgccgatgaattcaccgtcgaaatggcgcagtatatcataggcgatggggacgcggggcaaattctctctgcgctgacggagcagaacgcctttgtcacgcgcctgcaggacggcgctacctatcgcttccaccacatgatgaaggagtgtgccgagcgcagctttcaggcgatgccggcggaaacgcagcagtgctattgggagcgcttcggtctgtggtatgagcagcaccggcagtatctccacgccctcgccgcttaccggaagagcgggaattacgacgcgctgctgcgggtcatccgcagcgatgcgggcatcctgctggcgtcgctgaagccggaggatgtgctgacggcgctggacaagtgtcccgccgaaacactgaaggcctacccctttgccattctggtgctgatgcgccagatgttcacctggcggcagatcccgaagatgctggaactgaaagcgctgctgctgacggccatcagggagcatccggaactgtccgcagaagagcgcggcaatctgctgggagaatgcgacctcattctgagttttctctgctacaacgacatcagcgccatgagccgcctgcaccgcagcgccagcgcgcagatgtcccgccccgccatcagcatccagtcgagcggcggctggaccttcggctcaccgtccgttctgatgatgttccaccgtgcaccgggagcgatggaaagcgagcttgcggagatggacgagtgcatgccccattattacaaggtcacgaatcaccacgggcagggtgcagagaccatcatgcgcgccgaggcgctgttctgtcagggccgcttcaccgatgcccacattgaactggagcgggcctatgcacaggtgaaggacaacggacagatcaacatggcgctgtgctgcgattttctgtcgcggcggctctcgctgtataccgatgtggagcagcggtacaccttcgaggagcggtacgcggagctgctgcgctatcacgacgcctcgtggatcaacctctggagcgctgccagcgcctactaccatgccctgcggggcgaaacggacagcatcccggagattttctcccagcaccgcctctccgatatcaatatgctcgcgccgggcaagcccatgatggaaatgatcgaaaatcaggtgtatcttgctcagggcgcttatgccaaggtcatcgggcacagcgcgcagcttttggctgtgtgcgaggccatgcactacgcgctggtggccctgcacatccgcatccagacggcggcagcctatgcgcagctgggaaaaagcgaggaagcctgcacatggctgaggcaagccctttccgatgccgcgccggacggacttgtgatgccgttcgtggaaaattatgcgcatttgaagcccctgctggcacaggaactcaaaactgacctgattgcaaagatcaccgagcttggcgaaggggcaggggcgcgaaacgcggcaagcgcccgtccggcggtctttgacgcactgacgccgcgggaatttgagatcgtggagctgatggcgcagcggctttccaaccgcgagattgcggaaaagctctacctctctgaggggagcgtcaagcagtatgtgaaccagatctattccaagcttcatatggagggcaatacccgaaccaagcggaagcggcttgccgagctattcggacaaaagacctaacctttggttaatggttatcccatacgatccaccgtacaatatttgtacggtggatttttatttttgcggaaaggagggcgcgcacttgaaccgaaggtatcttacagccgtcacgccgctgcccaaccatgttttgcaggtggattttgtgtccggtagtcggcttttgctggacatgaagcctcatctggacaagatccggtttcgcccgctggcagatgcgagggtatggaacagcgctgtgaccaacggcatttttgtccgcttcggcgatgtggagctgagccatgatgagatcttgtccatggcggaacaggagcattgactccgtttatctgaaaaaggagaataaaatgatgaaacacttaaataaatatctgtctcttgctttggcgctggtgctgtgcctgagtcttgccgcctgcggcgagagcaacgaagactatggtgatggcggcagcgactataatttatatggcgttccggattcctttgaggggctggtaaaagactccgagcagatgtcgaacctctacctctacggcggcgcgtggaagggtgaggacggcggcacgctgatctccgacaccaacgacgatggcgacgaggtgcgctttgcgctgtacgacgccggcgaagagctgactgccagcggcttcatccagttcgtgccggactatgactacgattatttctacaatgagcacgatggcgtggcctaccgcagctggttcgacgaggttggcgccctgcatgtggccgagcttggcacttttacgcagatgaccggcgacgcgccggacgagaataccggcgacatcgattttgagatgatggcgggcacctggtatctggacgccgaggcggatgcgcccagcatccttgtgtttgacgaaaacggcggctgggagctgctggagcgtcccggcggcgacggcgaccccaccacggtggacagcggcaccgtcgagttggcccctgatggctccgaggagatgtatctcgccgtttcctcccagttcgacgatgtgggttatgaatttaccatcctcgaccatgacacgctgcgttggggcagtgagttcgagttttatcaaaaaatggcatagcggctgcgggaaggagagagatgaaaaagcaacttgtcctattcttggcactggcattgtgcctgggcttgaccgcctgcggcgacaccgaatctgacgatacgcaaagcggctatgagaccgtcatggatatggaatttctcgacgggatgtggagcatcgacggcaccgcgaagttatactttgacagtacggagggcttttacgcctaccgcactcgctggggactcggcgggcgcggagaattcgagctgtccgaggcgagcggtcggccgatgattttcttcaacggtcttctatacaacttcctcctgcgcgacgacggcgtgctgctgccaaaccggaacggcgagggcagcggactcaccatccatcgaaacaccttcctccgcgacgacgaggcggagatcgtcgaatgggacataagcaactgggacggcatgtggcaaaatgccctgggcgagaccatcgtcatcaactcgtccctcatgcagtacatcgcctgctcgccggactattccatgagtggcaccatggacgacgagggcgagggcatgggcctctatctttacgacaacgggacgcgcgcctacctctgccccggtgacgacggcaacagtttcaccctctccgccgaacgcttcggccgctacggggacgatcagcattttgatggcgtcttttaccgcaatgccgacttctacgcctacacggatatggaaaacgcggagttttatgaagacgaatactccaccttctatatctggtactacgacggcgtgaaccgttaccttttgggcaacgattacaccatcggcgaagacggccttgcctaccacgacgaagacggcctcatctatcccgcaggctggattcccgaagaaccatatgatcccgctgttgactggggcgcaaactggatggatagttgggacatctgaagccccgcggaagaaggaggaaaatgaaatgagacaacgaagatcctttttgacgttcaccttagcgctgctgttttgtctgagccttgccgcctgcggtgcgaagcaatatcccatggagatcaccgttgtaaaccgtaccacataccccattgcggatatacgcatcagcctcacttcggaggaggactggggggagaaccgcctggagaccacactggcggagggcgagagtaccgagatcgacctgggggtatacacggaagggcagctgaacgagggcttcagccttcagttttacggtgaggacggtgagccggtcaaccctgactatgatcccagctctcccatgttttttgacaacggcgactttcttattttcgcgccgccggatctcagcgttgcccttttcctggacaccgcttatgacaaggaggcctatgaccagaaaatcgtggagtcctatgctgcggacggcgacggccggggtgatgtgatctcacgggacgacatcccggttctgatgggtggcgcgctgccctttaccaatatgcagaacctgctctccgagaaccatgacgacggcacctaccgctatgaggacatcaccgaggatgggcagctccttgtggtcaatacggcggagcaaagctgctttgttccggatgtacaggagctggacgattatctgacagcctgtgccctgtctttaagtgatgcgggtacctatgagctgttgtccgccgaagaacatgaggaatacagcaaaaatttaagctatccggtttacatcgtaacctataccgccggcgagaacgaagacacccgggaatggaccgtatttgtcatggacaccgacatttgtacctatctttacggattctgcgcgccccccgatgctgcggcggatatgggtgagacctatcaaaatattttttcgcagttgtatttgagcgatgaagaatgaggaggaatgtcacatgaagagaaaaaagccatatcttctggcgggactggtgttgctgcttttcctgctgtgcacagcctgcggcaatacggaggggcaaatcgccccgcaggatgaccccaacgagggcctgggaggcggcctcagcgaggacaccgtcaacgacttcagcggcttcgagggtatctggctgggcgaagcggacaacgactacgactccatggagtttgacgccgagggcaactggaccctctacctcagcggtgaagtggtggatgacggctacctccgctatgagccggagtgggaggctatctatgcctacagcagctcggacgattccggcagcctcatcaccatggaggaaggccggctctacagcgccgcttacggctactttaactacggcgaagggatggagtacctctggtatgaggacggcggccatctcaccgaggacgacgagcccgatccctcggaggacgaggttcccgactggaacggccgtttaggcggagacccagactcctattggagctgggattccgacctctgccagcggaatgtctcggaattcaagggcatttggtactatgacggcgatctctcggctgagacctatatcgtcatcgacggtaatggaaactggagctattaccagcgcgctcccggcgctgagcctgcggaaatggactgcggagttttcacctactccatggatgaggtaagcacctattatgcggactccaccatgtatgacggcgtttcttaccgggtctttgaggttgacgaggactctctggcctggggtgatgagggcgtttactacatgatggagtgatggaaaggaaggagaaccatgaagaatcgatggaaacatattttgatccctgtgctggccatgacgctctgcctgagccttgccgcctgcggcaattctgacgatgtcgcgggagaggactggcgcaccaccggcgtggtagtcggcagcggcactatcacccacgacagcgagagcgtagacgtgctggtgaccgcagaccccaacagcgccgccttctaccgggatcaggaggagcaggtgctgtttgacagcgtggcttttcccgagactatcgaggacatcagcagcagcgccttccaaatctccttcgacgatcagaacggggacggggagagcgacgtactggtggagatcggccatgaggacatgagcaataccaccatactctggctgtgggacccccaggagcgctatgtctatcagccggattactccagcttccatgtgcccggggtggccgggccggaggagctgattgccccctatgtgggactttgggagtatcagggggaaaacctatggctgcgcatccgcgaggacgccacctgggaattcgtcaatgatcaggacgacgtcatcgagtacggcacactgtgggtggacgaaaacggcgtgacgctccactttgacggcagcggcgacaccctgcagctggaccgcaccgtcagcggcgaccttatcgacagcgtgaacggcggcacgctccttcctgtggagggcatccagtctcaggagccgtacttcgcaagaaacggccttgagatcaacgccgccgtggagagagggaccttcctgctggaggacggggtgtgcagctattcgggacttggcgatggctacaacaccgacgactgctattgggagatcacgaagaacggcgactatacccatgacggcatccgcgagctgcacttcgacgccatctgttacatcccggaggactccattccgtatttttccgagaagtacatcaccaataccgacagcgagctgtacgacttctacaccggcatgtggctcaccaccgcaacggcctacggcaacagccagcggggcgacaactactatctccacaccgtcagctggcagggaaacagctatctcattgaattcgcctactccaccaactggcagtacaacgtgggggactgggcgcaggtcctgaccaagagctacgccgtctatctcccggaggactatgacgggctggtctttgccgccgaggcgcagccggacaactataaagacagtgccaaacgcatgcagctggacagcatttcccccgaagcctccctcatggacatcgacacggtggacccctaccgcagcctgtatttcagcctttgctactaagaagggacagctatgcgaaagaaatgcaatgattttgacgcggtgggcgttgagcggatgacggacgccgagctgtcaaagaaactgggaggctatcagagaacggagagcatcagcatatcgctgggcgttttactggtgatcgccgggtgtatttcaatgtttatacagcatgaccccattttggtctgcgctttggcgttccccggcgtggcactgttcctgttggtggcaaagcccgcccaaacgaagaaaaaagccctgatgcagcagcagctgggcggcttcttccgcacggaactggcaaaagccttcggcccggagccggagccggccacgctgcccatcgactgggcttacctggcggcgacaaagctgtcggcggtcccctttacggagtgtaccgtgacggacttccacgagggcgagtacaaggggctgcggttctccgccgccaacgtggagctgcgccgcacggtggaggaaaagtccggccccgacaacgacaactggatgacccgaaccgagacgctgttctgcggcatcgtggtccgctgcaaggacatctgtgacccgacgctggacattgccctgaacgatatgttccaggagcggaagaaggacgacatcaccgaccctgccgccttccggaagcactttgccgctcacacggcggatggccgggaggtggacgatcaggtcacaccgcagctgcgtgacctggtacagaagctggaggcatcttccagaacttccaagctgtgcggtcttatcctccgtgacggcgatctgacgctggctctgaacacccggtatgtgtttgcgggcgttccggaggagctggatctgcgggacatcgacgggatacggaaatggtttacagcttcgctgaccggtatgggcaatctgctggatttgataacggaaagccccgccttgaccggcgggacggaataaggggaagaatatggcagaacagaaaacgaacatgacagatgaacagttggcgcaggagctgcgcaaaagcaagggcggcaagctgggcggcaagattctctcgctgctgggcggggtgatcgctgtggcgggtatgatcctgggcggcaaccttgtgctggttgtcatcggcggcgtggttctcggcctggggcaaatggtgcagggcaagtccaaggagcaggcaggccggcagaccttcgactccattgctccggacatcgtgggcactgcctttgaaaacgtacagatgaaccccgttcctcccattttggacgcaaacgacaacaatattcccctgcccagccacacccattgcagcggcagcgggtatatccgcggaacttatcgcggcctgaccacggaactgtgtaccgtccggctgacggaagtcagcgagtttcagcgggaggagaccggcctgtgggaaaagaacgagcagaaggtctacaccggccagtggatgctgtgccagctgaaccgggaatttcccacatggctgaccatctggccgcgagacagactggataagctgttcagctccaaaaccatccaaacagggaatgagggcttcgacaagcgcttcaatttgagcagtgacgatgaagcggcggctctgcgcatcctgtcccccagccggatggagcggattctggcgctggcggatttctccatcggaaaattcgccgtgaatcttaactcggacggcaggctgtatatcgcggttcacagcggacgcggcttttttgatctcgacaagggccgtgaaaatccggcgcagctgcgggagcgctttgcccgtgaactgcggtggtttacggatatgatcgaagcattccgcggcgcataaaggaggtggacagtatgcctctttggctcgctgcggcgctgctggtactgtcgctgtcggggatttttctctcccgccgctacttgcggaaaccgcttcaatcagtctgcgtcatcctctgcgtcctgctggcagcagcctgcgccacttatatcggactgacccttctgtttgtggatgcggtacagaaccagccgccggcatcgtaaaaagagatccccgtccatagcggcaggaaggaggacgtatgaagagtattaaagttatcgtgatcggtttcattcttgcgatagcgcttgtggcatggcccgtagaatatacgcggaatatcacagcaggaaccggctttcttctcgggggtgtgctggcggcctggctcgggattcgccgccggaaaggcgcacggaaggaatacgaggatgatgtgcggcggtacacaggcaccacgatgatgaaggtggtatggattgaggaatcggtcgttgaaaggtgggagcaccaggagaacggcagtgatcggctgcgccgggagacgtactatctgccgacctatgagtacacagtgaatggcacgacctatcggtactcgagccgtcaatcgctgtccggcaagcgagatctggggcggcaggtggtcggatactatgacccggctaagcctgaatgcattactgaaaacagaccccgaaagcctgttttcggcggagcttactgctttttgtgggctgcgtttctgctgtttttcgggatcatgacatttaccggtcaagtctccttttcctgatgccaggcatgtataaccactgcgatcagggatacagtttcggaacaaccgtctgcgcggtggagcggaataacaaaaaaattgaagcaaaaagcgaaggcacccagtgatatgtacccagaattctcaatgtcatgatgccggggtcaaaacaagccttttatgtatgaccaatggcaaagagctggaaaaatagcgctgaaatgagcacccagaggaaatggccttttgaggctgtctctctgggtgcttatttttcatagagtagattttagtcattttattcttttgctatccaaatattggattttgagcataattaaccaagccctttcgaaaaccaaagagcttcctgaaattgagagccgctattttgcttccgaagaagaatttccctcgttgcttgcctcgcggcaatttatcaaggcggtaattcttacggatgtttgccggtaccgtttctacgccattcctaagctttgcataattgctgaattcttcactttgcatatacctttggctctttgccctgtttgaagcattctttgaagtaatgaatgttgcattccatccatcgatttttggacgacactgcccttggtatg

SEQ ID NO: 12139 - DNA, 9102 bp, Unknown
  gut microbiota DNA sequence
tgaactggcatgacggtaaacggctttgaacggcaggggggacccaagcgattttatttgttccttctgtaaaattgaagaaagaaggttatcgaatttgagcggtaaagttgttaaagtttccgggccgctggtggtggctacgggcttggcggacgccaatatgtccgacgtggtccgtgtcggcccccagcgcctgatcggtgagatcctgaccatgaagggtgacaccgccaacattcaggtctatgaggagacctctggtctgggccctggcgccgaggttgagaccaccggcgcgcctatgagcgtggagcttggccccggcatgatcgagggcatttatgacggaatccagcgtccgctggagaagatcgtggagaaggtaggcgcctgcatcacccgcggcgtggaggtccccgccgtggaccacgagaagaagtgggagttcaacgcggtggccaaggtgggcgatcaggtcatcggcggcgacatcctgggcacggtccaggagacggccgttgtgctccataagatcatggtgccgcccaccatgcgcggcaccatcacctccatccagagcggctccttcaacgtgacggagaccgtcgccaccctcaagaccgaggacggcagggaagtccccctcaccatgctccagaagtggcccgtccgtgtgggccgtccctatacaaagaagtatccccccaagcggcctttgtgctccggtcagcggatcatcgacaccatgttccccatcgccaagggcggcacggcggcagtccccggacccttcggctccggcaagaccgtggtgcagcaccagttggccaagtggtctgacgtggacatcgtggtttacatcggctgcggcgagcgcggcaacgagatgaccgacgttctgcgggaattcccggagctgaaggacccccgcaccggcgaaagcctgatgaagcggacggtgctgatcgccaacacttccgatatgcctgtggccgcccgtgaggcgtctgtgtataccggtatcaccatcgcggagtacttccgcgacatgggttatgatgtggccgttatcgccgactctacctcccgctgggccgaggccctccgtgagatgtccggccgtctggaagagatgcccggcgaggaaggctaccccgcgtatctggcctcccgtctggcccagttctacgagcgtgccggcagcgtggagtgcatcggctccgacgagcgccggggcagcctgacggctgtgggcgccgtgtcccctccgggcggcgacctgtccgagccggtttctcaggccaccatgcggatcgtcaaggtgttctgggcactggactcctctctggcctacaagcgtcatttcccggccatcaactggctgagctcctattccctgtatctggactccctgaagccgtggtttgacgaaaatctcggccccgagttcatgcgggaccgcaccaaggctatgggcatcctgcaaaacgaggccagcctgaacgagatcgttcagctggttggtaaggacgctctgggcgccggcgaccagctgacgctggaggtggcccgtatggtccgcgaggacttcctgcagcagaatgcctttatggatgtggatagcttctccgactacgagcggcagaagaagctgctgggcatgatcctcagctatgacgtcctctgccgggacgctatcgccaagggcgcttccgcccaggagctgttccagatcccggcccgtgagcagatcggccgcgccaagagcgtgcctgctgaggaatacgcggcggtttacgatcagatccagtctgatatggagcagcagatcgctgccattgcagccaaaggaggggacgacgaatgatccgtgaatataaaaccgttgaggagatcagcggccctctgatgatggtccgcatggtggaaaacgtcacctatgacgaactggtggagatcgagctgcatgacggctccctccgccggggcaaggtgctggaggtcaacggcgacgccgccgtggtccagctctttgaatccgcagccggtatcaatctggcggacgccaaggtccgcttcctgggccaccccctgcagctgggcgtgtccggcgatatgctgggccgcgtgttcaacggcatgggccagcccattgacggcggccccgacatcctccccgaggagtaccgggacatcaacggcctgcctatgaaccccgccgcccgcgattatcccaacgagttcatccagaccggcgtttccaccattgacggcctgaatacgctggtccgcggccagaagctgcccatcttctccggctccggtctgccccacgccaatctggcggcgcagatcgcccgtcaggccaaggttctgggggatgaaggctccaacttcgccgtggtgttcgccgccatcggcatcaccttcgaggaatccgagttcttcgtcagcgagttcaagcgcaccggcgccattgaccgtaccgtgctgttcagcaacctggccaatgaccccgccgtggaacgtatttccaccccccgtatggccttgaccgccgctgagtatctggcctttgaaaaggggatgcaggtgctggtcatcatgaccgacatcaccaactacgctgaggctctgcgtgaggtctccgccgccaagaaggaggtccccggccgccgcggcttccccggctacctgtatactgacctggctacgctgtacgagcgggccggacgccgtctgggcaatcccggctccattaccctgatccccattctgaccatgcctgaggacgacaagacccaccccatccccgacctgacaggctatatcaccgagggccagatcatcctgagccgcgctctgtaccgccagggcatccatccccctgtggacgtgctgccctccctgtcccgtctgaaggataagggcatcggcgagggcaagacccgtgaggaccacgccagcaccatgaaccagctctttgccgcctatgccaccggtaaggacaacaaggagctgatgagcattctgggcgaggcggcgctgacccccacggacctgctgtacgccaagtttgcagacgaatttgaaaaacgctacgtcaatcagggctacgaggagaaccgctctatcgaggaaacgctggatctgggatgggagctgctgagcatcctgcccaagagcgagctgaagcggatcaagccggagttgatcgagaaatactggccgaaaaaggacgagcagaagtaaggaggggtgaaccatggcaactatcacggtcagccctacccgcatggagctcacccgtctcaagggcaagctgaaaaccgcccagcggggccacaagctgctgaaggataagcgggatgagctgatgaagcagttcctggatacggtccgggaggtgcgttctctccgcgccgaggtggaggaggacctgatgcgggtccacaagtcctttacggtggcctctgccctcatgtcctccgaggcactggaacaggcgctgctgtatcccaagcagagcgtggagctcacccgcaccacccagaacatcatgtccgtcaacgtgccggtgtacgatttccagacgaaaacgaagtcggattccgacatctacccctacggcttcgccgccacctccggtgaactggacgatgcagtagaggccctgggccttgtgttccggaagatgctgaagctggcgcagatcgaaaaatccgcccagctgatggcggaggagatcgaaaagacccgccgccgggtcaacgcactggaatatgtgatgatccccaacactcaggaggccatccgctatatcaccatgaagctggacgagaacgaccgttccaccaccacccggctgatgaaggtgaaggatatgctcctgaaggacgctatcgaggcgaaacgggcagaaaatgccagagccatggaggcgttcagcaagtccggagaggccgctgctgagacgtaagccaaggtcatagttctgacgcgcatgttctaaaacaaaacagaaggggcctgcgcatctgcgcaggtcccttctgctttctgctgatcaaaacgaatggaatgcggaacgcccccggccattggtcgggggcattccgttaatactgatattcgaattcgtagccgtccagagagacggtgtcgccgtcctcgatgccccgctcctccagctgctgatacagtccagattcccgcagggccttgtcgaaccacatgcggctctcgtaatcgtcgaagttgacgttggccatgaggcgctggagccacgggccctgaatgagccaggtgtggccgtcgtccaagcgctggatgtccagcggctcgctggtgtccaccaccggcggcttggggacatattccggctcgtagaccgtgaccggcggcagggaagccagagcctccgctaccttgcccaccagctcccgggtgccctgatgagccgcagcggagatctccatcagcgtgaagcccttggcctccacatgggcgcggagccgctccagattttccgggtcggtcataatgtccaccttgttggcggctacgatctggggccgcttggcgagatcggggctgtattgctccagctcggcgttgatggcgtcaaaatccgccacagggtcccggccctcgctgccggacacgtctaccacatggaccagcagacggcagcggtcaatgtgccgcaggaaatcgtggcccagaccggcgccctcactggcgccttcgatgatgccgggaatgtcagccatgacgaaggacacgccctcgtccacccacaccacgcccagattgggatagagggtggtaaagtggtaattggcgatcttgggctgggccttggagaccacgctcagcagtgtggacttgcccacattggggaaaccgatgaggcccacgtccgccagcagcttcagctccagaaatacatcgtggctctcgccgggcaggcccgccttggcgaagcggggcacctgccgggtgggggtggcgaagtgcatattgccccagccgccccggccgcccttgcagaggacatagggctcgctgccgctcatgtcctgaatgatctcattggtttcggcgtcccgcaccagcgtgccccgggggacgcggatcaccagattggcgccgtccttgccggacttgcggccgccctgaccgtccacgccgttttctgccacgtatttgcgcttgtagcggaagtccatcagggtggacatattgtcgtccacctgcaagataatggagccgcccctgccgccgtcgccaccgtccgggccgccggccgccacatatttttcgcggtggaacgccactgcgccgttaccgccgttgcctgcccggaccgtgatccgggccttgtcgataaatgttgttgccataaagtgcctctcaattcaagtgtaaaaacaggtttccccacataattgttcctatcataccggaaaatggggggaaatgtcaactgtaaaggtcaatccggcaggcatccgaagtggaggagtgcctccagtacgccgccgccgatggcggtggccttgtcggaggcagtaaagcagttggcctgctggccccgtgggtcgatgtcgccgcatttcatgccctcgtggacctgcaagccgccctggagcaagccccggagacagccggtgagggtgcagcgcatgggtttgccgtttaccgtggcggcaatttctccctcctgaaccaactgtccgatctccatgcgcggctcaaaaatgccgtccgccggggcacggaggacccgctcgccgctgcgcccgccgatgaggccggggatgccggtgttgggcagaggactgccggtgtacagcgcccggcccagcgtgtggccccgcatggtctctacggcggcgtggcagtcggtccccacggtgaagccggggcctacgccgatcaccaccggggcgtccgtcagggcggtgcctaaattcttcttcgccagaatagcatccaccaccgcgccgggccggagggtggggatacaggctcccgccgggtcagcgagaacggccacaacgccggactgagccagagtcagggcttcctccggggtttcggctttccgggcggaaatatcctccactgtcatctctcccaagcgaatggcctcggagaaacagacggtgcggcggatggaggtgggggcggggagatccgtcataacgatttgatacccggcacggtggagccgcaaagcgatgccggtggccagatctccggctcctcggatgacaacgagcataagatccctcttttccgaatttgaaatggtatggtcagaccatggggcaggcgtgatgagccgggtcctcccggcggcaggcccgctcgtaaatcatttccccggtgatgctcacggcgatctccgccggggtcacggccttgatgggtgttcccacaggggtgtggacagtgtggagcttttcctcggagataccggcctcccggagccgggcgttgacggcggcgattttggcccgggagccgatgacaccgacgtaggccagctcttgccgcaaaatctgctcctgaatttccagatcgtgaagatggccggaggtcatcaccaccacataatcctccggggacaggggcagtgtgccggcgatgttccgaaaatcgccgcacaccacctgctctgcgtcggggaaggcggcgggatcggccagagcgggccggtcgtcatacaccaccggacggaactccacactgcgcagcagagggaccagcgcccgggcgatgtgtcccgcgccgaagatcaccgcccgctccccaatggggagggggagagaaaagtcggtttctgtcaggacgcagcgcttggagagggggggtgtaccgctgctgcccaaaagggccatgccctcgccgtccagcagcgccggggcggagccgtccgtccgcaggattagccagccgggctgggcagcggtgagctgggccagcgccgtttccaacacactctgccagagagtgtcccccggggaaatgaactgaaacagtaccgtcacatccccgccgcaggccatgccgagactgtccgccccggcttgcgtcagggcgaagtgctgtatctgggaacgccgctccttcagcagggacagggccagcagctcggactgccgctctacctgcccgccgccgatggtgcccgttagctgaccattcacacccaccagcatttgactgccggggccccggggggcggaaccctgctccgcaacgatggtcaccagcaccacactccggtgggcgttcaattccgccagtgctctgaataaaatagtccgcatggcgcgctcctttctgtcagacgatccaaactctgtattttattgtgaacttgatggtagtctattatgcttttcttggaatgtcaagcggagacgggggagtacggaacggaaaaacaggctgagaccgcagtctcagcctgtttggttcacgggtccggatcagtacatcagcttgatgtaatcctccacgtcctgacgggtgccggtgaagggacccggcgtctccattttcagggagaccagagcggtggcggtctgaagagcggtgggaatgtccttggtcagccgctcattgatgtacccggcaaaggtggtgtcgccccggccggtgcggccggagagattccgggccttgatggggcaggtgtagatctcgtgaccgtcatacaccagcacctccgtgttgtgggtaattaaaatctccttggcgccccagccgtaaaggaccttggcggcctccgcccggtctgtcaagccggtgaggatctccgcctcggcggcgtcggtcttgaggaaacggatgtaggggagcagctccttcttttctttccagtcgtgatacaccatgccgccgttttccacccagcgcagcatggtctgcacgtcgatggccaccatggcatgcttggcggcgaaggggatcatctcattggggatgtcgccgccggccagaccggccagatgccagatggcggcgtcaatctgatccaccggcacctcgtcggtggtgtagggggcgatgaggctgtccacagtggaggtccggcgctcccggtccgccgtgtggtagacgtttttcgtcacaaaggagtgggggctgttcagggggaatacactgatggagggagccttctcgtggaaggctgccgtcacgtccagttggctgaggtccgccttgggcaggacggcgatcttatgtcccatattggctgccgcgcagccggaataatacaccgcgccgccgacggcctggacgacagtgccgtcaaaatccacgttggtgtcctgagcaacctcgccgatgatgagagagtcgaatttttccataacgatcatccattccgccgccctgcgccggcacaagaagttgatggggcgttccgtccgcagggcagaaaagctgacggaccgcctgctgagatacaagggaaaataaagtcggatcagagaactcaaacgtttgcgctgcttactgccatcagtataataggtgaggaacaaaaagtcaacggttttagcggctttgaacatcagccgccgtcattccgcgggaaaccggaaattctttgcgggaggcctggaaaaaaggattgtaaacagcgggaaaaccgtgtataataaccgcaaagcggcggaggatctccgctgtccggcacgttttggaagagccggtgcatggctgcggatattccgccgccaccggatcgtttatatgccgcacccgataaggaggagttcaccatgaataaaactgcccgttttgtattgaagactgtggccgccggcctggcgttctgcgcgtttgtctgtctggtggtcggcagctggagcgatgtgtatgaggcaatcgagcgccgtcgggcctgccgtttgagcaagcaggagagcagagattacgccgatgaggagctttatcagtaaaaaagttggcaaatgaaaagagcggcacacggatttccgtgtgccgctcagcgtgtcgaaaaagtcttttctccccgctgagcaagttttcagaacttcataaaagttctgaaaa

SEQ ID NO: 12140 - DNA, 18671 bp, Unknown
  gut microbiota DNA sequence
cacaccgtgacccacacggggaaatgagcggacggaaacaatggaacaaacaggctgcgacctcatcctttttggacaaaaaaacgccgcaaagccttatacagcaagggctggaaggctctacggtggttggtaaggatgaggtcaccagttcaaatctggtcagcagctccagaacaacacctgaaatcttcggatttcaggtgtttttcgttataaagataaatctgggatcaagaagagctcccgcattgcaaaatgcaatgcgggagtgtttttcagtcgcagacatcatccgctacgcggcacagcacatcggggtggttggagatgatgcagtctacgccccgggcgatcatatctttcatgttctcctcgtcatttaccgtccaggtgttgaccttcatgccccggccgtggaacagctccatcagctccggctgatattgcagaagcatataccggggatgcatattgtcggcattggagcgctgaacataatgttccatgtccagatagggcttatcatacagaaggccggtttcaatgtccgggcacagctccttgaaatgctgcatggagatatggttgaaggaggaaacgaacacctgctcctgcatctggcgtttgcagatttcgtcgatcacccgttgctccagattctcgtaaaacacctcgtagtttttcagttccatgttcagcagcatcttggtctccttacagaagtccagcagctggccgaaggtccagatatgctgacctgcaaattccggagacttccaagcaccgatatccagtgagagcagctcatcataggtcatgttcttgatgaagccggtgccgttggaggtgcgctctacagaggcatcatgaaaaatcaccagcttgccgtctttggtgatgtggacgtcgctttcaaagccgtcggcagcggtcttttccactgccatccggaaggccagagggctgttctccgggtaattgccggaaaaaccgcggtgcgcaagcaaaagtgggcgtttcatatgattctctccttacacgtaataataaaagcgcatgacgctcccgtcatacgcttctctcaacatctctgatttgtattatagccgaataaacagggaaatacaagtattaacacaaaattttggcaaaaggaatttcggaacgaaatggaacagaagtgcccgcagtttttgataaaaaccgaggctgttgctgcaacagcctcggttttgtgtgcgtttactggtggatggcggtgccggttttgccggctacgccgtccttggccttttccagcagcgtgatgagggcggagcggccgggggcactttcggcaaattccacggcggcctccaccttgggcagcatggaaccgggggcaaagtgcccctcaccgatgtacttgcgggcctcgtcaggagtcagggaatccagccacttttcatcgggcttgccgaagttgatggcaaccttttctacggcagtgaggatgataagggtgtcggcttccacctgctgagccagtacgcaggaggcgaagtccttgtcgataacagcggcggcgcccttcagatggtgcccctcagtcttgtagacgggaattccgccgccgccgcaggccaccaccaccagcccagcctctaccatatcacggatggactggatctcaatgatcgattgaggtctgggagaggcgaccacccggcggtagccccggccggcatcttcgatgacgttgtagccgcgttcagccaccatcttgtcagcttcttctttggtcatgaaagcaccgatgggtttggtggggttgtggaacgcctcatcattcgggtccacctcaacctgagtaagcacggtggctacacccttttggatgccgcggtccagcagttcttcccgcagcgcgttttgcaggtcataaccaatgtagccctggctcatggccacgcatacggacaggggacagggaatgtacttttccggctcggagcgggtcagctcggccatggccttctggatcatgcccacctgggggccgtttccgtgggcgatgatgacctcatgtccttcttcaatcaggtcgacgatggccttggcagtctgctttacggcgatcatctgctcagggagattgctgcccagagcattgccgcccagcgcgatcacaatacgcttacccatgaaaaacacctcaatttgtttagaatctatacattttagagcaaaaacggcaatagatgccccgtgttgtggggagtgccgctgagacggctgtcatggccgccggtgaaaatgatggagcccgtccgcacagatacaggcaggttgacctatgcagacgggcctccggaatggaaaagggatgtcaggcggaaagcctgtaaaattcagcgtgttctgagaagatttacttctggaaccaacgggcgatcccgcgctcctccagagccttcagcgtggcctgaggatccttcaccttagccaggaagatcatggcggcgatgatatagggcttgtaggaggcttccttatacaggggggtgcggtagcggtcaaacacggaggcctctacctcgccgtccttgcaggaaacatcgttgatgtcggcagggaggcagtggagatacagagccttgccgtccttggtggtcttcatcagttcctcggtgcagcaccaatccttgtgatcggcgttctgggccagcagttccttctccagagccttgatgccgtcggcgtcgccctcagcgtacagattagtgcgcttctccatagcggcgaagggagcccagctctttggatagacgatatcagcgtccttgaaggcctcggccatggagttggtcttggtgaaggaaccaccggtcttggcggcgttggccttggcgacctcctccacctcgggcatgacctcgtatccctcggggtgagccagcaccacgtccatgccgaaacggctcatcaggccgatgacgccctgaggcacggagaggggcttgccgtaggaggggctgtaagcccaggtcatagcgatcttcttgcccttcaggttctccacgccgccgaagtggtgaatgatgtgcagcatgtcggccatgcactgggtggggtggtcgatatcgcactgcaggttgatcagggtgggcttctgctccagaacgccgtccttgtggccctgggtcacggcctcagccacttccttctgataggtgtggcccttgccgatgtacatatcgtcacggatgccgatgacgtcggccatgaaagagatcatgttggcagtctcgcggacagtctcgccgtgagcgatctggctcttgccctcgtccagatcctggacctccagacccagcaggttgcaggcggaggcaaaggagaaacgggtgcgggtagagttgtcccggaacagggaaatgcccagaccggactcaaagatcttggtggagatgttgttctcgcgcatatagcgcagggcatccgccacggtaaagacggcttccagctcgtcatcggacttgtcccaggtcaggaagaagtcaccctcatacatctctttgaagttcagggcgttcagcttgtcgatatatttttgcagagtagcgtccatgataattggctcctttataaatctatattttgtaattggtgagaaaaggtctgaaacggtttctgtacgaattactgaatgtcgttattggtcttgccggcccggaactgggagacatcggcagtcttgttctcctccttgtacagaccgggcacggcggcgtacagggcggcgcaggtcacaagatcctgcttccaggtgatctcattgggggcgtgggcctgagattccgcaccggggccgaagccaacgcaggggatgccgtagcgcccctgaatggccacgccgttggtggagaaggtccacttgtcgatcaggggacggtgacgcaggtgcatcgcaccatcggggccaatgcgttcctcaccgtacagtgcgtggtgggcgtccaccagagcctgaacatgggcggcgttttctttgttgatccaggtggggaagtagcactcggtctcgtagacctcgccggtccaagagggccggtcatacatatacatggagaccttcacatcgtcgccgtacttctttacgctgggcagctggcggatctcctccaggcaggagtcccaggtctcgccggcagtcatgcggcggtcgatggagatggagcaggagtcagccacagcgcagcgggagggagaggtgtagaagatctgagaggtggtgcaggtgccccggccaaggaactgagcgtcctcgtaatgctcggggttgaatgcgggattcagcatcttcacgaggcccttgatctcgttggaggggccgtcaccgttctcgttgagcgcgcggacttcctgaagaatgtcggccatcttgtaaatggcgttgtcaccacgctcgggcgcggaaccgtggcaggaaacgcccttcacatccacacggatctccatgcggccgcggtgaccgcggtagataccaccgtcggtgggctcggtggagataacgaattccacctgctccttcttgatgccgttggcggggaagtacttgttgacgatgtactgccagcacataccgtcgcagtcctcctcctgcacagaacccaccaccatgatcttatagccggcggggatcaggcccagatccttcatgatcttggcgccgtaagtggcagaggccataccgccctcctggtcggagccaccgcggccatagatgacctgatcatcctcgtagccctggtaggggtcatgggtccagttgtcgatgttgcccacgcccacggtgtcgatgtgggagtcgatggcgatgatcttgtcgccgtcacccatccagccgatgacattgccaagaccgtcgatctccaccttgtcatagcccagcttttccatctcggccttgatgcagtgaacaacctcacgctcctcgcagctttcgctggggtgggagatcatgtcccgcaggaagcgggtcatatcggcctgataggcctgagcggctgctttaatcttctcaaaatccatggtagtaacctccaattttatttctcaaattttggttgggttcgcttctggaccgtgcgttcagcagggcttctgcggggtgtcatcggtgggatactcgccatcccacaccacccggcgatacttttcgggatcggtgttgccctcagtggagaacatgagcacccggctgtgccggtccagctccaaagcgtcccgcagctccttgtaggtgtcatcacacatgatggcgtccagaacacccatgcccacggcgccggattcgccggacaccacgcgggggtcgcccttgacgggggaactcagcatccgcatacccttggcgctgacccaatcggggcaggagatgaaggcggacacatggttccgcagaatgtaccaggagatcgtgttgggttcgccgcaggccagaccggccatgatggttttcagatcaccggtgacgatgcggggcttgccgtcattggccagcgcgccctgatacaggcagtcagccgcctcggcctccatcaccacgaacttgggaggatcgttggggaacaggtttgcgaagtagcccaccaccgcaccggccagagagccgacgccggcctggacgaacacgtgggtgggacggtttacgctgcactgacgaagctggtcggcggcctcattagccatggtgccgtagccctgcatgatccaggaggggatttcctcgtagccgtcccaggcggtatcctgcacgatgacgccgtgtttcgtctgtgcggcttctgcagcagccatacgcacacagtcatcgtagttgacttcctcgatggtgaccttggcgccctccttggcgatattgtcaaagcgggacttgctgctgcccttgggcatgtgcaccacagacttctggcccagtttgttggctgcccaagccacgccgcggccatggttgccatcggtggcggtgaagaaagtggcctgaccgaattccttacggaaggcttcgctggtcaggtagttgtaattcatttcggacacgtcccggcccatctcgccggcgatgtaccgggccatggcgaaggagccgcccagcaccttgaaggcgttgagaccaaaccggtaggactcatccttcacatacacacccgccagccccagatactgtgccataccgtccagctgcgccagaggggtgatggagtactgggggaaggacccgtggaaggagcgggccttggccacattgggcagggacatcacatccagatgctgatcgtcactcttcggcatatgattgaggacccatttgagctgatctttcatggaatactcgcctccaaaatctttttacttcatggcaaaatttatttagctttctgagaccatcatagcatgtgttcttcggttgtcaagcagaaaaactcaaaaaaatgctgtaaagctaaaactttttttggttcctcttgcggaacctgtgcgcaaggctgttttttccaaaaatcgggcctccgcagcagggatatttccccggctttccatgcatggaaggtttggaagtgcccttgctttttacggaaggccacttcgtgagtggagggagatctgacttgttttcagatatatcgctcctgctgcaatctgcttgacggcccatacactttaatgagaaaattaaaaatttttaggtctcaaaaaaatggttgaaactcactaaaattatgatacaataatggaataatcatagcaggtctgtcagcggcaacggatcagaccgtgtattccatagtttgccccgctcttttcggggcgtttctgccgcggaccggaaaaggagggcatttacgtgccgaatgcatctacgctgcaatttctcttgacgctggcaaaggggatcgccagtcaattcggccccaactgcgaggtggtagtccacgatcttgccaccaatgacccggaacggtccatcgttgccattgaaaacggacacgtcaccggacgcaaggtgggggacgggccctcccatgtggttctggaagccctgcgggggaatcccgaacagctccacgatcacctgtcctacctgacccggaccaaggatgggaagatcctgaaatccaccaccatctatatccgagatgacgacggtgcccccattggcatcttcggcatcaactacgatatcaccctgatgctggccatggagaatgcgatcaagcagtttaccgccactgaaaaggacgagaaggagccggagccgattgcccggaatgtctctgatctgctggatgagctgatcgagcagagcgtgaaggtggtgggtaagccagtggccctgatgaacaaggaggataaggtcaaggcggtgcagtttctcaatgagaccggagccttcctcatcaccaagagcggcgaccgggtatgcaagttcttcggcatctccaagtacacgctgtacagctacattgacgaatccaaggcgtgaaacacctcaaacacagacgttcaaatgcttattatgcttattattaagacagagcggctgcaaatctcggtttgcagccgctctgtcttgtttaacaggataacgaatggaatgtgaaaaaccaaaagggggaggcttctttacgaagtgtatctgtcaagtaaaagtagacacgaataaaaagtcatagcatcagaatcccaattcagttttgtactggattggggttttgtaatccaaggcagcggcaaaacgttcggagttaaagtataggacatattgatccagtgtctttttgaggttggaaactttactgataccaaaatccagaatcaattcggccttcatccatccgttcagagattcgataattgggttgtccgtaggtgttccggctcttgacattgagcgaattatgttataattagaatgagtccttgagaaagctctggaggagtagactgcgccttggtcggtgtgcaagaccgtacctgcggtctgctccttcacattttttacgcgtttgcatagttgatccaaacagttatagtaggttttgggatctcctcgataagggtgaattttgcctggaaactcaaaaatcacccttaggcgcagacagagtgcacaacccgctgcaaatcggattgtgcactctgctcattaaaatatttacttgttcagcagttcactgctgtggccgcagcttgcaaacaattcgatatataccttcagctcgtcaaaggagtccacctccagcttgcggtagaggttacggttgtgggtcttgaccgtactggcgctgatacacgccagctccgggatatccttaacggtatagccgtccatataatattgcaggatggtacgttccgtgccggtcagcgtactggcccgctctgcaaagccccgcagccgtgcctccacatccggcggcagcgttcccgttggccgatcacggatggcggcaagcagctcgtcgatctccgggataccggaagcgaccatctctgtaccgccccggactgccgccagacttttattgatgggctttacgaattggcgggacagcaccgttgccaccaccagcatggccagcagaaagagaaccgctcctaagaaccatgcgatctgggaccccttttcatagctgcggaaggtcccgtccggcactaacgtcacagcggcaagggggatgccgtcccacgtggcagcatccagaagctggtgccgccccagataggtgttcttcccatcgctgtaagtggtgtagtattttccgtcgctgatgtgcagaatgccgttggccgtcaggcgggagccgtcagtggcacccagcatggccccggagagaagcaggctgtcaccgtctatgggggctgccagcgtcagtatattgccgaaggcgctggggactgtattatgggaaagactgaaatagagctcactgatctctacaccgcaaagccccttacggtaccgccgccatccaaaatgggtacgcacagcagcatgacctgctcccaggtgtccagcagctctgtgcgttttgtccacaggcagccatctgccagccgggccccctgataggcggtgacctgatcgctgccggggatcagagcggcgttcagctccggattccagcggttgtgcatttgaagctgcaagctccgggccgttttcgccgcaccccggaagcagatcacattctgctctgaggctaccgttggctgtaagccggaatagcggaggtataaccccgcccggaaatcctctgcatttggcagagaggtgttggcggtgacgttcaaaccaaagaagatcccactgcaggaggctgcgcctaatgtgttgctcagaggtgtatacaagcgcttttccaactccgcgatggtatccggatcattgttcagctcatcaaaggcaatgcccttggctgcaaggaaggcgtccaattcttttcccagcttttccgacatggccatgctttgcgctgtcagtgcgtccatttgggagtccagagcggcgtaggtgtttctctgctgaatatccagcgctccggacaactgatgtgcgagatgggacagtacgccggtggccatcagggtagacaaaatcgccgccatcagcagcaccatggtgaaccggtacagcagcagccgcagccccatactgggaccggctgcacgctttttttgaattgcttccctgattggccgcatttgctttctcccgcttatgtaccatagtccagcttgaagctgtccagcgtgtcccaaaccaactcctccgccgtaccggagccctcctgatattgggcacggccagccatcagcttcagccgggacagattttcaaaccgtgtttccagatccagatagttctccatctgcggcgcgtaatagaaggtgtaggattcccgcatcttgagataggtctcatacagagagacatacatggggttgctgagctgctccacagcggcgggaaggtaggcatcaaatgcctcctgcgtcaccggcatatagccgaggctggtgacgaattccacgtttcgctccggcgacgtcagccatttaaggaaggtaatacacgctttttcccgctccggggtggattttgttgtgcacattcccacgccccgctgcatgaccagcttctcaccgccctcaaacaccgggtagggcatggaggcgatggtcacctgttcagaggtgttgtcagggtaagtcaccgtgtcggagtaatagagtacactggcagaggacgctacggagacaacggtgtcgccggtgcggagagattccgtggcgtagccgtcctgtaaccacacaccgccctccagcgccgcatgggcgtaaggctcccacgctcgctcaaaggctgggccgaagcggacaccgtcattttggaaaaagttctctcccagcgactccacccctacctgaaagtagttgaagtggtagtcgttgacaagaaagcacttcccggtgtccgcggcataccgctccgctaaggcgtaaatgccttcccgggtggtcagatcatcataactggccccggaggtggctgcccagcggtcaaacagcgtccggttgacgaacagtacctcagtggatttggccagaggcaggatgacctgccgtccgccgatctgcccctcctccataaaggcggggataaatgttcccagttcctccggactgaaatagtcccggtagtccacgatcatgtcctggtccgggagggccagcaccgttttggggtaggacacgaacatatccggcagggaaggggcgcctgggtcactgttggcggcggcagcacgcttttatggatgctgccgctgttgctgaccagctctacctttacccggatattctgctccgcgccgatggtgctgttgaactgctcaatcaaaccgttcagtggggaatccacctcaccgccgtagacatgccacagcgtcacggtcagcgggtctgcgtccttttcctttccgcatcctgtcatcgcggacagcagtgccagcgccagcagacacagaacgatcctctttttcatatcagccccaccccttccaaaagaataccgtggctgcggatatcttatccgatatgatataataatgtagtatagcatactttgctgtcgctcacaacagaaacagatgtctgcgaaagagagacgggggatcgtggactgcggctggtcctttcaaacagtttcggtgcgctaaaggctgtgacgcaagtgttttttctgctctgccttatagcgaaaattatgtaaacttaaaattcgcggaatacagcgcttctcgtggcaacttttggcaaccaaacgcagcctgtggcagccgatggcagccgaatgaaacgctgtgtgtaatgtcctctatccaacccataagcaatgcttatcgtttctctggctgaataattctttcaaatatcataagaaattgccaacaagtgcttgacaatcaagcctttccgtggtatccttaccaagctgacgatttactcggagggcaatgcaggtgtagcacaatggtcagggcaccagccttccaagctggggatgcgggttcgattcccgtcacctgctccagatttgcgccagtagctcagctggatagagcaactgccttctaagcagtgggccgggggttcgagtccctcctggcgtaccagctctctgggcggcgtcggcttgatcggtttttatatgtggtgggtgtagttcaattggcagagcactggattgtggttccaggtgttgtgggttcgagtcccatcacccaccccagacatgagggggccggggtatccccggtcccttcttttttccacttaggggcgtagccaagtggtaaggcaagggactttgactccctcattcgctggttcgagtccagccgtccctgccattgaccatgaatacggcctctcggcctgtgatttataggtaataagtgttttactctgatccggtagctcagtcggcagagcaactgccttttaagcagtgggtccggggttcgaatccccgccgggtcaccagaaaagcggcacacataagtgtgccgtttttttgatataatggatcagtcatacttgagttgtccggcagtcagctgtgccgatggcttggccgccttaaaatcccgctaattctccctgcatgatcaagaaagtgtatttgaaaaagtgcacgatgtgacttgaactttttcccctgctttttgatatgatgcacaaatgtccgccagtgaacgccattcttgccaaaaacgaaaacaaaaagggccataatcaggccgatattgtgcaaaatgcgtgtttattgaaagaacatttggcggaaatgtgtattgaaaacaaacactgtccgtcatacaatgacagtatagttgattgtggtttttgaatcatagacaaatagggggattattatggtaactttacagatgatccaggaagcccaggagtctctgaagggcattgcccgcaagactccgctggaaaatgccaatcggctgggcgaaaacatttacatcaagtctgagaacctgcagctcaccggcgctttcaagatccgcggcgcctacaacaagatccgttccctgactccggaggaagcttctcacggtgtcatcgcctgctccgccggcaaccatgctcagggcattgctctgtccgccacgaagctgggcatcaagtccgtgatctgcatgcccgagggcgctcccatctccaaggtggaggctacccgcaactacggtgctgaagtggttctggtccccggcgtttacgatgacgccgcccgcgaggccgagcgtctgtccaaggagcacggctacaccttcgcacatcccttcaatgatccgtatgttattgccggtcagggcaccatcggtctggagattctggagcagctccccgaagtggagcaggtcgtggtccccatcggcggcggcggtctgatctccggcgtggctttcgccatcaagcagctcaagccctcctgcaaggtcatcggcgtgcaggccggcgttgtggcttccatgtatgcttcccgtcaggccggtaaggtcaccactgtgcccgatgccgcgaccctggctgacggcatccatgtgctgactcccggcagcctgaccttcgagatgtgccagaagtatgtggacgagattgtcaccgtcagcgaggacgagatcgccgctgccatcctggctctgctggaggttcagaagactgttgccgagggcgctggcgctactcctgtggctgcctgcatgtccggcaaggtcgacaccaccaagaagactgtgtgcgtggtttccggcggcaacgtggacgtgaccaccctgtcccgcgtcatcacccgcggcctgacctacggtggccgtctcactaccatcaccaccaagctggctgaccgtgccggcagcctggccaacctgctgaatgttgtcggcggcaccggtgccaacgtggtccgcatccatcacgagcgtgaggatgtcaactctgaggtcaacgcatgtgtggtgtccatggtcctggagacccggaacgccgatcacgtgcagaagatcaaggatgagctgactgcaaagggatattctctgctggacgcgtaagcggcagcagctggatataaaagaagagaaaaaaggaaaatcagaaaaggaggatgtccgtgtgagatcacgcggacgagagaaatgaaagaaaagaaaaagatgagcctgttgctcaaactggtcatcgccatcgtactcggtatcgtggtcggtttcgtgacccccggtatgggtgccttcggtgaggtcatcatccgcatcggcgctacctacaacagcatcttcggcaacttcctgaacttcgtgatccctctgatcatcattggcttcgtcgcccccggtattgctgacctgggcgccggcgctggtaagaccctggccgctaccaccggtgtggcttacggttccaccatcatctccggtactctggccttcgttgtggcttccctgctgtatccccacatggtccacgctggcatgttcatggagaacgccgccaacgctgaggagactgtgctctccggctacttcaccattgagatgcccgccatcatgggcgttatgaccgctctgctgatggccttcatcctgggcctgggcatggctgtcatcaagggcaacaccatgaagaccgtgatgaacgagtttgctgagatcatcgacaagctggtcagcaacatcgtcatccccctgctgcccttccatgtgtacggtatcttcgctaagctggcttatgccggtaccatcgtggagatcatgggctccttcatcaaggtgttcgctatgatcctcgttctgcactgggtcatcatcgtgttccagtacaccgtggccggcagcgctgccaagaagaatcccttcgctctgatcaagaacatgctgcccgcttacaccaccgctatcggcacccagtcctctgccgctactatccctgttaccacccagtgcaccaagaataacggtgtctctgacggtatggccgagttcgtgtgccccctgtgcgctaccattcacctgtctggttccaccatcaccctgaccagctgcgctatggctgttatggtgatgaccaatcagtccatcggcttcggcaagatgttccccttcattctgatgctgggcgtgaccatggttgctgcccccggcgtccccggcggcgctgtcatggctgctctgggtatcctgcagtccatgctgggcttcgatgagaccatgtgcggcctgatgatcgctctgtacatcgcccaggatagcttcggtactgcttgcaacgtcactggcgacggcgctatcgctgtcttcatggacgctatcaccggcaagaagaaggctgctgcaaagtaaatttccattttctcttctcttatacatgctttctgttttggaaaggggagcgcggacagtccaatggactgtccgcgtttctctttcttttttctgcaatttggagcgaaagcggaaatgatgcttgcgctgacggttaaaataaggtaagatgaagccaaccagcaagccctttggaaaccgttgtaaaagtggaggtactcattatgaagtggatcattgttcctatcctcgttgtgctgctcctgatcctggttgtcagcaatatcgtcattgttcagcagtcccgggcctatgtggtggagcggctgggcgcgttccgcaccgtttggaatgtgggtctgcatctgaaggtgccttttatcgagcgcgttgccaaaaaggtgagcttgaaggaacaggtggcagactttgccccccagcctgtgatcaccaaggataacgtcaccatgcagatcgatacggtcatctacttccagatcaccgatcccaagctctacacctacggtgtggagcaccccatgaacgccatcgagaatctgacggccaccaccctgcgaaacatcatcggcgatatggagctggatcagtcccttaccagccgtgataccatcaactcccggatgcgctccattctggacgaggccacggacccctggggcatcaaggtcaaccgggtggagctgaaaaacatcatcccgcccaaggagatccagaacgccatggaaaagcagatgaaggcggagcgggagcgccgtgaatccatccttcaggccgagggccagaagcagagccagatcctggtggcggagggcgagaagcagtctgccatcctgcgggccgacgccgccaagcaggcaaagatcatggaggccgaagcggaaaagaccgccaagatcctggcggctgaggcagagagtgaggccattatgaaggtccagcaggccacggcggatgccctgaagctgctgaacgaggctgcgcccaacgatcaggtggtgaagctgaaggcattggagaccatgaccaaggtggcggacggcaaggccaccaagatcatcatccccagcgaattgcagggcttggcgggtctggcggccagcgccaagaccgtgttcgagtccgaagaacccaaggcataaacagtgaagcaaagcagtcccgcggcttttgggccgcgggactgctcttgtcaaaactgaccttatcaaatttatgagaactggcatttgccacaaagtcaatcgcgtgctatgatagcttcaacaaacaacttaggagtgctttttatgaatcggaatgagaagaatgtcaataagctgaccatgctgggcatgatgacggcgctggtgtttgtcagcaactatctgcgaatcaccatgcccatcgccatcggcggccgcacctcctttactctggccaacatcatgtgctgcctgtccggcttgctgctggggcctgtgggcggttttgcctccggcttgggctccgccatctatgacctgaccaacccggcctacgctccggagtgctggatcaccttcctcaccaagggcgttatgggtatggtagccggtctggccatgaaggaccgggagacgcctgcttacgggcgctgcaccgtctccgcggctctgggctgtgtggcttactacattctctatttcttcaagtcctttgcgtatgacggcctgctgatgggtggtctcaccgcttccgtggcggcggcggctctgcctctgaagatccccgcttccctgttcaacggcgcggtggccatcattctggcacccccgctgtgtgtggctctgcggcggtccctgaagcggacgcatattcagcttccctgattttcggcctcccttgtcccggtccctttgtgaagtatcacatgggggccgggcttgtttttttgctcagaaagagtataataaaattccgatttgatgttggaaagaggagaactgaatgaacgaatatctggatttgttcggaacctttgccaaggtgggcgtgatgaccttcggcggaggatatgccatgctgcccattctccagcgggaggtggtggagcataagggctgggccacagaggaggagctgatggattactttgccatcggccagtgcacccccggcgtcatcgccgtcaataccgccacctttatcggtcagaagcaccggggctggttaggaggcatcgtggccacgctgggcgttgtgttcccttctttaatcattatttcgatcctggcgggattgatcacgaatttctcccatttggcctgggtacagaacgcctttgccgggatccaggtatgcgtgtgtgtcctgatcttcaacgccgtgctgaagctgctgaaaaaatctgtggtggataagcggacggcggccattttcctgatcgtcatggcgggaagcttgttcctgcatatttctccggtatggtttgtggtggtctccgctgtggtggggattttgctgaaaaacctggaagggagggctgcgaaatgacctatctgcgtcttttctgggaatttttcaagacggggctgttcgccgtgggcggcggtatggccaccgtgccgttcctgaaaaacatcggccttgctactggctggtacagccagacggacctgatgaatatgctggcagtctccgagtccactcccggccccatcggcatcaacatggccacctatgtgggcttcaccgtggcgggcatccccggagcggtcatcgccaccatcggtgaggtgacgccctctatcatcgtcatcttgatcgtggcggccatgctgaccaagttcaggaacagtaactatgtggagaacgccttttacggcctgcggcccgcctccagcggcctgatcggtgcggcttgtgccggcgttgttttgcaggtgcttctgcgcgtcaccagcactgcagtcccggattctctttttatgcggttttcctgggacggtacggtaagctggatgggtctggcgctggcggcggtgctgctggtgctgactaactgggtgaagcttacgaaaaagtggcatcccattgtgttcatcggcctttctgcagcggtaggcgtggtgttccggttcggcggtgtgtaaaagatgaaaaagtgcctgagatctcaaatctcaggcacttttttgcgttctttgttcagagcggctgcgcggacagactgcacagttcccgcagcacctccaccgcctcatccatgatccgggagagggtcagatcccggacgccgaccacgatcttgccgcagttggaattcaccgacagcagtaccttctgggcccggctctggcccacggccaccgccatagcaggggtgatctcccccatgagggcatccgccatcagaataccgatgggaccggcgatgatgtccgcatcccggcaggccaccagaaccgggttttctccggtggcgccccgctgggccccagccttcatcatggcggcagtggcgatggcattggtgcctaccgccaacagttccaagggaagtcccgccgcccggacccgttctaccagcagcgcacctgtgcggccgctctggccgtcgatcacaacgagcttcatcgtatttcctcctttaaggccagcgtacagcggccctgagtgtctgtttcgtgaaaataagtctgctccagagggatccagcggtcaaaaaactgctgaccccactcc

SEQ ID NO: 12141 - DNA, 4832 bp, Unknown
  gut microbiota DNA sequence
agattcttccgagccgccctatgggcttagccgatgccgccatagatggcgcccaagatcagggccgccagagaggctgcgcaatacacccacttgcccagaggatagaaccagccaccgatgtccttcttgccgacggtgcggccctcgtggacagccgccagagcggtgtccttcttcatgacccagaagaacatgataccggccagcagagcgcccagcgggcagatgtaaatggagacaacgtccatccactgagaggtccatggctggatgcacagtgcgatcacgccgcccactgcgccgatgatgaccacagacagcacacgattggtgtggagcttctcctgcaggaaggctacgggagcctcatacaggttcacgatggagctgacgcccgcgaacagaacgcagatatagaagatcatacccacgatccgtccgccgggcatagcgttgaacacattgaccagatagacgaacatcaggccggggccgcccttcattccaacgatgccgtcacccagaatgactgccatggcagggatgatgacgatggcagccagcagagcggcgatggtgtcgaacagagccacgttgcgggcagaggaaggcagatcctcatccttaggcagataggagccgtagatcacggagccgttgcccgccacagacagggagaagaatgcctgaccgaatgcgaagacccagacctgaggattcagcaggccctcgggcttgagggtgaagatgtacttgtagccctcgctggcgccgggcagggtgcagatataaacgcccaggaccacgaacaggaagaacagggcgggcatcatgaccttgttggccttttcaatgccgttgcccacgccgaatgccatgatggccagagaggccaccagacccacgatcagccatacgccattgccgatgccgaagatgccgttgctgaacatcatgctcagggcctcgcccagagtctctgcctcgggagcggtgccgccgaaggtgccgccgatggtcgccatatcggtgcccatagcatacaggctgccggaaatacccatccagcagtacttgaagatccagctcatgaccacggtgtagccgatagccagcatcatagagccgacgatggggagcgcgccgatggcctcgcccagccgcttattaccggtgcgttcctcggtagccttgccgaaggagatcacggggccgccctgcgcccaacggcccagtgcgaattcctcaatgataccggtagaaccgatcagaagtacgaacaggaagtaggggatcaggaacgtcatgcccccgaactgctgcaccatgatggggaagcgccaaatattacccataccaacggcagagccaatgcaggccagaataaagccccatttgctttgaaaaccgtcgcgattttccagagttgcgtgtttgtctgacatagtttgccctcctaaagacacagattggtgtgatgatcggatgtggcacttttcagatcggctcacgcccgatgggtggccgcaagcggcgcacccaaacgggacggaacctattcaagcgcccgggcgcgatgaaaactgagacaaaggaacttgctggaaatgctgcgctgaaatctttttatttaattgtatttcccggacttacttctcctcgttggcgtagggctccaggaaggcgtggaagtgacgcatgggcagcttgtggccccagacgatccgcatgttggggatggactcgcggtcctcatacagcgccttgacagcggcgatgacatagtccagatgctcctgagtcaggcggctgcggtcgatggcgaagcgaaccacgttggccagctcagcctgctgctcgggagtcttcaggtcatattccatggagaagtcgcccagctcggacacgcggataccgtagcggcggatcagctccagagagaagccggtgccggcgaaggtggtatgatcgcgcttgccgtcgaagaactcatccatgttgatgtacacagcgtggccgccggcggggagaacaacgcccttgacgccggccttgtagaagccctgtgccagatactcgcactgctgcacgcggtcatgcatgtagccgaagtcgcagctctcatagaggccgcaggccagagccatgatgtcacggccggacatgccgccgtaggagtcgttgccgtagcaggagatctgcttgaccttgatgagcacgcccacgtcggtcttcacggtgccgtcctcgttgaagtcggagaacttctgccagaacaggccgcggtcgcggaaggcaagcataccgcccatgttggcgtggccgtccttcttggcggacatggtgaaagcgtcgcagtaggagaacatctcggtggcgatctcggcgatggacttgtcggcgtagccttcctcgttcatcttgatgaagtagcagttctcggcccagcgggcaacgtcgaacaccagaggaatgtcatacttatgcgccacgcggttgatctcccggatgttggccatggagacaggctgaccgcagatggggttattggtgatgcaggtgaacaccagaggtacgttctcgggaccaacgccctggatcagctgctccagcttctcgatgtccatgttgcccttgaacgggttcttctcgtaagagccgccctcggggatctcatacagcagctccttgttgtacaggttgcgggggatggagcccatctgcttgatgttgccctcggtggtgtcgaagtggccgttggaggggatggtgaagaccttgccgggatgacgctgggccaggatcttcttcacgatctccatcaggacggactcagcggcacggccctgctgaatgatgaaggcgttggggcgctccatctgagcagcgccgccattgaacaggccgccctcgtactcgcagagatagacctcgtccatcatcttctcgatgtcacggcaatcggtgcggaccaggtcgatgaccttcttccagttcttctcgccgccgcgctcgaaaatgtcgcggaaggtatccagcagcacatagtagccggtgttgcggccgtaagcctcgtcgcccaggaacagggtcgcccactgctggttggtcatagcggtggtaccggagtcagacagcatatccacagtcagcatgccggaggggaatgcaaactcattccagtgcgtagcgttcagagcgcgctcgcgctgttcaacggtagcctgaggaagatcgcgcaccacatatgcgcagtgctgaggcatcgtcacattcaggggatagtgcttcgcattcttgtccattttgtttacctccataatttggcgttttccgcctgtttttttggagataccccggtcgtcgaagagcgggcttcccatttcccgctctgcgcctggcggacagtatccgatacaaaagaatcgtggagcggctcgtttcaggctgcctgaacagaacgcccggcagggtcctgtctccgctcccttcctgttgtgcgattattttatcacgtttttagggttccgtcaacttttattgtgattttattgcatatcttcaatattttctacgttgtttagctgtttaaatttatatattttgtacgtttcctcggttggctgataataattttttatcattattttttgctttgacaatacgactttctcatatataatattttcatagcccgaaaatatgcaaaatgaaacgggggaatcttatgacgtcctcttccagcctgatccttcagcattacatcaagctgaccgaatttttgggaaaagcgctgggtcccgactatgaagtggcccttcacgatctgacccggaaggaccgttccatcatcgccatcgccaataattatatcagcggccgggaggtcggcgcacctctgaccaatatggccctgagtattctccgggacaagagctatgagcatacggactaccatctccactattacagcatcaacgtcaacggcaaggatctccgctccagcacctttttcatcaaggacaacggcaagctcatcggcctgctgtgcatcaactttgacgacagccgctatcgggatgtctgtgaccgcatcctgagtctgtgccatccggatctgtttgtgaccgatgtgctggcgcagccgctgccggagaacgaagatggtgtatccgcccggtcctccccggaaaaattccgcaactccgcagatgcggtggctttggacgccatcaaccgggaactggaacggatgggggtcacgcccggccacctcacccacagcgagcggcttcaggtcatcacttctctggaatccgccggcatttttctgctgaagggcgccattaaaagcgccgcggccgccctcggctgttccaccgccagcatttaccgctatctctcccagatcaacccctctgactaagcccgaaagcactgaaaaggccgaagtgtaccccttaatttatgtatgtatcaaaatcacctccgccgaaaacggcggaggtgatttgattctttatgttccgctctcgccgtagttgctcagcacccgggcagagggatcgttgacgtcgcagcccttccagttcttgtttggcatccagaaatccttcaccataggagcctgaccgggatagtatttctcaaagatctcccggtacagcagggattccttggtgaacggctgggcgaaatcgtacttcttccgcttttcctcaaactcggcatcagtgtacttggtttcggcgtactcctttaaatcgtccaccatggaatgtcccacggcgtcggagaaggctgccttctggcgccaaaggatgtcatcc

SEQ ID NO: 12142 - DNA, 20002 bp, Unknown
  gut microbiota DNA sequence
caaactatgtccgagaaaattgtacagctaaacgaggaagtaatcaagggccaaatcaaggaattggtccgcggcagcgtggaggaaaccctgaacgagctgctggagaaggaggcggagtctctgacgcaggccgcccgctatgagcgcagcgaggcccgtcagggctaccgcagcggccactacgaccggaatctcaccaccacctccggtgacgtcacgctccatgtaccccggctcaagggcgtatctttcgaaaccgccatcatcgaacgatatcgccgccgggagagcagcgtggaggaggccctcatcgagatgtacctggcgggcgtctccgtgcgccgggtggaggacatcaccgaggcgctgtggggcagcaaggtctcgcctgccaccatcagcgagctgaacaagaaagcctacgtccacatcgaggattggcgcaaccgccccttgcagggtggacggtatccgtatgtctatgttgacggcatctacctgcgccgcaactggggcggagagtacgaaaatgtttctgttttggtggcgattgccgtgaatgaggacggttttcgtgaggttttgggcgccgccgagggcatgaaggaggacaaggccagctgggtcagtttcttccagtggctgcgcggacgcgggctggacggcgtaaagctcatcgtcggcgacaagtgcatggggatgctggaggccgtgggcgaggtgtttccggacgccaaatatcagcgctgcacggtgcatttctaccgcaacgttttctctgttgtgcctaaatccaaggtcaaaattgtggcaaaaatgctcaaggcgatccacacccaggagagcaaaaaggcgtcccgtgagaaggcgaaagccgtggtcgccgagctgcgcgccatgaaactgaaggaggctgccaagaaggtcgaggacggcattgaggagacgctgacctactgcgattttcccagcgaacactggacgcgcatccgcaccaacaacgtgatcgagcggctgaaccgggagatccgccgccggacccgcgtggtggggacattccctgacggaaattccgccctgatgctggtctgtgcgaggctgcgccatgtggcaggtacccagtggggctgcaagaaatacatgaacatgaagcacctggaggcggctctggacaacgccttcattgccggctgacttcattcagccggagcctgcaaataaatttgcgcataaatcttgacggcaccaaaaatcttggtctctgcgcaagagccgaaaatcagaagcgcacagagcaaattttctgctgcacagtcaaaatgtcagtggcaagcaaaagacgtcatgatcatgcgtttttaaagcatgtttttgcggaaaagcagttgcttcaaagcagaaaatatgatactatatccaaggtaaagaactgccgcccactcccctggaacgcgcagaggatacgggcggcaatttttctccgcgttcccaaaaaacagcgtcaatcattctgtcttgtttttttcacgcatttgtgatatactcattttcactgaaaaatcattttcagaagcaggtgattttatggcttataattttgatttttcttatctgaaaaatggcgctcccgcagtaacgctgagctccttcggcatcgccttcaacaagggcgcgatcgaatcgcttggcacaccagatcaggtgatcatcggttacgatccggatcagcaggccatcggcgtccgcgccagaggcgaagacaccacttcaccgtgctacgattttgcgccgcgtgtgaaaaacgactggattcgtatcggcgccaaagactttatgaagtacctctccagaaccagcaagatcgactttctgaccaaggcgaagcagttcattgccgagtatgacgaggaaacgcaaacgttgatcgtcgtaattgatgaggcgcatctcaaataagtacaactcaggaaatgaaaaagagcgacatccaacgagtaccagtcgtcggatgccactctcctgtgtttgacgcatagaccagtcgaaactgatacagtcgccgtattgcttacacggtaagattatatcacgtttcgggtggtctggcaatcctgcacatcttgtgctcatagcatgactatgggcacaagatgcaggtacaagccgggctttttctgtttgtaaattttttataaataggagtgaaatcatatggatatcacccgcaaacgtatcattaacccgcagcgctacctctatgcgctgcaccccggcgataaattctatatcgccgtaccgctggcggaggaggactacccgcgtcttcagttttacggccttcttcccgactctccggcgcggattccgatcccacggagggctgcaacgaccctgaacgccaacggcaaatggaaggtcctcagagatctgccgaaagagaaacggtcctttgagcatgactaccacattgtggattggcatggaaatgaccattatggaacctgttggcaaagtcgttggtgttatcagcgcgagctggtcccgcccacagaacttgccttcatcatcgaaaacggcgtcctttactccccgctgttgctgaacaccgacagcagctttaccatcatcaaggcggctatgaatattgcgctggagatgctgggacgttgtgaagtctggactgccgaacgcgctcccgcggtgccgcctgtaaagcaaacggaggtcccttgggagatcctccgtccgggaaccagccttcagaatgactgggaagcgtatatcgacaagatcgtagagcgcaaacccaaaggacagcagactgttatccgccagcgtcacgaacatctgtggcacatggctcccgacttctgcgtccttggctctcaaaacttctggggctatgtggtctacggctttacggcgctgaacctgtacatctttgaatgcaatgaggtcaataatgccacctatgttttcaacggagattggaagtcggcatctcagctcaccaaaacagaggtgctctccggtcacgttcaggaggcaaggatctaccataccgagaagtggtatgagcgtacaggcaaattgatttcccgcgctggtaagtgggttgcatgatgggaggacacagcctgtgatcgagcaaccctctggcggctgacagaccaaacgctcaagcagccaaagaagcctttacgcaggccgggacctattccatttccctgaagcatttgcccggccagaacgccgaagtcatggttcttggccgcagcggcacacgccgcacaaagactcctgcggcggggatccaattcctcatccgaaaataaaattaggcagcgacatcatggctggttcacatggtgtcgctgctttttcatgctgtttagatacgatcaatgataacccgccatgccaaatggcgatgttaaaattaggaatcgtgccgatgcctttgcagtcggtcagggtgaatgtgacactctgcttaacaatgatggaatttacggatcgctcgcttgtgatgctgtggccgttcaggcagagcaccacgccgtccgcgggcttccatgcttcgttttcggtaagcgtcacatcgccggtcaggtagtagttgccagaactggtgatgctggtcaactcctgcgctgttccgattgccatccagccagtatggtcggtgtgtttggacacatccccatcctccgccaacagctcgacctgccgggttgcccacttcagaatgatgtatgctcagttctgagcgtgaagccatgccgccgatctttccataaacgccagccgccgctatcgccgctcaaacgccctatgcccttccctataaaacggcccgttgtaggcgcttctgctggctgctgggggtctgttccctctgtgtgtcttcgtctgcttttgcgggtgagccctgcggtcagttctgagcgatgattcagatctgaccgtaaaattccctctatcactcagttctgaagaatcggctcgaaagcaaaaaagtccgggcctcccaccattacggcgggaaacccagatacttaaccaatcccatgatcccgatacatcatatccccaggatgatggaactcagatgcagccatctcatccggcgcgcccctccctgcggagtgtccggcagatccgcaacagcccctccagcgtcgcctgcaccggccggatatctcatcaatcatccttataatccactgtagatgttaagcttacaccatatgcaacacatattggtatgcggcacgtttttctacacacagatttgattgcaagaggggtatatatgacacgttatctgacgaccacactttatttattgcaaacgtaatgtttgaccgttagctttcgcacggagtatgacggttttggcctctcgacaggatgtacttgatttttagggaacaaattgataaaattaactccataaaagttccctataaggaggacacacccatggaaaacaactatcccgagatccgggagttattgcagcaaaaggctgactatcaggcacggctgaacctgctgccctatgatggttccccagagatcaaggagcaaggcggcaagcaatatctctatatccgcaaacgaatcgccagccggctgacgtccgagtatgtggatgtctattccgataccctctaccagacgctgctgcgaaatgccagagaagccagagaactgaaaaagcagatccggcggatcgagaagcagttggctcagcagggctacacggaatcggagctgtccgaccgggtcatactgaatattgactttgcccgcgccaatatgaagacgaacatctacgatcaggctgttctggaaggtgtagcgactaccttcccgcagacggaggacattatcgaaaacggtctagtcaatggtatgacggcaacagatgtgcagaagatcttgaatctcaagcacgcgtgggagttcgttatggacaaggatgtggtgtcctatcccacggactactccattctctgccacatcgctcagctggtcaacgagggcttttacaccaatggtggtcgtatccggggcgttcctgtgaccatcggcggcaccagctatgtcccacccctgcccattgagcagttggtcaaggaacatctggaggacattcttcaatccaccgcagagcctgtggaggtcgccatccgcctttgcctctactgcatgaaaacgcagattttcaacgacggtaacaagcgcgccgccgtgatcttcgccaaccactatctgatctccaagggcggcggtctgttggtgatcccagagagccatgtgccggagttcaagcgcctgctggtgagttattatgaggggcgggatgacggaagcatcatgactttcatgcgggagaagtgttggaagacgttttaaaatatattagggaacttttgaatcggaatttggcaaaaaagttccctaaacaatactcctaaaaatcacttgtctttcattgaagtatcttgaaaacgacaggtaacggccaatagcacatctatgcaccatttgtaaattagggctccagaagcatgcggaaaaaggaaagcagtacatcatgtgtaccagcatgatgcccccgcaaatccgttatcctctatagccccaaaagttttgggaactaactactaccgcgaaaatcgatgcgagtcttgcagcacaaagcatcttttgagataggcatttattcattgaaatgttatctgataaatccaggaacatttcaatgggcttcttgattttcttccaaaatgatgtataatgtccattgaaaagttgtaagataatataggtaagttttcaacggaggttgggctatggaaataaaacgggaacgctatttgagcaagctcatctcctttatatgggatggtcaagtgaaggtcatcacaggtattcgccgctgcggtaagtcctatctgctgcacacattgttcaagaattaccttctcggcgaaggggtggccgaggaccatattctgtcctttgagctggacttgacccgtgatattcgctatcgtaatccgttggagcttgcggctcacgtccgcgagatcgtagaacacagcgcagaccaatattatctctttgtagacgaaattcagatgtccgatgaagttccgaatccctacaatccggacgggaagaagatcaccttttacgacgccctcaacgatttgaagtccttgtccaacttagacatttatgtgaccggcagcaactccaaaatgctgtcctcggacatcctgacggagttccgggggcgcagcgatgagatccgtgtgcatccgctttcctttgccgaatactattcggctgtcggcggcgataagcaggacgcctttgacaactacgcattctacggcggtatgccgctgatcctctcccgccccaacgatgccgctaaaatggcctatctgaaatcgttgttttccgaggtctatctgaaggacattgtagagcgaaagaagatcaagcgggaggatgtgctgtccgctattcttgatctgctgtgttcgtccatcggctctctgaccaatccgacgaaggttgcagccaccatcagcaccgtgcagaagcgcagcggtgagaatgccgttgccctgaacaccgtgaaagcctatatggatcacttatcggattccttcctctttaccgaatgtaaacgctgggacgtgaagggcaaaagctattttgattaccccaacaagtattactgcgaggatattggactgagaaatgcccgtatcggcttccgtcagcaggaaatgacgcatatcatggagaacatcattttcaatgagctgatgatccgtgaatgctccgttgacattggcatcgtctatggcaatgagaaaaatgccaaaggaaggaccactccggtcgcgcgggaaatcgacttcattgcagcctccggcggcaagaagacctacattcaatccgcctacgcattgggaacagaggaaaaggccatcaccgagaataagcccttcgcgctgaccggcgattctttcccgaagatcattgtgcgtcacgatatccacaagcgttggtatgatgataacggcattctcaatgtcggcgtcatcgacttcctgctggacgacacgcttgtctaatttcttctaaaagcaaatacgaaaacgcattgaggcggatctccttggttggggtccgcctcaatgccttcaccggaaaaattttatggtacacccttgactttttccccctctcccggcagccccagtgcggcataagccgtgataaaggccgcctcatccaatgtctcgctgaggtcgcgccccagcatcccctccagccgccgcactgcggccgcatagtccggcatctgctgcgtgagtccctcgtggatgagggcgggcagccgcagatattccggcggcagttgccccagccggaggcggagccggacgaacgcctcccccagatgccggtctgcaagcgcactcatagcagcacccccagcagctcgtccatcagctcgtctgatgccgccgcccagtcgtccgggtatcctgcccaggccgtgccggtatgcgccagctcgtccagctcgtccgaatgctccaggcagtagtctgcgagcgcttcccaggccaggccgggggtggagcagctccggatgaacgcagcctcagcggtgactccccgccgcatctcccagctctggctggcgtggtcccagcagaggctccagcgtccgggctccgtgtctggggcgtggacggccgccagctccgcgcgcggcatcttaggaaagagggtggggaaacgcgtgccgggccgcacgatgatgcggaatccggtgggggctgcgccggtgccggcgtcctgccatccgtcggggatggcaggcagaacgggcgtccagccaaggctgggggtggtacgcgagacggtgccccagggagtgctgcagatatatccaacaatattgtccataggaatcctcctctctcccagactggatgactctcagggagatctcgtatttcccgaagccggggctccgggctcttatttattgctcctgcggcggctgccaaaccgcttccatcatccacgttcccggcccccatacattcggcacaacccggattccgtccctgtgccacatggcaatcagagcggaacctctggagaagtacagcttgccctccgggtcgaacagctcgtcccactccggcggcacgcggtccggcgtccactcctcgggctgcatcgctcccggtgcgtaccgatccatccacgctgcgtacacgtcacggaactccgaggagctctgcggaatgcagccgtccaggatatctgctatgaggctcggcgcgatgttgtacacctgcggccccttgtcgggcacgatgccgtaaatatgcatttcaatcataaatcgcttgaatggtgagcattttgctttgtttaagctcctcccaatctccatctgtaaggggcgggaggatgctgcacagctcgccaaaatggtaggcagccagatacgacagcgtctgatcccggtccgcgcactccggcggatagtcctccagcagatggtcgaggtccgggttgcggtgtacccagtaatcatcgtccagttgaagcagcttgccgatctcccacagctgtgtcgcccgctggttcgtatactgtgtgcccagcacatagttgatccatctgatataggtcttttcccgcaccagacagccgttgatgagcgttgcggcataggaggcgctccagagtgttgttaaaatgtgcacggcggcgatcgttgaatagtagcagcttccaatgatcttgccgcagccgaaccagccgtctttcgcgttgagacaccaccgctcaccgctgttttcgtccagataattgtagtggccgacggccttgccgtcctcctcgtccagctccggcggagagagcaggtacagcttgtgtccgtatagctgtaccgattccactgtcaccataccgcctgcccgcaggagcttcagcgcctgctgcgcgtattccgcccggtgttcctccgggatgttgatttctcctaaatattgactctcaatgcccatgatttcgcctccttatgtgagttcagcataccacggcggacgcgtgcaaacattaaacctatggtataaaatgaaggtcgggaacgatccattcccggccttcattatgctctatggcgcctgttccacaatgatcttgtccatggggacgccccagagcttgctcaaggcatacaggttatccacgctgggcagattacgcccgtgctgccagtggtagatcgcctgcggatgttcgagtcctaaataggcctgtaagtcctgaacggagtacccttgctccagccgcagttggcggatgtgtgcgccggtagccgcaaggtcaatggttggataggccatgctgatgctgcgcatgagtctgcccctttatgctgccagattgatacagaggtcgatgccaagctgcgtggccagagcgtgctggatagccagccggtcataccagccatatattgtgccgatgtgccggagcagacaggacttgtccagtggcatcacctgttcgcacatggcgatactgccgctggaaaggccgtaaccccggaggtatacgtgggtgggcagcgcgggcttgtggcgctgagtggtacagggtactaccgacacgacagggctggaggcgttgcccagatcattgctgacgatgacgaccgggcgggtgccgcgctggacgtggcctggtacagttggcagggctgcccaccaaagctccatacggtgcacggcgggacggggaaggttctgctttcgctttttcatgattttgtctcctcgcataaaagatatttggcgacaaaaaagcactgcacaggccatagtagtcccgtgcagtgcggaagattctcttgccttgggggggcgaaatgggtataatatccctgcggtgcagagtctctgctgcttcgggcggtgcgtcgcctgctgcaggcggtggggtgctggtaacaccctgccgctgccgtgctattttgttttcatcgtcattataccacttgttgataggccgtgcaacccgcatcgggccatcgcgcgcggcgggaaaaaatttcaatttgcgtggaacaggcaggaatgtccgaggtggacattcctgttttttgtgtaagtcaggtggccggcagatactgtgtggcagtcaaaaaaggagacacaaaaatagttctctttgtcaatttgattgtgcaataatagaaaaattacgcgatcacaatcaagcggcggcgctgctgcgtgcggcaatttcgctgaaagaacggcaatgcaattcgtgcttctgaaagctcactggcagataaaattgatataaataagatgtgtgttttcaattttttcaagcgtttccggcggcgtgttcgccgctttttttaatgagaaatcgcaaattattcgacggttctgacacggcagtcctctgtttttagagatgagttatagcgaaacacgcacgaaaaatatcgtcggtttcgaagaaaactgaactcgtttttacgaatttcggctctgttttttgagtgagttcttcatagaacccagccggtttttcgccggaattgacgctgctttcagcggaatgaagctgtgcgatctgcgcagttcgaccgctgagcggcgcatctgcggctgcttgcgcgcacgatatgcaagctgttttgctggcaaaaatgctgcggaatttccgctcaagcgcgccaacgatggcggcttttttctgataattttgcgctcgcaatcagcgtttttgcctttgcatttagctactttgcacgctataaagatgactgaaagtatctgaattctcatcggaaaattttatttatcggcccttttacgagagaaaaaagtcggcggaatgtgtcctgcgtgagtcgcaaagcgcgtcctgcgtgagcaaaaaaacacattctgccgtctctttttttgagtactcctgacagggtttgatgcaattcaactgcggagctctcccctgttttgatgctccgcagttacgaaaatcggaggaaaattaagaatgagcggagcgttctccacatcttttttgctcagaaaatgaagaagaaacacgcatccgctgcctcatttggatggcggtatggtacgtcattggggagctagcagtctggcggagcacgtcgtcccggcagagctgaatgccaatatccgcctggagcccggtaagcatgagctgaccgccgaagagatcgcagcggccaaggccaataccgccgccatcgccaatggctatggcctttgtctggtgggtgttccgggaggccgtcggcctctgcaaagcggccagctgtacggcgttcgtgaaccggtacaaagcttttgcccccggcccggctacccggacccggcttaaaaccaaaacgagaaccgccctgcggccgtgggcgaaattttttcttgacttctggaagtgcgcaccgtataatcatattgtaaatgtctctcttagcctgttatgggcacgtttcttccctgccgcttgcggcagtcgtttctaaatttgattatttttgtgattgatagtatatttactattgaatcatgtagtgatatcgtacaagagagttcattctaacaaagagcaaagagaatatataaaacgaagagctaaaacaaacctgattaggttgttttagctcttttgttttgcgaaaggaggtggagcatatgcagatcatcgtgatcgcctcccgcacccggcagggcgggagattgaccccagcattgctgtctgccggcagcacatggcacgcgcggccgctggccgcatccgtctgtacggtagtgcctgccgccgctgtggccactggctacagcaggacgtttgtgcgtcccatgcggcgtcttactcaccaaccccaactagagacagtgggcaagcgtcacccacgaagccttacgcggcaaggctttgacgcatccgtcttccggaaacgaggcggaaacagggaccgcggactattgggggtactatacccagaaaggatattgcgtatgattcacactcagaacgagggcatctaccgcgccctcatcgcccaattggacaagctggcccggcacaaccggcaggagagctacaagacccggcagcggtactatgaggccatgcagcggttttgccgctatttggcggaggagtaccgcctacagaagctggccaacatctccggcaagcatctggttgcctacgttcgccacctgcaggagaacggtaaggcggccagcaccatcaagacggagctggcggcgattcggttctggcatgaccaaatttccaatactaaacataagttgccctccaacgcggatctagccgatcaggcgccgttggagcgccgaaagcttcaggggattgaccggcactggacgccggagcagtttaccgcctttacatcggcctgccgggaagaaggccgggaggattatgccgccattgccacgctcaccttttacgtcggcctacgtatccatgaggcctgccgtctcgatacggctgccgtagaggcgtgggagcggtctggactgctgacggtcaagggcaagggcggacgtgtccgaagcgtccctgtgacggcggcagcggcaaagcaggcgctgcgggagcgaaaagccgccgtccggcgggggcataagctgtttgtgccggacgatgtggcgaccgacgcctatatctacgattttcaggcgttcctccgggcgcaccgtccggaccaggggacaaatccccggccgctgacacaccacgggatgcggcacagctatgcagcccggcagtatcgggaagcgttggatggcggggctacagagtaccgggcaaagttggaggtgtccaagctgctgggccacggccgcgcagatgtgacggacgtatacctggcatccgaaaagcccgaaaatcaatgattgaggtacacgcaaaagtacacactgattttgctggttagccaataacttttttgctatgataaaaggcagtgcctgattcgagtccagcagtctctgccaaaacgacaaaatccgaacttgttcctaatcggggatgggttcggatttgtcttttatttgcaattctttacaatgtggcggggcatcccgaagcagacgcctctgccctttctacgttcaatgacaaaaatcaggttgccgcgtatgcggtcaacggctttgcatgggcggtttccaataaggttgttggcggaaccagcaataccactttatacgaatcttgattcagagacttttctcattggaacaatcaaagaactttaccgtctccgttggggaattgaaacttcctttagagaatttaaatataccattgggctatcttgcctgcacggcaagaaaacggactttttactacaagaggttcttaaaatgctttacacccaaacagtgttagcgttcgccaggaaaaccactgcgggggtgaggacatttttttggacttatttgatgtagttcctaaatttctccgcctcaatatcaatggaaaaagtagggccaaaaatatcttcctctacaattccaatggcggatgtagaatcaatcaactcacctgagttcgtctcaaaaacttgaatttcaatttcatcatcattagggtaagcgcgtagcatagtgatcaaatcgccgactgtcattttctattcctccgtattcattacttgcacaagcccaggctagtggaaggcatgactcccaggcaaaaacttcggctgagagcatgtcgaatgctgatctcatatcagaagaatggtaatttcggatttcaatctcctcgggtggaaagaatcttttccggcgaaacgggaaatttgatcactcagtttatacagcatgagcgcgctattggtcgttctgaaaaaacaatcgaatcccgcgaaatatatctgcgcgcatttaatctgtacttgcaacgatttgatttgtcctttaatgacctgtctgtcgattgcatcgaggcttttttcaaatcaatgaattatgagcttgcgatgcgccataacagtgccaaccatctcaggcagcttttccattatctctatgatcgcggaattactgttacagacaatctcccatccacaggccggatgtgtgcaggataccgacagctaaacacttcaaagtcggcgtcaaattgaatcgaataaaagcccccttccctgtgcgctcttgcgctgaatacagaagacccccggttcgtgcgaaccgggggtctttgttcctctccgcggccggagaattccggccgcggctgggttctatggagtttgggctttggggcttacgctgcgtcgggcgggagggcgatgccctcctcgtcccaggtggtcagcgtgaagtggtagaggcggcccttcttgtccttctggcggttcagttccgtcagcagcgcctttaccgtgtcggggtggcgctgggcgatgagcacggcctcccgcacctccatatcgtccgcgacgcagccgtcgtgatacatccgcagctgatacagatcctccgccttgctgccgccggccttcgcctcaaaaagcgtgacgccctccgtggtgctgacgaacagatccgacttgatctgcaggttcaggcactgatacagattcttctccgtggagacccgcaggacgcccggttccgccgactttttctccgccagcagacgcaccagcatctgctcccgaccctcctccttgaagggctcggggacgttggcgcggatccagctaaacagcgccgccaccttttcatcatcctcgcgcaggccgtttttcgccgccttggtatccggcagggcttccgcttgatcgctgagaatgtcgatctgggcgaggaagcggttctggctggggtgcagggcctttccccagatctcgttgtacagtccgtgctggatggcacggccgttgatccggatctccgcgccgctggaggccatgttggcgcggtagtagaaggcgttttccttgctgcggcggatgcttccgtagcggcagcagatggtcaccagtccgccgcccagatcggtctccaccgggggcagctccgtcatctggccgtcccgccagttgggctccagcgccccggcaatctccccgccgtcagaagcgccgctcttgtcaacggcggtgaagcagatggtgaacgccttgtcccgcagcaggttggcgtaggtgtagcgcagggtctcccgcaggtaggccgccatctgcccaaaggtgggctcctcctttttggaggcgggcttgagggtcaggaacttgtgcatggggcagcgcacccgcaccaccgtgccggtcccgcctgccacctccccgctgccggggatcatcgacacgggcatgtggatgtcgtaggggccttctgcccgctggtagcggtcgttggccacgtcctctgccgtccgggtctggatgctccaatgctgatcctccccggcgttgatggacgccagcgcgtgcttgaggcccatgccgtgctcgttcagagtggattcggcgcaggagcgggcggcaatggtgagggcggcgtccatgttctcgatgccggtgccgttgtcccggaccgagacatccacataatccccctgctcctccagcacgatctccacccggccgtgcctcttatgggcgcggaaattggagatggggttgtcgatcagttcgcagagggtctggccgaagtccttgaagttgccggaaataccggcgaaaaactccttgccgttgggggcgttgtcgatgtttcgaatgatgatctcgcgcataatagttcctccaaaaaatgttttttcgaaaacaaaacgcacggtgcaggtcattgccctacatcgtgcgggaggatcttacaacattcctcttgccccgcccgccgaaaaagggtatactgtccctatcggtgcggggaatcccgttgtgtaggtggtctcatcacctgcgcaggtgcaaaggagttgccgctcctttgtactgccgtgttttttactttctaatcgtattatacagtatctgcactcagatatcaatacacagatctcacaaatatctgagtgcagatatgtcggagttgacaatatagacaaggaaagcaaaataccttatactgacactatcaataaaaggcggaggtgcgcaatgtctactgaggaagccaagcgcagagcaaagaaaaaattcattgcagaaaaactggaggggatcaccttccgcgtgcccattggacaaaaatcccgcattcaggagcacgccaaatctcagggggaatcgaccaacgcctttatctatcgtgcggtgaacgaggctatcgagcgggacgagaaagctgatagagaagaatgatcagagcggaaaggtttatggccggaagttgaccagtatcaattatcccggcctcaattattcgatcagttgctctcgaaacaccgtggcgcggatggcgtccagataatacagataggccgtcagccttgatggttgtgccctctgtgcaaaatataaaggatcctaacgagaatttctcagcaggattcttttgtgttgcgagggtctaagccacggatgcagtggtgtcgagagagactttaccttgcggtgggcagccccgctgcaagtggctgtaccgggttcagtgatgtcacagcggatgcctactacgcagccactgtgacatggggccgcacacgacagcatcgccgacgggatcggcaacgacctgttcggcgtcggcaataaatgtacaagagcgcaaatcgtgatgttcctgtggaaactgtacgcaggaaagcaactgctatctatgtaaaaaggactcccttgaccgattttgcggtcaagggagccctttttgtatgtcgtgggaaccatgggcgaggcacatcatcgtaactgtgcttctctgtaggtacggcaatttccgaatgatgtctgtcgccttttggcgtagtggtttaatcgggtctgcgcagttttctgatattttcaaatgagcccttctgcgattcttgcatttttgtaagaatcgcaggcaggccttgaatgagagatagatcattcttcacaccgcaaagtgaacgaaaagtgaattttcaccttatggtgttgaagattgtgaaaatatgagtataatataagtaagcaacaatggaggtactgcgtatgcaatacgaaagcgagcgcattgaatacaaattccaaatgatcgatgacatctataaggaggtcatcgcatttgcaaatacggacggtggcgtgatctatctcggtattgacgacaaaggcaacctgattggcattgataatgtggatgaaacctacacgcgcctgaccaacggcatccgcgatgcaatcgcaccggatgtgaccatgttcgtgcggtatgtcctccaggataataaggtaattcagatcgaggttgccgaaggcagctataagccttactatctgaaatccaaaggtatgaagcctgccggtgtttatgtccgtcaggggacatccagtgttcaggcatctcccgagcagattcgtcagatgatcaaggagtcggacggagacagttatgaggactcccgcagtttggaacaagatttaacattccatgccgcagaaaccgcatttgaacggtacggcgtagagttttccgttgagaagtatcgtgcgttgggtattacacagaatgatatttacaccaaccttgcgctgctgctttccgaccagtgccatcacacgatcaaagttgccgtgttcaaggatgaattctgcacagagttccgtgacagcaaggagttcggcgggtctgtgttcaagcagtttgaggatgtggtaaactatctcgctctgtgcaacaagactgtttccacgatcaaaggacttgttcgcacggataagcaggactaccccgaggaagccattcgtgaagccctgctcaatgcgcttgtgcatcgggattacagcttcagcggcagtattatcatcaatgtaaacgacagcaaaatggagtttatctctcttggcggtctactccccggcctttctaccgaggatattcgcatcggtgtttctcagccgaggaacaaaaagctggcagaggtgttccatcgcctgcgcctgattgaaagctatggcaccggtattcgccgcattttcaagctgtacgaaaactgccctgtacagcccagcattgaggcaacgaccaatgcgttcagaatcgtgttgcccaacatgaatgctaccgatgctgcaaacgaggatacaccggcaacaaccggcaagtctactgctgccatcactccccagatgaaaacggtgatggattatctggcggagtatggcgaaatgaccgatgaagatctgcaggagctgctgaatatcaaaaagacaagagcctacctgctttcccgccagatgaatgaaaatgggttgattgacatcatcggccggggcgcgggaaaaagatatcgattgaagtgagggcaaaaatgatgattgctaccacgaaatcgaagaacagtatctacacaacaaatactgcgacgaggaattcaaggttaagctgaagcccatcaaatcagacaacaaccaatttcttctcctgtaggaagataagattgatgaaatggatgaggatactcatatctaccataactttatgctttgcaaagagcgctttgtgcgctggacagaaaaggacaccaatccgtctcaggtgcttgatatggaccctgagaagattggccgacatttcctgggggtgctgccgaggatctgtccgaaatagaaacaaaaaaatggcggtaagagagtaatactccttaccgtcatctgttttcttgccgtgcagacaggataatccaatgatatgcttaagttctctaaaggatgtttcaattccccaacggagacgataaagttctttgattttttcaacggggaaggtctctgggtcaagatcagtatagatggtctcgtagcatccgtcagaaattcgaaatcggacgacgcggaagtgcagatcatacatattgggagctttgggcgcaatgtagtcaaatgtagtatgaggctggatccaacggtatctttctggataagcagataacagcgctaatgtctctttcttttgccgacgcgttagtgtcaatgttgtatcgacatcaaattcttcgctatttggcaactgaagattcgagatcatgccgtaagattcttttgcgcggatgatgaaattccactctttttcttgtaagtgggcgatgttattgaatcatataattcttttgaaaggctaccgcttcccatgccgatcagcattagtagcatagcttgtaacggtagttttcttgttcttgaaaaatcttttcctggtaattttacacacgcatctaaatttgcagctgttctttttattgcaagaaacaacgcagcccgaatacgttctggatatgatcttcttttcactcggaaagcctcccttaaaaatgtcgtcattttcaaggcgaagccttcgatttttactgatttgtcaagtggtttttatgaaaaatattatttttatatgtccccccccctgcaccgaaatgaaaacgctcaaccaccattataagtgattgagcgtcttaaaaattaacttaatgacatgatgccggggtcaaaagtataggaaatttctgaaaatggaataagcagccaaccttaccacccccaaatctattgtgttataatggttatagatttgaagggtggtaaggtttatgtcatttaaagtaaacagcagccagcaaatatctttcaatgacagtgtattttcacttactgctcgcgaaaaaaaggcacttgataattcatgggcgaaaatat

SEQ ID NO: 12143 - DNA, 27672 bp, Unknown
  gut microbiota DNA sequence
accagataggtgtggttggcataggcgcgggcgcccttggaaacctgcaggatcacgggagcgtgctcctcctggcaagcctcggtaatgccctgcacgatctccatattgttgacgttgaacgcgccgatggcatagccgccatcataggctttcttgaacatttcagtagaagtaaccagtggcatacgaacatcctcctataaaatataactttctatttggggatctatccgtttttcatcccggaagcccttgtgaacatattgacaattttttagatttctgggaggaaaacgtttttcttttatcataatatcacaaaaaaaataaattgcaagtatttactttctaaaatttcgatgatatgatacaggtatcttattttgaatcgtcaggaggattttcatatgagcgaattgaaaggcgcctgtatcttcggtcagtccggcggtcccacttccgttatcaacgccagtgcctacggcgtgatcgcaactgccctgaagaaccccaacatcacccgggtcctgggtgcagagcacggcatcaagggtgttctgaatgaccgtctgttcgacatgggtcaggaggaccccgccgagctggaactgctgaagtacactccgtcctctgctctgggttcctgccgctataagatggcggaccccgacgtggatgacacggattacaagcgcattctggagatcttcaagaagtatgacgtccgttacttcttctataacggcggcaacgactccatggacacctgcaacaagatctccaagtacatgcagaaggtcggctatgactgccgcgtgatgggcgtgcccaagaccatcgacaacgatctgttcggcaccgaccactgccccggcttcgcctccgccgccaagtacatcgccacctcctgcatggaggtctatcaggacgcccgcgtctatgacaccggcatggtctgcatcatggagatcatgggccgtcacgccggctggctggctggcgctgctgctctggctaccgcttacggcgcaggtcccgacctggtgtacctccccgaggtggacttcgacatggacaagttcctagccgacgtggaccgcatctataaggaaaagggcaactgcatggtggccgtttccgagggcatccactatgctgacggcaccttcgtctctgaggccaagacctctgccaccgacggcttcggccacgctcagctgggcggtctggctgctcacctggcctctgtggtcaaggaaaaaaccggtgccaaggtccgcggcatcgagctgagcctgctgcagcgctgcggcgcacatctggcctccgaaaccgacattgaggagtccgtcatgagcggcaaggccgccgtggagaacgccgtggccggcattaccgataagatggtcggtttccagtgcacccgcgacaacggcaagtacgtctgcaagacggagctgctgaacctcaccgacgtggccaacacggagaaaaaggttcctctggagtggatcaacaaggagcacaacggcgtggaacagcccttcatcgactacgtgcttcccctgattcagggtgagcccaacctgcccaaggtggattccctgccccgcttcgccaagctgaagaaggttctggtaaagtaagtctcccctttagaattgtaaaacgcagccgcctgatggatactccatcaggcggctgatttgttgctttactgctttcttttcatttttccgatttactggtttctcttatagatggcccacaggcccttcatcagcagtgttttatcgtaaaggatcttattccggcagaatttcacgataaagggcgcgctgccgccggtggccacgatgtgcagctcctttccgggaaattccccccggatgcggtcgatgatgccgtccagcatggcggcggtgccgtatacgatgccggagcgcatacaatcctccgtgcttttgccgatcaggtttttcggggcctgaagggaaatggccgggagctgggccgcccgccgggagagggcctccagagagacgttgacccccggcagcagaaggccgccctcataggtccgtccctcggaaatgacaccgatggtagtggcggtacccatgtcgatggtgatgatgggcgcggtgaactgttccagcgccgacacagcgtccgccacaatgtccgcccccacctgactttggaccgccaggcggatattcagtcccgttttcacgccggggcccaccaccacaggcggcttgcccagcagacgggtcagcgctttctccatcataaagttcagcggcggcaccacgctgcacagaatggaatccgtcacatcctcatagcggaaatggtaaagctgaaacaggttcatcagatccacgcagatctgatccgccgtctttcggtagtccgtatccaaggatgctaaaaagcgcagctccccatccagcccaaacaggccggtggaaatcgtggagttgccgatatcgaccgccaacagcatacaaagccgcctcccctcgtataacaaatgattttctccatcataccacggcatgaattctcttgcaagtggcacgggcctcgattataatggcatcgagccgtcattctatgcgtcaggagggacttttatggagctgacccggtacgcttccccgctgggaactatatttttagccgctgacaacggagcgctggccggtctgtggctggaagggcagaaatattttgccgccacgctggacgaagccgccgtggaacgggacgatctgcccgtgttccgtcaggccgccgcatggctggatgcctattttgccaagcagcctctcccggatctgccgccgctggctcccaagggcagcgatttccgtcaggcggtgtggcggctgctgttggagattccctacggtcaggtaactacctacggcgcgctggcccagattctccgggaccggggaatttccgctgcggcccaggcggtcggcggcgcggtggggcacaaccccatttctatcctcatcccctgtcatcgggtcgtgggggcggacggcagtctcaccggctacgccggaggcgtggagaaaaagcgctttctgctggcattggagggcgtggatatgacaaatctctacatgcccaagcggggcacggccctgtgaccgttccggcgttctttatatttgcagacaaatgcccccggcgggaatattcccgccgggggcatttttatttgcctttacaggataatgcagatcagcccgccgcttccctcattgatgatccgggtcagggtttcctgcagctttttccgggcatcctcaggcatccgcttcagtttggtttgcagatcgtcgctgaccacctcgtgaaagctgcgtccgaaaatgttggactgccagatcttactggtgtccccttcaaactcctgaagcagataattcaccatgtcctcagactgcttctcattacccacgatgggactgaccgccgtctcaatatccgcccggatcatgtggatactgggggcgctggccttcaggcggacaccgtaccgccctccctgcttcatgatttccggttcctccagcttcaattcgtcgattcccggcaccacgatgccatagcccgtttcccggacatcccgcagcgccccggccaccttgtcatattccgtcttgacgccggccagctttgtcagcaggctcatgaggtcaccgtcatcccccacatcaaagccggactgctccgagagcgtccggtagaacatctcccggggcaggctcacccgtgcggcggctacgccggtgccaaggtcgatggctgtgatgagcgcctcgctgatgttctcgttttctcccagtttcttcactgcgccgtcgatctcccggatgtggtgtagctccgccatgctctgccggatggcgtcatagattcccgcctttaccggatgctctcccggcaaagcgtccacccaaggcggtaggaaaatatccagctcccgcatggggaactcatacagcaccgcctttaggatctcccctacatcttcctcctccagccgcaaacagttcaccggcacgcacttcacctgataccggctggcgatgtccccggccaaggccagagtccggtccgatttggggtcctcgctgttcagcaggacgataaacggctttcccagctcctgcaattcccggatcacccgctcctccggttccagataatcctctctgggaatgtcggaaatgctgccgtctgtggtgatgacgatgccaatggtggaatgctccgcgatgaccttccgggtgccgatctccgccgcctccgtcatggggataggatgatcgtaccacggcgttgtgaccatccggggctgatcatcctccgtctggcccaaggccccccggaccatgtagccaacgcagtcaataagccggacagaaaaggccgcgcccccctccagctggatctgggccgcctcctccggcacgaacttcggttccgccgtcatcaccgtgcggccggagccgctctggggcagctcgtctctggcccgctcccggcggtacacgttgtcgatattgggaatgatctgcgtctccatgaaccgcttgataaaggtggatttgcccgtccgcaccggccctaccacaccgatatagatgtcgcccgcagtgcgggtggcaatattctgatagatcgaggtattcatagcatcccgtcctttttccgcttttatagtccatttctatgagacagcccggaaaagtatgacagcccgtctgcctttgttcattcccaccaaatcacccgccgcactttcggcgcattttgtcgctttcacttctttacattaccaatttatcatggtaaactactaccataataaatcaatcgctcgaacaattcttcaggaggaatggaacatgaaaaagttgactgcatttgtactctctgctatgatggttctgtctctggctgcctgcggcgccaaggccgaaacccccgctgataccagcacccccgccgccgatgcgaccaagcctgctgaagtcgccaagctgacctacgcagtggaagccggttccgccggtgaggaagtggcactggccaacggctacaacgttgtatccgtagactctcaggccaaggcactgatggaagtacaggccggcaccgccgatgccgctatcatcgactccctcatggccggcgccatggtaggtgaaggcaccagctatcccgatctgaccatcaccgatcagaagctcaccgaggagctgtacggcgtcggctgccgcaagggcagcgatttggcctccttcatcaactccgtgatggctgacgcttacgccgacggcgttctggaagcaaccgccgagacctacggcgtacaggccgctctggtggagcagcccgcatccgagttcaccgcttccgaatccgacagcgacgtgcagtacatcaaggacaagggcacgctggtcatcggcatcaccgagtttgagcccatggactatcaggacgctgacggcaactggatcggcttcgacgccgacatggccaagctggtagcggaaaagctgggcgtggagcctgtgtttaccgtgatcaactgggacaacaaggtcttcgagctgaacggcaagggcatcgatgtggtctggaacggcatgaccatcaccaccgccgcccaggaatccatggagtgcaccaacgcctactgcaacaacgctcaggttgttgtggccaagtaattccgcaaatcatacagcaaaggcagagagcggccgctctctgcctttgagcggcatatttcccgcatacgctttccttcctcccccttcgttccccccattatcactacatagaggagaattttttcatgttctggactgttaccctctccatcctgcaaggctgtagtcaggcggtcaagctgtttttcctgacgctgctgttcgcgctgccccttggtctggtagtggctttcggctccatgagcaagtgggcgcccttccgggctttggcctaccggcagcaggaagcgcggggctttgcccgctggctctcccagctccggcccctgtctgccctgaccaacgtcatcgtctgggttatccggggtacgccgctgattctccagctcatcatcattttctacggtcccggcacttggttcggcacaaatccgtggaacgccttccgggacggacgcatgactgcctgttgcatcgcctttatcatcaactacgcctgctatttctccgtgatctaccggggtggcattgagggcgtcccggcaggtcagcgggaagccggtgaggtgctgggcctgaccaagcggcagatcttcttcaagatcacccttttgcagatggtcaagcggatcatcccccccatgtccaatgagatcatcacgctggtgaaggacacctctctggcccggaccatcgccatcattgagatcaccatggccggcgaagcttttatgaagtccaagggcatcacctggccgctgttctataccggcgtgttctatctggcctttgtgggtcttttgacgctcctgttcagcttcatcgagcgcaagctcagctattttaagtaagggagggctttgaaatgtcgatcttaaccgtacagcatctggaaaagcattttgaaaatacgaaggtcctcaatgacatcagcttctctctggaggagggacaggccctttccatcatcggctcctccggcagcggcaaaaccacgctgctgcggtgtctgaattttctggaaacgccggacgccggcaccatcaccgtacaggacaaagtgctgtttgacgccgaccatcacgcaaactgctccgaaaaggagatccggaaaaaccggctccacttcggcatggtgttccagtccttcaacctttttccccagtatacggctttggaaaacgtgaccctcgcccgggaactgatggccaaggacagcggcgagagtaaggaagccatccgtgccgccggaatggagctgctggaccagatgggccttgcggaccgtgccgggcactatccgcatcagctttccggcggtcagcagcagcgggtggccatcgcccgggcactggcgctccacccggatattctctgctttgacgagcccacctctgcgctggacccggagctgaccggcgaggtactgaaggtcatccgtggtctggcggaacagaaaaccaccatgatcatcgtcactcacgagatggccttcgcccgggacgtggcggatcaggtgatcttcatggacggcggcttcatcgtggagcagggcgatcccaagcaggtcatcgaccaccctcaggaggagcgcaccaaacagttcctggcccgcttcgcggaaaacaactgatttgaccaggctccgtgccttgaacagtcccccatttgtcggacgatccggcaaatgggggctgttctctatcaagctgtgtacagaaatcaacagggctgtaccgtcccgtgttccgttcccctaaatcacaagtcttattggaccgggtaactgcatccgagcaaaaacaccgcgcttgcgggaacggacggcaaagctgtatcaggtctgcggttccgctttcgcgccgcacatcaaaaaaaggcttgccatctgcgatacgcagacagcaagcccttttggctgcttaaattgaacagtccgaccagacttagttcttctcgtcctcgtcggccttgggagcctccacagcgggagtctcttccttcttttcggccttcttctccttcttctcagcctcaggctgctcaccggtctggacgcccacctgggacacggcccacttggtcagctccatgcggacacggtcatcgctggtctcaatcacaatggtgttggggttcaccataacgatcttgcccacaatgccgccaatggtggtgatcatatcacccttcttcaggctgtcacgcatgttctgtgcctgcttcttccgcttgttctcaggacggatcatgaagaaatacatcaccgccatgagggcaacaatcataatcatactttccatagttcaaggttctccttcagtgttgaaatcagaatgtatctattatatcaaagctgacactatttgcaagccttttctcaagaaagcagtctgcaatttcatttccgtggtctgaaacaacgaacaccgatgtgcatcaccctcgcggggccagataaatcaggtttcggtccgcgaggaaattcgacacactgtaaagcaccacggtggtatcgatgccctgctccgccatgtagtccgccacggaagtgtggtagtaccgcaggtccaccagatgcacctcggaaaagcgctgggccaaaaagggcgccagcgaatcggaataggagtcccggatcagcagcagcttgctgccgtcggtgatcgccgggttttcaaggacgcacaatggctgattgccgccgaggaaggagctgtatttatccttgtgctccagatagctccggtcatacagccgccccgccgcctccttgccggacttccaggacgtgacccgcagatcgtcctcggacacccaatactctatggtatccggggcaagccaatggataccggaggtggaatacagggttccgttgaagtccatgctggcaacttccggtgtaaagtcagtttcctttaatggctccttccccaaggcggtcaacagtgcattggctccgtagaacgccccacaggtggtccagtggtggtcggtccggtaatagatgggttcccccgcgtgttccgtcaaggctcccagcagatccaccgtgggcaggcccgttttctccgccgcgttttggataaacgcagcctgatcgaagctgggcgcgccctgcggcagcctgtccttccagacctctgccgccgaggggatcaaccccaaaagcacctggccgtgagccgcttctccaaaccgcttcacatcgtccaaattcttttccatctgaagcctgtccggttcatccaccttggcgataagggtatcgccgcagaggtagacgccgttgaattcccgcttgcccaacatctgctcgcaccgggccttcaggccagtccagtcgtcccgcagagggaactggtcggcaaaatagtcctccatccccgcggtaaagctgccgtttttcagggtttcccaggaaaagtccgggaactgggccagcgtccggttttccgtttcggagcgtgctcggtccggcagcgcaatgtgccacgccagcaatcctgccagaaacaggcagaagatccccgtggtcagtcgtcccttgttcgccatgcggttccctcccttcttgggcaaaataaagaatcagaatcggaaatacaaaaatgggttgtagctgccgtctaccaagtaggccgtgcagatcaccagacccgccgccatcagcagcggccccagcaggtctctcgcccgctccggcagacggttccagaccttccggggcaggcgggtggagccaaccgttaaaagcagcagcgtcaggccataggccgtcaggtagtagccgtcagcggcactccacagcgttccgctgccgaagcaggttttgaaatacccggcgcagacggtgaggttctccatggcgaacacgccccagcccacgaacaccaccacaagggtgtagaaatgccgcagccacgatggcagcttttggaggaagtcccgcagcagatacttttccagcatgagccacacaaagaagtgcagaccccataggatgaaattccagcttgccccgtgccagaagccggtgcagaaccagacaaggaagatattccgcaccgtccgccatgtccccttccggctgccgcccaaggggatgtacagatactcccggaaccatgtggtgagggaaatgtgccaccgccgccagaactccgtcacggaggcagcggtataggggtagttgaagttttccgggaagtgaaagcccagcatctgccccatgccgatggccatgtcggaatagccggagaagtcgaagtagatctgaaagccgaaggccgcgatgcccagccagccgccgacggccgtcagtgtcccggcggactgcgccgccagctccgcgtcccacagtgcaccgatgctgttggccagcagcacttttttcccaaggccaacggtgaaccgacgtgccccggcggcgaacgccgatgccgtgttcgtccggtggaccaactccgccgcaacatccttatagcgaacgataggccccgccaccagctgcgggaacatggccacataggcgccgaaggacaccatgttccgctgggcgggagcgtcctgccggtagacatcaacggtatagctcatggtctgaaaggtgaaaaaggaaatgccgatgggcaggggcaatcccagggtgggaatggaaacgccggggatcagagagaggttggcggcgaagaaatcccaatatttgaaaaagcccagcaggcctaaattcagcagcacgctctccgccacgaaccactgggccagcttgtcccggctgcggtacttctccaccagaagaccgtgggtatagtcgatgaggatggacagcaccatgatgctgatatagaccggctccccccagccgtagaacaccaggctggtcagcagcagggccagattccgccaccggaggggaacggcaaagtagatcgccagcgtgatgggcaaaaagccgaataaaaagggtaagctgctgaagcgcatgggctgttcacctcctttttctgtaaagtatttctacttgaaggccgttgaaatacaacgttttctagtttctacatagcaaaccagccgtggtgtcacggctggttgttccgcgtcagactgttacgcgccgaactgtgcgttccaggcgtcctcgatctccgtctggtgttcgccggaggcgatcattgccacataggcgccgttttgcagcaccttggcagccttccactggtcaatggtctcaggatagaaggcatccccgtccgcctgactgtcgatccgggtctggaggatcttcgccgcctgcgcggcgtcctgctcactgtcggcttgcaggaacacatactcgcttacggcgtaggacatcaccggggccttggccagaagctgcttggcggggatgtcccccagacccggatagtacatctccagcatttcaccgtccagatccatcatatcgtcgccccagccgtattgctccgccagagcattataaaatccggtcagatccacgtcattggcagtttctgttttgctgccgcaggcggtcagcaggccgcacagggtcagggccacagccgccagcgcaaacaatttcttcatagtgcctccttataaacgtccctcaagggcgttcatcttctttctattgtgttctctgcttgctaatatacacgatttgcgttataatagtcaagaaacaagcggtaacaatccgattacagaaaagaggtttttttcatgtacagcttccgcaacgattacagcgaaggcgcacatccccaggttcttcaggctctgacggacaccaatctggtccagacctgcggctacggcgtggaccccatctgcgaggaggcccgtgacctgatccggacggtctgcgccgctcccgaggcagacgttcacttcctggtcggcggcacccagaccaacctgacggtcatcacggcgctgctggcctcctatgaggctgtgatcgccgcccacaccggccacgtcaactgccatgagaccggtgccatcgaagccaccggccacaaggtctgcgtggagacctccccggacggcaaggtgactcccgctatggtggaggccgttctggcccgtcatgacggctcggagcacatggtctcccctaagatggtctacatttccgataccactgagatcggcaccgtctacaccaaggcggagctgaccgctctgcggcactgctgcgatgagcacggcctgctgctgttcctggacggcgcccgtcttggctccgccctcacctccccggaaagcgatctgacactggcggatctggcggcgctgacggatgtgttcaccatcggcggcaccaagaacggcgcgctgtttggcgaggccgtggtgctgacggtcccctgcccccacttccgctggcacatcaagcagcggggcggtatgctggccaagggccggctgctgggcgtacagttccaggcgctgctgaaggacgatctctacttcgacatcggccgtcacgccaatgacatggctttccgtctgcgggacggcttcaaggcgctgggctatgagttcccggtcccctccccctccaaccagcagttcccggtcatgaagatccagaccgccgagaagctggccgccatgggctttgagttccaggtggagcgggtcatcgacgaggagcacattatgtaccgcttcgtcacaagctgggccactcccgaaagcgctattgacgatctgctgaacgctctggctcagtgccagtaatcgcgatttccggcaaaacagctcataaatcccctgctcttttgaaaaaagggcaggggattcttctttttttgacaagttcttcttgacacgaacaagtgttcgatgtatgataagagtagataaaacatttgttcgattggaggaacgtgttatgatcggttggagctttttctttatgctggtaggcgtatccactttggcttcccaggtattccgggtagtggactatattgaacagcccgcccgtcatacccgccgccacgctgcggcacggtgaagatggacgttcttgccaagctggagatcctgacggacgcagccaagtatgacgccgcctgtacctccagcggcgtccgccgcgggttccggcagggctatatcggcaacaccacctcggccatcgccggctgctgccataccttctccgctgatgggcggtgcgtcacgctcctgaaggtgctgatgagcaactgctgtgtctatgactgcgcctattgcgtcaaccggcggagcaacgatacccggcgggcggcgtttacgccgcaggagctggcggacctgaccatcaacttctaccggcggaattatattgaggggctgttcctctcctccggggtactgcggaatccggactacaccatggagcagatgatccgggccatccgcatccttcgggaagaataccgcttcaacggctatatccacgccaaggccatccccggcgctgccccggaactggtggagcagctgggccttttggccgaccgactgagctgcaatatcgaactgccctcagaggcaggactgcggactctggccccggaaaagacgaaggccgctgtactggctcctatgcggcagatccaagtcagaagtattcaaaataaagaagaactggtcaagtaccgccacacacccaagttcgccccggcgggccagagcacccagatgatcgtgggtgccacgccggacagcgacctccacattctgcggctgacgcaggggctttatgaccggtatcagctgaaacgggtatttttctccgcctatgtgccggtggtggaaagtgcccttctcccctccaaggagaccaagccgcccctgctgcgggagcatcggctctatcaggcggactggctgctgcggttttacgggttccgtgcggaggagctgctggacgagcaggccccttcctttgacccccgtctggaccccaaatgctgctgggccttgcggcatcctgaatttttccccgtagaggtgaaccgggcggattacgaagcgctgctgcgcgtccccggtctgggggtagtatccgcccgccgcatcctgactgcccggcggactggccccctgcggctggaaaatctgccgaaattaggtgtggtcatgaagcgggcgcagtatttcctcaccgccaatggccgcatggccgacggtctgcgcttcacgcaagacagccttctgcgaaacctcatcgccgtggagcagtccctgctgccccagccggagatgcgacagctttctctgttcgacgatgccgtttaagtccgaaggtgccctatgaacgaaatgatctacacctatgacggcagcttcgagggctttctctgctgcatttttgacagctacgccaacaaagaagtcctcaccgccattaccgacgatgaggactctgcgcctattctgtttcccgtccgggcaatccgcaccgacagcggccacgccggacgggtcctgcgaaaattgcacaagctctccccctacggagaggagctggtacgtcgggggtttctcacctgcatggaggaacgcgagatccgcctgtaccggctggtggtaaagctgctgcgggaaggtcccagttttctgcggaacttttccgacgagacgcttcatccggtagcgacagccgtccggcatctcaacggcgaagcccatcttttaaaaggctttctccgcttctccgatctgggcggcattctgggaagcgagatcgaaccgaaaaatagggtcctccccattctgcggagccacttctgcgcccgctatcaaaacgagaaatttttcatttatgaccgtgtccaccacgaggcgctgttttacgccgccggcaaggccgtcattcgcccgttagcggactttcagatggcgccgccgaatgaaacggaggccgcctaccggctgctttggaagcggttttacgataccgtggctattcgggagcgggaaaatccaaaactacgaatgacccacatgccaaagcgttattggtccaccatgacggaatttcaggatgatccctatttcactccgcaaagctctgccgcagccgttccagtccccggcgttccagccgggaaacctgcacctgggacacccccagcacccgggcggcccgctcctgcgtcagccccttgaaatagcggagcagaatcgtcatgcgctccttttccggcagttgatccaccgcctcccgcagggcgatgcgctccacaagtccctcctccggagcctctgtgcccagcagcccctccagcgcaaggccgtccgctgtttcccgctgcaaggaatccggtgcctctgtggccagatccacttgggcgatctcctccggtgtccatccggtctgggccgacagttcggagagggacggctcccgccccaactcctgccgcagccgctcccgcagggcatacagagtcagtgcctgctcccggatgctccgtcccaccttgatggtgccgtcatcccggagaaaccgccggatctccccggcgatcttgggaacggcataggtggaaaagcaggtgccgtaggaaaaatcaaacccccggatcgctttcagaaacccaagacatcccagctggtacagatcgtccggctccactccccggccgtaataccggcggaccacactccagatcaggccgttgttttccagcactgcctgctcacatgcgtcccggtccccctcctgagccgcccgcagcaactccatggcgccattcatcgcttgatccggggggcgatcttctttttcatcaccacggtggtaccccggccagccacggaccgcacctttaaactatccataaagctctccatgatggtgaagcccatgccgctgcgttcctctcctccggtggtgaacatgggctgccgggccttttccacatccgggatgccccggccgtagtcccgcaccgtgatctccagcacttgtccggtacagatccggaccttcaccgtcaccttgccgatccggtccgggtacgcatggacgatggcgttggtggccgcctcagaaacggcggtcttgatgtcctccagctcgttgagagtggggtccatctgtgccgcgaagcaggccaccgcggagcggataaacccctcgttgctgctctggctgggaaactgcaaagtgacttcattttccgtctttattttcattatgtaaacctcccgttattgaatggaaaccagccgcccgatgccggcagcgtccagaacacggcgggcctgctccggcacgttccggagcacaacgctgccctccatcagctgcatccgctgctgagaccgaaggatcagggcgatcccggagctgtccataaaggtcacgcccgcaaagtctaagatcagacttcggggaagggccgcatcaatggcgatctccacttccttcaaggcatttctggccccgtgatggtccatttctccgctgaattccagcaacagctcccggtctgtgtcccgcgctcgtatatccatactattccctcttttgtcgaattttatccccatttgtcaaatcagctcagaaggtactctgctccgatcagatctgttggggaatggcttgtcttacggtgatggtagcatattcgccggacaggtttctgtcgaagccgggtgcgactgtcatattttttatgtaaatctctgccggttatctctcacctgccgtatcacggtcaaaatcgacggaaaacgttcccttaatgcgcccatggccctgccttcgggcccataatagcgcacttgaaatttgcagcaaaaaaagcggcccatgcgtaaaacgcataggccgctcttttcgtgcagtcaaagcagattagatccagttttcaaaaacggtttttccgttagtacaccgcttcgccggtataaaccagcttggcgtcgccggtgagggtgatcttctcgtcggtgtagttcaccaccagatcaccgccggcagcccggacggtcacatcccgtcccttttcgcacataccgttggccacggccgccaccacagcggcgcaggcaccggtgccgctggccatgatctcgccgctgccccgctcccagacccgcattttgatggtgctgggattcaccacgcgaataaactctgcgttgatccgctccgggaaatagggagcctgctcaaaccggggaccgaggaactccacatccacatcgtcgatccgggggcagaaggccacgcaatggggctctcccacgtctacgcaggtgatgttgaaggactgtccgccgatatacaccgggtaatccaccaccgtcttttccgcgatggcaaaccggaaggccgccgcatccagagaggcacggcccatatccacacaggcggaagtcacaagaccgttggcggtgtagaggtgtacctcccggacgccggcaccggtctcgatccgcatatcttcctttttcaccagaccgttgtcatacaggtacttgcccatgcagcgcagggcgttgcccgccgtggcgctctcgctgccgtcggcgttgaacagccggatcttcgcatcggcaatgtcggaatgctccatcaggacgatcccgtcggcgccgatgccgtagtgccggtcacagaaggtgacgcacagggactccgggcaggtgatctcgccgtggaagttttccaggaagatgtaatcgtttccgcaggtctgcaacttggagaatttcagcttctgacgctcgctgcggaggtggcagatgtcgatgagctccgtgttccgctggttgtagcggctggccagaatatccgtcagcgcattggcggtatccaaagaggtcaggcacgggatccccagctggacgcagcggtggttcagatggatgaagtcccggatatagatgggctccgtggagccggtgaggatcacatagtcgatccggccgttttcaaggagctggaacacccggttgtccttccccagcttgcccacgatttccacatcggtacccagacgggagatctctctggcggtgccgtcggtggcgtagagcttgtagcccatttcgtccagcttccgggcgatgttgacgatctccggctgatcccggtggttcacggagatcagcacgccgccgcgggtctccttctccaccttgtatccggcagagacaaggcccttgaacatggcctcctgcatatttttgccaaggcccagcacctcgccggtggatttcatctccggggagagggcagcgttggcatcggtgattttctcaaaggagaacacaggcaccttcacggccacataggggggctggcggtacagaccggtgccatagcccagagaggccagaggctgacccaccataacgcgggtagccagatccaccatgggtacgccggtgaccttggaaatgtagggcaccgtgcggctggcgcggggattcacctcaatgacgtacagctcgttctggtagatcagatactgaatattgatgaggccatgggttcccagagacagggccagcttttccgagcagtccacaatgaccttcagcatcttatctccgatggagaagggcggatagacagcgatggagtcgccggagtggacaccggtgcgctcgatgtgctgcatgatgccggggatcaggacgtccttgccgtcggaaatgacatccacttccagttccttgcccatgaggtactggtccaccagcaccgggttttcgatcttgccggagagaatgacctccatataggtccgcacgtcctcgtcattgtgagcgatgaccatgttctggccgccgatgacgtaggaggggcgcagcagcacgggatagcccagctcatgagcggcgtccagcgcctcctgcataccggtgatggcccggccctgaggccgcttgatagagaaccgctccagcagggcatcgaaccgctcccggtcctctgccatgtcgatggactcagcgctggtacccaaaatggggataccgtggctgtccaggaacttggtgagcttgatggccgtctggccgccgaaagctaccaccacgcccacgggcttctccacctcgatgatgtgcatgacatcctcggggaacagaggttcaaagtaaaggcgatcggcggtatcatagtccgtggagacggtctcggggttgttgttgacgatgactacctcgtagcccagctccttcagcgtccagacgcagtggacggaggagtagtcaaactcaatgccctggccgatgcggatggggccggagccaagcaccataatgaccggcttgccgctgcgggggaaggtccgggattcgcagaacttatcaaaagaggaatagaaatagggagtctcggcatcgaactccgcgccgcaggtgtccaccatcttgtagacggcgtctttcttttcacagggcagcgcggcagcgccggagagtcgcttgagggtatcgtcgggatagcccatcttcttaccggtctcataatgctcaacagtgaggccgtccttttccagagccttttcaaattccgccattttcttcagctttgcaaggaaccagcggtcgatccgggtgatgctgaagatctcgtcgatggacgtaccgcccttcagggcctcaaagatggtgaacagccgatggtcatccacccggcggagccgctcccagatgggggcgcgatcctcgggatcgtttttacgattcaggctgtccagacccacttccgcgccgcggacggccttcatcagcgccatctcaaagctgggagcgatggccatgacctcaccggtagccttcatctgggtgcccagcttgcggctggcgtcggcaaacttgtcgaagggccacttgggcatcttcaccacgatgtagtcgatggtcggctcaaagcaggcgcaggtcttgccggtgatgtcatttttgatctcgtccagggtgtagcccagggcgatcttggtggtgatcttggcaatgggatagccggtggccttggaggccagggcggaggaacgggacacacgggggttcacctcaatgaccgcatattcaaagctgtccgggttcagcgccagctgcacattgcagccgcccacgataccaagatgggtgatgatgtccagagatgccttgcggagcatctggaattccttgtccgccaaggtctgggtgggggccaccacgatggaatcgccggtgtggacgccaacggggtcaaagttctccatggagcagacggcgatcacgttgcccacgccgtcccgcatggtctcaaactcgatctccttccagccgaagatggcccgctccaccagaatctgggtaataggagaggcatccagaccggtttgggcgatgatccgcagctccgcttcgttggcagcggcgccgccgccggcaccgcccaaagtaaaggcgggacggacgatgacgggataaccgatccgctcggccacctctaaggcaccctctaccgtttcggcaatatcggaggcgatgaccggctgaccgatctccgccatggcttccttgaacaactcccggtcctcggcccgggaaatggccttggcatcggtgcccagcaggcggacgccctgttcctccagaaagccctccttatccaactgcatggccaaagtcaggccggtctggccgcccagacccgccagaaggctgtcgggcttttccttcttgatgatgcgcttgatggtctccgtggtcagaggctccagatagatctcgtccgccatggcctgatcggtcatgatggtagcggggttggagttacacagcaccacattgacgcccgcttccttcaaaatgcggcaggcctgagcgccggcgtagtcaaactcagcagcctgaccgatgacaatggggccggagccaatgaccagaacttttttgatacttgtatccaaaggcattagactctgcctcctttcatcaactctacaaaccggtcaaagaggaaagtcgtatccttggggccagtacaagcctcaggatggaactggacggtaaacgccttcagttccggatagtcgatgccctcgcaggtgccgtcattggcattgacaaaacgaaccttacccagtttcaccgtgtcgccgtccaccgcgtagccgtggttctggctggtgatgtaagtacggacgccgttcagatcccggaccggctggttcacgccccggtgaccgtatttcagcttataggtgctgccgccggcggccagagccgtcagctggtggcccagacagatgccaaacatgggtaccttgcccagaagcttgcggatctgctcgatttgatacgtgttttccgcaggatcgccggggccgttggacagcattacgccgtcgggaccggcggccaggatctcctccgcggaggtggacgcaggcaggaccgtcacggtgcagccccgcttctggagctcccggacaatgttgcgcttggcgccgtaatccagcagggacacccggaagcactcctccccttccgccggatagcggtcgggctccttgcaggaaacagcctccaccacaccggtgatggcataggacgcaaccggggtcaggtcagcggggatctcgtcgcagatggcggcattcatcacgccgtgctcccggatgatgcgggtcagttcccgggtatctacgccgcacaggcccggcacgccctgctctttcaagtatgtatccagatcgcagtccgtccggaaattggagggtgtgtcgcagtattcccgaaccacatagcccttcacgcagcaggctccttcaaaatcctcccggatgatgccgtagttgccgatcagaggataggtctgcataacgatctgtccggcatagctggggtccgtcagggtctcgacgtagccgcacataccggtggtgaacaccagctcacccacggtgtcggtctccgcaccgaaccggacgccctcaaatacctgaccgtcctgtaagatcaaataaccttttttcatcataatctcctcaggccgtcttatttgccggcctcagtctcgcagtagatgcagcggtaaacacgcttggccggatcggtcagcaggaattcctgaggcagctcctgctccacagaggtgatgcagcgggggttcttgcacttcagcacgccccggatccgctccggcagcttgaggctccgcttctcccggagctggccctcgtgaatgatattcacggtgatggtggggtccacatagccgatcagatcccaatcaaggtccatctcacggtcgatcttaatgatgtccttccgtcccagcttgccgctggtgacgttcttcaaaatagcgacggtgcaatccagcttgtccaggcccaggatgttgtacagctccatggccttaccggcggtgatgtggtcaatcacgatgccgttctgaatagaatcaataatcatgtccgttctctcctctcactgaatacccagcagcttcatgatcagcgccatgcggatgtagcggccgttctgggcctgcttgaagtagcaggcgcgggggtcattgtccaccgccacggagatctcattgacgcggggcagcggatgcaggatccgcagatcctccttggcgttttccagcttctccggggtgaggatgtagctgtccttcaagcggaggtaatcctcctcgttgaagaagcgctccttctggacgcgggtcatgtacagaatgtccagatccggcatgacctcctccagagaggtggactgggtatagggaatgttcttggacttgacgtactgctccttgacgtagcggggcagcttcagctcctccggggagacaaacacgaaccggacgccggtgtagcggctcatggcagccaccagagaatggaccgtccggccaaacttcaggtcaccgcagaagccgatggtcaggttgtcgaaatgacccttttccttgtggatggtgatgaggtccgtcagggtctgggtggggtggttgtggccgccgtcaccggcgttgatcaccggcaccaaggagtgctgcgttgccaccagaggcgcgccctccttggggtggcgcatggcgatgatgtcgcagtaggcgctgaccacccggatggtgtccgccacgctctcgcccttggaggcggaggagctggcggcggaggaaaagcccagcacctgtccgccaagggacagcatggcgctctcaaagctcaggcgggtgcgggtggaaggctcaaagaacagcgttgccaggatcttgccgtcgcacttatgggcatattcggcgggatgctccataatatcgcagcccgtttttaccagctcgtcgatctcctcggtggagagctgcataatgtcgatcaaattttccatatcagttttcccctccattgatccagctttcatcagacggattgtcccggaatttcagcagacgggacacatcctccggcgcgatgtaaccttcctccgcgcccacctgggcgatggtgtccaggttcgtcaagctcacgttcttcacgccggcctccgccatgcgctccacgcccttcttcatgccgtaggtgaagatgctcaccacgcccagcacctcagcgcctgcttcccgcagggcctccacggtctccagcacgctgccgccggtggagatcagatcctccacgaccacgaccttctcgcccttgtccagacggccttcgatgcggttctgacggccgtggtccttattgccggaacggacatagcccatgggcaggcccagcaggtgggcggcaatggcggcgtgggcaatgccggcggtggcggtgcccatcaggacctccgcctccgggtactcacgcttcacggtatcggcaatggcctgctccacctcgttccgggcttccggagcggtgaggatcagtcggttatcgcagtagatggggctcttgatgccgctggcccaggtaaagggctcctgagggcggagaaagaccgccttgatctccagcagacgcttggcaacgcgcacattgatgctgtccatagtttgttctcctttatatcaatttttctgttgatccaatcgtttccgtttcgcggctcagcccacgaactccgccacgcagcggcgataggcggccacggggtcctccgcctgggtgatgggacggcccaccacgatgtagtcggagcccagctccttggccttggccggcgtggtgacccgcttctggtcgcccacatctccgtcagcaaagcggacaccgggggtcacggtgaggaagttcttgccgcagcgctcgtggaccgcgcctgcctccaggggagagcacaccacgccgtccagtcccacgatggaggcgatctccgcatagtgcatcaccacttcggcaatgggcttttcgatccacagctctttttccagcatgtcctgatccgtggaggtcagctgggtcacagcgatcagcagcgggcgggtaccatccggacgggtcaggcccgccagagcggcggacatcatggcgccggtgccggcggcatggacgttcaccaggtccacatccagcgcggacagagcggccatagcctttttcacggtgttggggatatcatgcagcttcagatccaggaagatcttgtggccccgggcccggatctcccggacgatggaggggccttcggcgtagaacagttccatgccgatcttcacaaagggcttttcctctgtgaagcggtccagaaatgccagtgtcttttccttgctgtcaaagtccagcgcaacgataacgtctttacccatgatgtgctcctcctatgatctctgtcagattttccatgccgtaccgttccatcacagcaggcagattttcgataatggtcttgcaggcatacggctccacaaggttcgccgcgcccacgccgatggcggtggcgcccgccagcatcagctcgatgacgtcctccgccgtggtgacgccgcccatgcccacgatggggatggacactgcctcgtagacctgatacaccatccgcactgccagcgggaacatccccggaccggacataccgccggtggtattggccagcagcgggcggcggcgtttcagatcgatccgcatacccggcagggtgttgatgaggctcacgccgtcggcgcccgcatcctcgcaggccttggcaacggcggcgatgttggccgccgtgggggacagcttcaaaatgatgggctttttcgtcaccgcccggacggccttcgtcacctcggctgcggacttgggatccgcgccgaaggccgcgccgccgccgtggacgttggggcaggagatattgacctccagccagcccacctgctcctgggcgtccagcttctcgcagacctcggcgtattccgccacggaaaagccgctgatattcgccatcaccggcttgtgaaatacctgcttgagcttcggcagctccgtttcgattaccgcgtccacgccggggttttgcaggcccacagcattcagcagtccgcctgcgtactccgcgatacggggggtagggttgccgaagcggggttcccgggtggttcccttaaaggaaaaggtacctaacatattgatatcgtacaattccgcgaactcatagccatagccgaaggtgccgctggcggggataatggggttgtccatctcaataccgcagagggtcacttttgtattcaccatacgatctcctccttttccagcacggggccgtccttgcagatccgcttattgccgtatttcgttttgcaggagcagcccatgcaggcgccgaagccgcagcccatccgctcctcaaagctgaactggccggaggtcttgcaggcgctgtataccgccttcagcatcggctccgggccgcaggtatagagataggtgtagtcggacacggcggccatgccgtcggtcacaaggccgtggatgcctgtgctgccgtcggcggtggcgatgatgacctccgcccccagcgcccggaactcctctgccaggaagatctcggattcccggttgaaacccagcaccgcggtgacgcgcttaccctgtgcggtcagccgcttggcgaggccatacagcggcgggatgcccacgccgccgcccaccagcagggggtgttccccgctgcgggacacatcgtaaccgttgccaaggcccgtcagcacatccagttccgtgccgggagccatgcccgtcatggcctcggtgccgtggcccaagactttataaataagcgtcaattctccatcggaccagtcgcacacggagatgggacggcggaggaaaaagccggagagtttcaggttcacgaactggccgggggcggtgatggcagaggtgtcccccaccagccgcagacggtaaattccatcggccagtcctgtgttttcagtcactgtcaaggttgtttgcttcacgatcattctcctttcagcagacggtctgcatcataccagacagccgtttcgcctgctgctgtcagcaggcagcggccttggacctcccatcctgtaaagggtgttgccttgcccatggagaggaagtctgccgggtcgatccgataggtgtcattcaggtcgaacacggtaaaaccggtatccgtcgggatgttgaagcggcggcagggggcatcgtggagcagctccatcagccgctccatagagatgacgccgggcttcacaagttcagtatacaacaacgggaacgccgtttccagtcctacaatgcccattgcgcttttttccagtccgcggcctttttcctcggcactgtgaggggcatggtccgtggcgatcatgtcgatggtgccgtccgccaggccttccaacagagcctcccggtcggccttgtcccggaggggcggattcattttgaaacagccatcctcctgcaagcaggaatcgtccagcagcaggtagtgggggccagtctcacaggtgacgtccaggccctcggctttggccttgcggatcaggtccacgctctccttggtggagatgtggcagacatgatagccacagcccgtctcccgcaccagctccagatcccgctgaatgggccgccactcgctctcggagcagatgccccggtggccatgggccttggcataggcaccgtcatggatatagccgccccgcaggagggaattgtcctcgcagtgggccacgatcagcttgcccaggcgcttggcctccatcatggcgcggcgcatcatgtcgcggtcctgaacgccctttccgtcatcggagaaggccaccacatagggggccatggcgtccaagtccgccagttccccgccctgctcgcctttcgtgatcgccccatagggcaggacccggatcacggcgtccttctgtatggcgtccagctccagctgcaaggtctccatgctgtccggcaccggattcaggttcggcatggcgcatacggtggtatagccgccgtgggccgccgctaaagagccggtacggatggtctccttataagaaaagcccggctcccgaagatgcacatgcacatcaacgaaaccgggtaaaatcacgaaagaagaagcatccatagtggaaatagtaccgcctcgggaaacaccattgcccaaagaaatggaaacactgctccgggagaaaacgccgctgcggaatacctgcgcattgttcagtaccaacgtcacgatcatcgctccttttctaaaaatctctaaactttcgataggataccatgggtttccctacctgtcaagggtcttttttcacaagaggccctccgatttcaccgatgcgtttctacgccccggcaaactgacggaaattatcaatttttccctctgtctttaggcgggcacacagaaaaaaacatccacccgccgggcgggtggatgccagcgtgtc

SEQ ID NO: 12144 - DNA, 22936 bp, Unknown
  gut microbiota DNA sequence
cccaacctgctggagatccagaagacctcctatcgggaatttttggacaccggtctgcgggaggttttcgcagacgttggggcgatctctgactatcagggcaatctggagttgaccttcatcgacttccggatggatgaagcccccaagtataacgtggaagagtgcaaggcccgtgacgccacgtatgccgcccccctgaaggtgacggtccgtctgcggaacaaggagacggaggagatcaaggagcaggagatcttcatgggcgatttccccctgatgacccactccggcaccttcgtcatcaacggcgcggagcgcgtggtggtctctcagatcgtccgttctcccggcgtgtattacggcaaggagatcgacattaagaccgacctgcccatcctcacctccacggtgatcccctatcggggtgcctggctggaatatgagacggacgccaacgaggtgttctgggtccgtatcgacaagaaccgcaagctgcccatcaccagcctgatccgggcgctgggcctcaagaccgacgcggagatcctggaccgcttcagcgacgatccccgcatcgcggctactctggagaaggaccccagcaagacgtatgaggacgccatgctggagatctaccgcaagctccgtcccggcgagccccccacggtggaagctgccgagaccctgatgaacaacctgttcttcgatccccggcgctacgatctgtccgttgtgggccggtacaagttcaataagaagctgtccctctggcagcgggtcaccggctacaagctggcacagcctgtggcagaccccgctaccggcgagctgctcttcgatgagggccacctgctgagcaaggaggatgcccgcctgctggacaccgtcggcgttgccgaggtggtcattctggtggacgatcagcctctgcgggtgcagtccaacaagatgtgcgacctgagccactatgtggacttcgatcctctggctgagtgcggcatcaaggagcgtgtccgcttcgacgtgctgcaggagctgctgggccagtactccggcgaggagctgaaggagcagatcaagctccataaggacgatctggtgcccaagcacatcatcatcgacgatatcctctgctccatcaactacatgaacggtctggcccacggcatctccgtgaaggacgatatcgaccatctgggcaaccgccgtctgcgctgcgtgggcgagctgctgcagaatcagttccgcatcggcttctcccgtatggagcgtgtgatccgggagcgtatgaccattcaggatctggacgtggtcaccccccagagcctcatcaatatccggcctgttaccgccgccatcaaggagttcttcggctccagccccctgagccagttcatggatcagaccaaccctctggcggaactgacccacaagcgccgtctgtccgctctgggccccggcggtctgagccgcgagcgcgccaacatggaggtccgagacgtgcattacagccactatggccgtatgtgccccattgagacccctgaaggccccaacatcggcctgatctcctacctggctacctatgcccgtatcaacgagtacggcttcatcgaggcgccctaccgcgctgtggacaaggagaccggcaaggtggctatggaagccacttatatgaccgccgacgaggaggacaacttcatcgtcgcccaggcaaccgagcccatcggtgaggatggctgcctggtgaatacccgtgtcaccgcccggtaccgggacgagatcgtggaagtggagcgggagcgcatcgactacgtggacgtgtctccccgtatgatggtctccatcgctaccgccatgatccccttcctgcccaacgatgacgcaaaccgtgctctgatgggcgcaaacatgcagcgtcaggccgtgcctctgctgaagcctcacgcacccatcgtgggcaccggtatggagcacaagatctgcatcgactctgagatcgtggtcctggccgagggcgacggcgtggtcacctctgtggatgcccgccatgtcaccgtcaagtatgacagcggcgagaccaaggattataagctgaccaagttcctgcgctccaaccacaccacctgcatcaaccagcatcccatcgtggatgtgggcgagcgggtccacggcaagcgcctgaacgaaaagggcgagtgggaggatcccacggtcctggcggacggtcccgccaccgatcagggcgagatcgctctgggccagaacattctggtcggtttcatgacctgggaaggctacaactacgaggacgccgttctgctgaacgagcgcctggtccgcgaggatctgtatacctccattcatattgaggaatttgagatcgactcccgggataccaagctgggacccgaggagatcacccgtgatattcccaacgtgggcgaggatgcgctgaaggatctggacgagcgcggtatcgttcgcgtgggcgccgaggtcaaatccggcgacattctggtgggcaaggtcacgcccaagggcgagaccgacctcaccgctgaggagcgcctgctgcgggctatcttcggtgagaaggcccgcgaggtccgcgacacctctttgaaggtgccccacggcgagagcggcatcgtgctggataccaaagtctttacccgtgaaaacggcgatgagcttggccccggcgtcaatcaggtggtccgcgtgtatatcgctcagcgccgtaagatccaggtgggcgataaaatggcaggccgtcacggcaacaagggcgttgtgtcccgcgtgctgcctaccgaggatatgcccttcctgcccgacggtaccccgctggacatcgtgctgaaccccctgggcgtgccttcccgtatgaatatcggtcaggtgctggaggtccacttgggctatgccgcccatgcgctgggctgcaaggtcgctacgcctattttcgacggcgctacctacgaggatattcaggcagagctggtgaaggccggcctggaccccgagggcaagagcgttctgtacgatggccgtaccggcgagcccttcgataacaaggtcaccgttggctatgtgtacttcctgaagctgcaccatctggttgacgataagatccatgcccgttccaccggcccctattctctggttacccagcagcccttgggcggcaaggcccagttcggcggccagcgcttcggcgagatggaagtttgggctctggaggcttacggtgctgcttataccctgcaggagatcctgaccgtgaagtccgacgatgtcaccggccgtgtccggacctacgaatccatcgtcaagggccacaacgttcccacccccggcgtgccggagtccttccgcgtgctgctgaaggagctgcagtccctgtgcctgaacatccaggtgctggataaggacggcaacgtggtggatctcaaggaggacgaggacgccctcgataccttcaacctctcccgtatggacgcggacgatgaccgccaccgcaacgttgcggaggacgccgagtttgaagcgtccggctttgaatttgaagacgcgccggaggatgccggcgccgatgtggatgttgacttcgacgacgaatgatccagaagacacattcgtcaccacaaaactggatcatttgaatcattgaaggaggataacgcaacatgatcgaaaccaataacggcaacaagtttgcctttgacgcgattaagatcggcatggcttccccggagcagatccgggagtggtcttacggcgaggtgaagaagcctgagaccatcaactaccgcactctgaagcccgaaaaggatggcctgtactgcgagcgtatcttcgggcctaccaaggattgggagtgccactgcggcaagtacaagaagatccgctacaagggtaagatctgcgaccgctgcggcgtcgaggtcacccgttccaaggtgcgccgggagcgtatgggccacatcgagctggccacccccgtttcccacatctggtatttcaagggtatcccctcccggatgggcctgctgctggacatcagcccccggatcttggagaaggtgctgtatttcgccaactatatcgtcacggaccccggcgagactcctctgaccaagaaccagatcctctccgagaaggagtaccgtgactaccgtgaaaagtatgaggatgacttccaggccggcatgggcgccgaggccgtgaaaaagctgctggcggatgtggacctggaggccctctccgcccagctccacgccgagctgaaggacgcttccggccagaagaaggcccggatcgtcaagcggctggaagtggtggacgccttccggatctccggcaacaagccggagtggatgatcatggacgttctgcccattctgcctcccgacctgcgccccatggtgcagctggacggcggccgcttcgccacctctgacctgaatgacctgtaccgtcgggtcatcaaccgcaacaaccgcctgaagcgcctgatggacctgaacgcccccgacatcatcgtccgcaacgagaagcggatgctgcaggaggctgtggacgccctgatcgacaacggccgacgcggccgtgccgtcaccggcgccaacaaccgtgctctgaagtccctcagtgacttcctgaagggcaagcagggccgtttccgtcagaacctgctgggtaagcgtgtcgactactctggccgttccgttatcgtggtcggccccgagctgaagatctatcagtgcggtgtgcccaaggagatggctgtggagctgttccgccccttcatcatgaagaagctggtggaggacggcaccgccaataacatcaagtccgccaagaagatggtggataagggcactaccgaggtgtgggacgctctggatgtcatcatcaaggaccaccccgttatgctgaaccgcgcaccgaccctgcaccgtctgggcatccaggccttcgagccggtgctggtggacggccgcgctctgaagctgcaccccctgaactgcaccgcgttcaacgccgacttcgacggcgaccagatggctattcatgtgcctctgtccgccgaggctcaggcggaggcccgtatcctgatgctctctgccaacaatctgctgcgtcctcaggacggcggccccgtcaccgttccgacgcaggatatggtgctgggctcctactacctgaccatggaccgcatgggcaaggacgagatcggcgcccagaccgtctggtgtgaggatgccggtgacacgaacctgaccgcacagagcattgtggacgcggacgagttcctggcagccaacgccgctttggagaagggccagaagcccgctaccttcaagcctgttcacatgtacgccagcgaggacgaagccctcatggcctacaatgaccgggccatcggtccccactgccccattctggtgcgccggacgctggaggtcaacggcgaaagcgttacccgcgtggtgcccagcacccccggccggatcatcttcaacaagaacattcctcaggatctgggcttcgtggaccgcagtgatcccgagcacatctgcgactacgagatcaccttcacctgcggcaagaagcagctgggccagatcgtggaccgcaccatcaacaagcacggtttcactgtggcttccgaggtgctggacgccatcaagtccaccggctaccataactccactatcgccgccatcaccgtttccatcgcggatatgaccattcctcccaagaagtacgagctggtcgccgcttccgagcagatggtggtggacatcgaaaaccagtacaagatgggctttatgaccgaccacgagcgttacaagcaggtggtgcaggtctgggaaaagaccaccgacgaggtttctaccgctctgcaggagaacctggaccgctacaaccccatcttcatgatggcggactccggcgcccgtggttctatgaagcagatccgtcagctggccggtatgcgcggcctgatcgcaaacaccgccggtaagaccatcgagatccccatcaaggcaaactaccgcgaaggtctgaccgctctggaatacttcatttcctcccgtggtgcccgtaagggcctggccgataccgctctgcgtaccgcagactccggttacctgacccgccgcatggtggacgtctctcaggacgtcatcatccgggagcaggactgcggcgtgacccacggcatcaaggtctcccgcatcagcgaaaacggccaggtcattgagaagttctctgaccgcgtccgcggccgctacctggttggcgacgtggtggatgccgagaccggcgaggtgctgatccccaacaccaagatgatgatggaggacgacgccaagctcatggagactcgtgcatgggtccagaagaacccccgccagggcgacgagtgcagctttgatcccgccaaggacgagtatcccaccgtcatgatccgtaccgttctgacctgcaaggcccacagcggtgtgtgcgccaagtgctacggcatgaacctggccacccagcagcctgttggccccggcgaggcggtcggcatcatcgcggcccagtccatcggcgagcccggtacccagctgaccatgcgtaccttccataccggcggtctggccggcggcgatatcacgcagggtcttcctcgagttgaggaactgttcgaggcccgccgtcccaagcggatggccaccatcgctgagatcggcggtaccgttcgcttcgaggaagccgccaagggcagcctgatgaacctgatcgtcacggccagcgacggcgagacctgcacctacgcagtgcctcacaccggcctgctggtgaaggacggcgaggtcatcgaaaagggtactcagctgacctacggcgctctgaacccccacgaggtcctgcggatccgcggcaatgacgctgtttacaactacctcattcaggaagttctgcgcgtgtaccgtcagcagggcgttgacatcaacgataagcacattgaggtcatcgtccgtcagatgatgcgtaaggtgcgcattgaggatgccggcgataccaagctgctggacggctccatgaccaacgttctgaagttcgaggccgccaacgaggagatcgaccgccgcaacgcggccggtgagaccaacgagatgggcgagcctctgcggaaggcacaggccacgcagctgttgatgggtatcaccaaggcctctctggccaccgattccttcctgtccgccgcatccttccaggaaaccaccaaggttctgacggaggctgccatcatgggcaagaaggaccacctggtgggtctgaaggagaatgtcctgatcggtaagctgatccctgccggcaccggcctgcaggcgtaccgtacttttgccgaggagctggttcccgctgagactgttcaggaaaaggaagccactctggaggagatctgatctcccggcataccttataatatgttatctgcgaggcggccatccggccgcctcgcagtcgttgttttcatacctgctatcagcagaattgccggtgttccggaaaaatgacggaaaaatcggggatataaaaggcaaagttgaaaaaactggaaaaaattcgtggattttcggaaactacttgacgattttcatcgtccatgctataatttcaaactgcgcggactatattccgcggaattttccatgcgtttcaggaggatgcccccgtgttgacagagcttgcttcccgggaaaaggtgattggcgtgaaacagtccgccagagcgatccgggatggacgggcccagcgggtatttctggcctgtgacgcggacgagcttgttctggaacccatccgcagcgcctgcggcagtcttcccgtggaggaaggctacaccatggcccagctgggccgtgcctgcgggatcgcggtgggagccgccgttgtaacggttttgaactaatttggttttttcggaatagtttctgactgttccgcaaaaaataaaggctgtcgttttcgattggccgcattttcaaagaaaggagaactattccatgcctacttttaaccagctggtccgcaaaggcagagagcaggtgacctacaagtccacttctcccgccctgcagtatggtctgaacactctgaagaccaagaccaccgatctcccttctccccagaagagaggcgtctgcaccgccgtgagaaccgcgacccccaagaagcccaactctgcgcttcgtaagatcgcccgtgtgcgcctgaccaacggctacgaggtcaccgcttacatccccggcgtcggtcactccctgcaggagcactccgtcgtgatgatccgcggcggccgtgtcaaggacctccccggcgtccgttaccacattatccgtggtactctggatactcagggtgttcagggccgtatgcaggcacgttccaagtacggtgccaagcgtcccaagcagaagtaagattctgccactgaattgagctttgccgaaaaggtttatatatatgacacctctttggcaggccgtacagcggctaatgttccgccgctgagtacctatgatttctattctataagaaggagggaagcaaagtgcccagaagaggtaatgttcccaagagagaagttctgcccgatcctatgtacggcagcgttctggtgaccaagctggtcaacagtgtgatgctggacggcaagaagggcgtagctcagaaggttgtttacgctgccttcgaccagatcaaggaaaagacggagaaggaccccgttgaggttttccagcaggcgctggagaacgtcatgcccagcctggaggttaaggctcgccgtgtcggcggcgccaactatcaggtgcccatggaggttcgtcccgcccgtcgtcagactctggccctgcgctggctgacggcctattcccgctcccgcagcgagcgcaccatggccgagcgtctggccggtgagctgatggatgccgccaacaacaccggcgcgtctgtcaagaagcgtgaagagatgcacaagcaggctgaggccaacaaggcgttcgcgcacttccgttggtaaggcaaggagtaagatcgtatgccaagaaaaacaccgcttaaagacgttcgtaatatcggtatcatggcgcacattgatgccggtaagaccaccacgaccgagcgtattctgtactacaccggcgtgaactacaagatcggtgagacccatgacggtaccgccaccatggactggatggcacaggagcaggagcgcggtatcaccatcacctccgctgctaccacctgcttctggaagggttccaagaatcagttcccttccacccgtatcaacatcatcgatactccgggccacgtggacttcaccgttgaggtccagcgttccctgcgcgtgctggacggctctgtgaccgttctgtgcgccaagggcggcgtggagcctcagtctgagaccgtttggcgtcaggcagacgagtacaaggtcccccgcatgatctacgtcaacaagatggacatcatgggcgcggacttctacaacgttctgcacatgatccacgaccgtctcaagtgcaacgccgtgcccatccagctccccatcggcgccgaggataccttcaagggcatcatcgacctggtggagatggacgctgacgtctactatgatgagatgggcaaggatatgcgcgtggaggagatccccgccgatatgatggatctggccaacgagtatcgcgagaagctgctggacgccgtctccatgttcgatgactccattatggaggactatctggagggcaaggagatcgaccagaagcgtatccgcaaggctatccgtatggccaccattgagaacgagatggtccccgttgtctgcggtacttcctaccgtaacaagggcgttcagaagctgctggatgccatcgtggactatatgcccgctcccgacgacgtgcccgccatcaagggcaccaaccccaagaccgatgaggaagaggaccgtcatcccagcgatgatgagcccttctccgctctggccttcaagatcatgaccgacccctatgtgggccgtctgagcttcttccgtgtgtactccggtcacctgactaccggttcctccgttctcaacagcgtgaagaaccagaaggagcgtatgggccgtatcctgcagatgcatgccaatcaccgtgaggacatcgaagaggtctgggccggcgatattgccgccgccgtgggcctgaagaacaccaccaccggtgataccctgtgcgacgaaaaggcccccgtgatcctggagtccatggacttccccgagcccgtgatccgtgtcgccatcgagcccaagaccaaggctggtcaggagaagatgggtctggcattggtgaagctggctgaggaggaccccaccttcaagacctacaccgatgaagaaaccggccagaccatcatcgccggcatgggcgagctgcatctggagatcattgttgaccgtctgctccgtgagttcaaggtggaagccaatgtcggcgctcctcaggtcgcttacaaggagactgtccgcaagaaggtggatcaggacaccaagtacaagcgccagagcggtggctccggccagtacggccatgtcaagatcaccgtggagcccaacgagtccggcaagggttacgagttcgtcaacgctgtcgttggcggcgccatccccaaggagttcattcccgctgtcgatgccggtatccagggtgccctgcagtccggcgttgtggctggcttccccgtggtggacgtgaaggttaccctgtatgacggttcttatcacgaagtggactcctccgaaatggcatttaagatcgccggctctatggccttcaaggaggcctgccgcaaggctgatcccgtcctgctggagcccatcatgaaggtttccgtcatcgtgcccgacgagtatctgggcaccgtcatcggcgacctgacctcccgccgcggccagatccagggacaggaggcccgtcccggtgcacagcaggtggacgctctggtgcctctggccaacatgtttggctacgctaccgacctgcgttccaatactcagggccgtggccagtacaccatggagccccacagctacgccgagatccccaagagcatccgcgacaagatcgtggaggagcggggcaagaaagccgactaattcaggtcttgcttttcccggcgggatattgtaaaatatacggtgctatgaaacgcaccgtccatatcaatccattatcattcatttaactgacaggaggattttcaaatggctaagcagaaatttgaaagaaccaagccccatgttaacattggcaccatcggccacgttgaccacggcaagaccactctgaccgccgctatcaccaagtggctgtccctgcagggcaaggccgagttcgaggcttatgacagcatcgataaggctcccgaagagaaggaacgcggcatcaccatcaacaccgctcacgttgagtatgagaccgagaagcgtcactatgctcacgttgactgcccgggccacgccgactatatcaagaacatgatcaccggtgctgcccagatggacggcgctatcctggtcatcgctgctaccgacggccccatggctcagacccgtgagcacatcctgctggcccgtcaggtcggtgtgcccgctatcgttgtgttcctgaacaagtgcgatcaggtcgatgacgaggagctgctggagctggtggagatggaagtccgcgagctgctgaccacctacaacttccccggcgacgatctgcctatcatcaagggttccgctctgaacgccctgatttccgagtccaccgatcccaacgctcccgagtatgcctgcatcaaggagctgatggacgctgttgacgattatatccccactcccgaccgtaaggccgatatgcccttcctgatgcccgttgaggacgtcttcaccatctccggccgtggtaccgttgctaccggccgtgtggagcgtggccagctgaagctgtccgaggaagtggaaatcgttggtctgtccgacgagaagaagaagaccgtcgttaccggtatcgagatgttccacaagctgctggactacgccgaggccggcgacaacatcggcgctctgctgcgtggtatcgaccgtcagggtgttgagcgtggtcaggttctgtccaagcccggctccattcatccccacaccaagtttgttggccaggtttacgttctgaccaaggacgagggtggccgtcacactcctttcttcaacaactatcgtcctcagttctacttccgtaccaccgatgtgaccggcgtcatcactctgcccgagggcaccgagatgtgcatgcccggcgataacgtggacatgaaggtcgaactgatcacccccatcgccattgaaaagggcctgcgtttcgctatccgtgagggtggccgtaccgttggttccggcgttgttatcgagatcgacgaataattcgcaccaatagaaaggcctgccgcttagcggcaggtcttttttacgcccaattcaattttgtgttcccgacagcctcgggattctgtattttcaaggggatcagaggatgctggaacacaaaatggattaggcattttggctgtttgctcgatatgggcgatgatagcggcaataaactgctggctgcccggtcggaagtgggggggggtctgtggagcagtcagctatcaggaggcatccgtttgctgtgggaaaaccaatgtgtcctgaaatccgtcggtcccggtgcagaccacgtcccccgccaccggaaggtcctcgcagatgtagaggttgagctgaacgccgtcgggccgctggggatagttggtgacggtgtaggtgaaacgggttacctgcttgccgcagcaggtctctaagtcgaagccctgcgccttttgcagatcgttgtaggtgatgtagtccccgctgagcttgggcggcagcagaaattgcagcgtggtcagcggttccgggtcgatctcccagcccagttcccgcagatatgccactctctctccgttgttggaaagacagggctgctctgacgcacccgcaccgccgcgctgccccagcagcaggatcagcgccgccagaacggcccctgcaagaatgaccgccagtgcggccttttttcgtgtcagtcgaatcgcttggatcatcatggtcatcatccctcctgtttgtttctattccattttccatccgattatgataaaattgaaaaaaacagcgtgggaggatcagttatggcggcgcagcggctggataagatcatcgcctctacggggcggtggtcccgcagggaagtgaaggacctggttcgtcagggacgggtgacggtggacggggtcccggcccggtcggctgaggaaaaggcggacccggagcaggctgtgatcgcggtcaacggagaaaagctgaactggcgccggtatacttgggtcatgctgaacaagccggcggggtatctgtccgccacggaggacggccggggggcaacggtgttggacctgctgcctcaggatttgcagcggcagggcctgttcccggtgggacggctggataaggacacggaaggcttgctgctgctgaccaacgagggcggactggctcacgagctgctgtctccgaaaaagcatgtggataaggaatactatgtccgggtggcgggacgtcttagtgcggcggacagtgccgcctttgcggaaggcttgcacctggatgacggtttgatctgccaaccggcggaattgcggatcctgacctccggcgaggagagtgaagcccgtgtgattttgcgggaggggaaatttcaccaaatcaaacggatgctggcgtatctgggaaagccggtgttgtatttggaacgggtccgcatgggcaatttgctgttggatccggctctggagcggggtacgtaccgtttgctgaccgcagaggaatggctggcattagcaaaactgacggaggagacaggaaaaactcgaaacttcaacaaaaaggaaagcgattttttgttgaaaaaagaaaaaacatcttgcaatccgacaaaataatcgctataatgaccttactgacagattgcacaataggtatgcgcgggtaggccctgcgtgatccatagttttcgtgttgaggaggaacagccatgtccggaagaatctttcagaacgtagttctgcaattgaaggaaaacacggatcgaaccgtcggcgtgatcgacggtgagggcgttgtcattgcctgcagcgagctgtctatgatcggccagcgctggagcgagtatgtggcggcggtaaacggcgccgccggcagcatggtctgctttgacggcaagaccttcaaggcgctcagcggctggggaaaccagtttgattacgccgttttcgcctttggcgataatgagatcagcaagaccatctgctctatggcgacggtggcgctgaacgcagccaagagctattatgaggaaaagcatgaccgggggtcctttgtcaaggacatcatctccgacaacatcatgctgggcgatatttatatgcgggccaaggaactgcgggtggccaccgacgtcagccggggcatcttcgccgtccgggccttgcagaagggggaatccgttcccacggagaccattcaggccatgttcccggaccgccagaacgactttgtcctcagcgtcggcgagggggatgtggttctgatccgccagctgccggacggcgcgggcagcaaggaactgaacaagactgccgcccagatcgaggaggccctccgggtcaacggtgagagcaccgtggtggtgggcatgggcaccatcgccatgcacctgcgggatctggccaagagctataaggaggctcagatcgccatcgaggtaggcaaggtctttgacaccgaaaagtacatcatcaactatgaaaatctgggtatcggccgcctgatctatcagctgcctactaccctgtgcgagatgttcctccaggaggttttcaagaagaaccccatcgacgcgctggataaggaaactctgttcaccatccacaagttctttgagaacaacctgaacgtttccgagaccgcccggaagctgtttgtccaccggaatacgctggtgtatcgtctggagaagatcaagaagctcaccggtctggatctccgggagtttgacgatgccatcaccttcaaggtggcgctgatggtcaagaaatatctgaccagccggggcattgattcctgatacttttacatgtgagaaaccgggaagccgtcaggcttcccggtttgaggctgtcgataaagtgataaattttccgcgacggtaaggaagggtgtgtgcgggaaacccaagaagggtgtcccgcgccattaaaatcctaagttttcagaacttttatgaagttctgaaaacttgctcagcggggagaaaagactttttcgacacgctgaaaccgggaagccgtcaggcttcccggttttttgtcggaacgagactgttctcaaagcaaaaaacagctttccaaggagcgggggcggtggggaaccggaaaaatttcccgggaaaaactttgaaaggaatctgcaaggaaacgttgcaatgtcccgaaaagccgtatataatgtgactatatgtagtattatgtcgacctgatcccatggggacaggccgattggacaaagaataaggagactgcttgatgatccgcctgaaagacgtggaaatggaatatcccaacgggacccgtgccatccggggtatcagcgccgccattgaggacggcgagtttgtgtttttagtgggtccctctgggtccggaaaatctaccattatcaaaatgctcaccggggaggaggtccccaccgcaggccgtatcatgatcaacggcttttccgtcagcaacattgcggagcggcaagtccccatgatgcgccggacgctgggcgtcatctttcaggatttccgcctgatcgagaaaaaaacggtctatgaaaatctggaatttgtcatgcgggctgttggtatgccgaaaaaagagatcaaacagcgcattacatacgttttgcagctggtgggtctggaaaagaaggcggagaatttccccagcgagctttccggcggcgagcagcagcgcgtggccatcgcccgggcactggtgaacaaccctgctaccatcattgccgacgagcctaccggcaatctggacccggagcgctccatggagatcatgacgctgctggtgaagatcaaccagctgggcaccaccgtgctggtagtgacccacgaaaaggatctggtaaacaaattcggcaagcgggtcattaccattgaccagggccgcatcatcaatgacagcgtaggcggctatgtgggagggcatatccatgagtaaacacgatttcggatatttcttccacgagggtctatccaatatgttcagccacggcttcatgtccttcgccgccatcggcattaccgtggcgtgcctgctgatcatgggaacctttacactggtggccgtcaacgcggacgccaacttgaagcaggcggagcaggacaatgagattttagcatttgtggatgacagctatacggaggcacaggccaaggccctgcaaaagaaactggaagcggtggacaatgtggcgtccgtcacctttatctcccgtgaggaggccatgcagtccttcatcagcgaacacccggatgaggaatattttcaggatctggaccccaacatcctccgggaccgattcgccatcaaggtcaaggagctgaagttccagagccagacagtggaactcatcaaggccattcccggcatcggcggcatcaacgcctatgcggagctgaccaacggcttcatcacagtccggaatatcgccacggtcatctgcctgacgctgatcgcagtgctgttcgttgtgtccatgttcattatttccaacaccatcaagctcaccacctttgaccggcgggatgagatcgccattatgaaaatggtgggcgcgaccaacggctttatccgctggccctttgtgtatgagggcttcatgctgggccttaccggtgcgattcttgcctttttgctgcaatggggcttgtatgaagccattgcgcagggcgttgccaacaatgacaccttacagctcctttccatcgtgcccttccagcagctctggaagccggtgggcggtgtatttctgggggccggcatcctcattggcgtaggcggcagcctttccgccatccggcggttcctccaggtgtaaaggaggacgggcatgaagaaaaacaagcgctatgtccgcatctgcgccgcgctgctctgcgcggtgctgtgcctgtcggtgaatgttgctccggccatggccgccaaggtcacccaggcggatatcgacgccctgaaggggaacgccaccagcctggataaaaagcaaaaggagatccagagcaaactcaacagtctgaagaacgacaaggcggcggcggtgcagaaaaagacccttctggatgaccagatcgccaacaccaacgccaagatcagcaacacggaggctcagatctccgactacaacgcccttatttctcaggcggaaatcgaactggcggacgcccagcagcgggaggaggctcaatacgagctgttctgcaagcgggtccgggaaatggaggagcggggcaccatcagctattggtcggtgctgttcaaggccaacagcttttccgacctgctgggcagtctggacttcatcaatgaggtcatggactatgaccggcgggtgattcaggacctccagaccctacaggcggagatcgcggagaagaaagccggtctggaagccaataaggcggcgctggaagccgccaaagcagaactggagacccagaaaaagcagctcagcgcccagcgggacgaagccaacaagctggtcaaggagatcgacgacaacgccgccgagtatcaggccacgctgaaggagctggaggccgaggagcgccgcatcgagcagcaggtcaagcgaatgcagaagaagctggaagaacagatggcggcggagggaaagaaatacaacactaaccccggcggctatatctggccggtggacagccggtatatcacctccaccgtaggcgggcgtaattcccccggcggcgttggctccaccaaccacaagggcaccgacatcggccgggtgggttacaccagtccggtgtacgctgccaaggcgggcacggtcatcatcgcccagcggtccagctcctacggcaactatgtggtcatttctcacggcgtgggcaacaccaccctgtacgctcacatgagcagcatcaaggtcagcgtgggaacctacgtcaagcaggggcagaccatcggcatcaccggctccaccggacactccactgggccccacctccactttgaggtggtggaaaacaatgtgcggatcaatcccctgagccacggcgcggcgccgaagaaggggtatctgacgggctacaccctctccggcacctcggtgggcaaataaaaggaggaagtgcgaatgtatctgaaagcgatcaacgccacgctggccgcgtgggttgtgggactgtttgccgatgccaatatccgcttaggcgatccgcagggctttctgtgtctgcggggactgctgcctgtgctggccatggggctttgtatcctcagcgaactgaaaaagaagtaaggaacggcgaaccgttctgaatcgacctcctgtcccataccatggggcaggaggttgatcgttatggtaggaatgatgctttgggaaccaagcgggcactggacccgtcctgttacgttaaaagaggtcagcgttctgcatatccggtttctctgcgcccggatggctcaggaccggcgtaggaaccccttaacggagcggcggaggctccgtaccgccggaaaaaagctgctgcggcagggagtggagcaagtggtactgcctgccggggcctcggcagagacgctgccggagggattacgtccggtggaaacggtgtcgctccggcgggccatcgccgcggactggtgcggagagctgctgcggttccggggggaaaaccccgccggggcgcgggtgctgatcacggcggacgccctctccggcgaggtggtgcggacggtgacggagctggctctgcggcaccggtatctcatattgaaggtccccttcggcggggaggagctgtgccgccgtctgcggcgggaatacggcgtgtccatcgtgctgaacccggagacggagcgggagccggcgtctgtccacatggcctttgaccctacggaagcgcagggcggcggctttttgccgttgtatgacgaatcgctgcccctgcctcggctcctgctgccgccggaggtggaggcaaggctgccggagggccttgaccggggccagcttctgtcggtcctgtggcggaccggcgctctgcggccggggcaggtgtccgtgcagctgggagaaacggaaaacaaaggggccgttcccgaaatcagggccttttgcccttgacaatccggaagatacctattacaatataaaaccatggtaaattaggagtgttatacacttcaggataatgaaaggaacagccgaaatggaaaaagaatacaaaatgagccaagctcgtaaggacgagctggagcaggaactgaattatctgaagaccacccggtccgacgaggtggcggagcagatcaagatcgcccgcggcttcggcgacctcagcgaaaacagcgagtatgatgaggcaaagaacgagcagggcaagctctattcccgcattgccgagctggaagtgatcctgcagcacgtggtcatcgtggatgagtccgccgcgtctgacgccatcaccatcggctgcaccgtcaccgttcagggcgccgatggcaaggaagccagctataagatcgtcggctctcaggagtccgatcccatgcacggtatcatctccgaggagtctcccttcggtaaggcgttcctgggcgccaaggaaggccaggaggtcgtggtggaagcgcccttcggcaacatccgttacaccgttaagaagatcgaacgctaaggagaaagaagcatggctgaacagaagaatccccaggcccagccggagctgagcctgtccgagcagacccgtattcgccgggagaagctgacgaatctccaggcagagggccagaacccctttgtgatcacccgctttgactgggatgcaacctcccagcagatcaaggacaacttcgacgccatggagggcaagcccgtcaaggtggcaggccgcctcatgagcaagcgcggcatgggtaaggtatctttctgcgatttgcaggaccgggacggccgcatccagctctacgcccgtcaggacgagatggacgaagaggtctataagaagttcaagaagttcgacatcggcgacatcgtgggcgtcgagggcgaggcgttccgcacccagcggggcgagatgagcgtccgggcgcataacatcaccctgctgtccaagtccctcctgcccctgccggagaagttccacggcctgcaggataaggaactgcggttccgtcagcgctatgtggacctgatggtgaaccccgaggtgaagaagaacttcgttatccgttctcagttcatcaagttcatgcggaactatctggacaacatgggctacatggaagtggagacccccgttctgaacaccatcgccggcggcgccgccgcccggcccttcatcacccatcacaacacgctggacattgatatgtacatgcgcatcgccacggagctgccgctgaagcggctcatcgtgggcggcatggaccgggtgtatgagatcggccgcattttccgcaacgagggcatggaccccaagcataaccctgaattcaccaccgtggagatgtatcaggcttacgccgacttccacactatgatggacattgccgagggcattctggcaggcgctgccaaggagatcaacggcagctatcaggtggagtggatgggcgagcagatcgacctgactcccggctggcgccggctgaccatggtggacgccgtcaaggagtatgtgggcgtggacttcggcgccatcaccgatgacgccgaggccgtggccgcagctaaggccgtgggcgtggaactggcggatgccgccgaaaagacctggggcaacgccctgtacgcctgcttcgatcagaaggtggaggagaagctgatccagcccaccttcattaccatgtatcctgtggaggtcagccccctgaccaagcgcagccctgctgatccccggctgacggagcgcttcgagctgtttatctgccacagcgagctggccaacgcctattccgagctgaatgaccccatcgaccagcgccagcgctttgaaaagcaggtggagcagcgggagcggggcgatgacgagaccgaaatgctggacgaggatttcctcaccgccatggaatatggtatgcctcccacaggcggcatgggtatgggcatcgaccgctgcgtcatgctgctcaccggcgcggacaccatccgggaggtcatcctgttcccgaccatgaagccgctcggagagtaatacttgaaaaatgttctgaaatgggctaaaaacaaggaaagatgcctgttttgagaacaaaaagctgtagcatttgagaagcgattttcattttaccacagctttaccacatttgccgaacataccgcggttttaccccggtgggggccaaaaaatggcgcattatgtggatgaagtttcctgttgacaaaacagagaaatccgcctataatgataatagaaacagtaatgtttccggtgtgagagcaccgtaaaaagttgtgctgggagtgggacaggataaaaacccacgccgaatgacatcttaactgggtgtcgcgtccggcagcgggaattaactgctgtagtccatgcgggggacttaattatttccgcaccaatagacgctttaactgggcgtcgcggctgacaaccagcagaaaactctctactcaagcagctaaggaggaatagcgttggctattcctccttttctatgattatgtttgtcgaaagaggcagagatatggatacaaaaaatatcaaggacgaacagatccgcaagcaaatcataactgcctcagaagtgtatcgggacaaactcgctggtagagttttcttatatgtgtatggagaatcttactttgaagtagtttttccgacagatcgcttcaggcacttgactggcgtaaattcttctatcagtgctcaagaattttatgacaaagcaaaaagttcaatgctgtctgctggtcagatcttctatgacagggagcatacatacagaggtgcgaagagaaaacttccgtgcttgacgatgttgcccgcactgacaaataatgttgtatgcgttgtaaaagatatgaagactgtcacccttacttacaaaatcggtgtaaccaatttagattttacgattggtttgtctgagaatcttgatttggaaggaaataagataaacgattggtttttacccagaacattgcgcgtgaaggataaagcgattgagagtagcgctgacgcggagttcattgattttatcttttctaaggatgcttctgtggacaagtattctacaatgacatacgctgataaagataaaaagcctccattggttatcaaagattttctttctgatgatcttgtgaagtatctatattgacaaagttgcgactaatcgaatgttggttcttttaccagggggttggcctacgggctgactccctattttttttgacgagaaaatggggaaaggatacagatttctacgt

SEQ ID NO: 12145 - DNA, 314 bp, Unknown
  gut microbiota DNA sequence
gtagccagcagggggctctcgcagacaatgaccttgtcggcgccgtagccgcccagctccttagcggcggactcaatgccctcgccgcccagcagcagaccgcacaggttcacgcccagctcgttggccaggtcgcggcccttggagatcagctcgaaatcggtgggcatcagcttgccctcgcgctgctcgcagaacacccatacatccttgaaagcagcgatatcagcactattgaaattagacatgattttctatcccctttcttagatgatgtgcttagcggccagaataccggccagcttctcgcaggt
